(19) United States
(12) Patent Application Publication
(10) Pub. No.: US 2011/0245090 A1
(43) Pub. Date: Oct. 6, 2011

(54) COMPOSITIONS AND METHODS FOR THE TREATMENT OF IMMUNE RELATED DISEASES

(76) Inventors: Alexander Abbas, Belmont, CA (US); Hilary Clark, San Francisco, CA (US); Wenjun Ouyang, Foster City, CA (US); P. Mickey Williams, Half Moon Bay, CA (US); William I. Wood, Cupertino, CA (US); Thomas D. Wu, San Francisco, CA (US)

(21) Appl. No.: 13/046,485

(22) Filed: Mar. 11, 2011

Related U.S. Application Data
(63) Continuation of application No. 12/574,818, filed on Oct. 7, 2009, now abandoned.
Application No. 12/574,818 is a continuation of application No. 10/567,939, filed on Dec. 4, 2006, now abandoned.
(60) Provisional application No. 60/493,546, filed on Aug. 11, 2003.

(51) Int. Cl. C40B 30/00; C12Q 1/68; G01N 33/566

(52) U.S. Cl. 506/7; 435/6.11; 435/6.1; 435/7.1

(57) ABSTRACT

The present invention relates to compositions containing novel proteins and methods of using those compositions for the diagnosis and treatment of immune related diseases.

### RELATED APPLICATIONS

[0001] This application is a continuation of U.S. patent application Ser. No. 12/574,818, filed Oct. 7, 2009, which is a continuation of U.S. patent application Ser. No. 10/567,939, filed Dec. 4, 2006, which is a U.S. national stage patent application under 371 of PCT/US04/26249, filed Aug. 11, 2004, which claims priority to U.S. Provisional Patent Application Ser. No. 60/493,546, filed Aug. 11, 2003, the entirety of which are incorporated herein by reference.

### INCORPORATION-BY-REFERENCE

[0002] The contents of the text file named “GNE-0267USSeq”, created Nov. 4, 2008 and being 22.6 MB in size, which was filed with the United States Patent and Trademark Office on Nov. 4, 2008 regarding U.S. application Ser. No. 10/567,939, are hereby incorporated by reference in their entirety.

### FIELD OF THE INVENTION

[0003] The present invention relates to compositions and methods useful for the diagnosis and treatment of immune related diseases.

### BACKGROUND OF THE INVENTION

[0004] Immune related and inflammatory diseases are the manifestation or consequence of fairly complex, often multiple interconnected biological pathways which in normal physiology are critical to respond to insult or injury, initiate repair from insult or injury, and mount innate and acquired defense against foreign organisms. Disease or pathology occurs when these normal physiological pathways cause additional insult or injury either as directly related to the intensity of the response, as a consequence of abnormal regulation or excessive stimulation, as a reaction to self, or as a combination of these.

[0005] Though the genesis of these diseases often involves multistep pathways and often multiple different biological systems/pathways, intervention at critical points in one or more of these pathways can have an ameliorative or therapeutic effect. Therapeutic intervention can occur by either antagonism of a detrimental process/pathway or stimulation of a beneficial process/pathway.

[0006] Many immune related diseases are known and have been extensively studied. Such diseases include immune-mediated inflammatory diseases, non-immune-mediated inflammatory diseases, infectious diseases, immunodeficiency diseases, neoplasia, etc.

[0007] T lymphocytes (T cells) are an important component of a mammalian immune response. T cells recognize antigens which are associated with a self-molecule encoded by genes within the major histocompatibility complex (MHC). The antigen may be displayed together with MHC molecules on the surface of antigen presenting cells, virus infected cells, cancer cells, grafts, etc. The T cell system eliminates these altered cells which pose a health threat to the host mammal. T cells include helper T cells and cytotoxic T cells. Helper T cells proliferate extensively following recognition of an antigen -MHC complex on an antigen presenting cell. Helper T cells also secrete a variety of cytokines, i.e., lymphokines, which play a central role in the activation of B cells, cytotoxic T cells and a variety of other cells which participate in the immune response.

[0008] CD4 T helper cells play central role in regulating immune system. Under different pathogenic challenges, naive CD4 T cells can differentiate to two different subsets. T helper 1 (Th1) cells produce IFN-gamma, TNF-alpha and LT. Th1 cells and cytokines they produced are important for cellular immunity and critical for clearance of intracellular pathogen invasions. IFN-gamma produced by Th1 cells also helps antibody isotype switch to IgG2a, while the cytokines produced by Th1 cells activate macrophages and promote CTL reaction. In contrast, T helper 2 (Th2) CD4 cells mainly mediate humoral immunity. Th2 cells secrete IL-4, IL-5, IL-6, and IL-13. These cytokines play central in role in promotion of eosinophil development and mast cell activation. Th2 cells also help in B cell development antibody isotype switching to IgE and IgA. Th2 cells and their cytokines are critical for helminthes clearance.

[0009] Although Th1 and Th2 cells are necessary for the immune system to fight with various pathogenic invasion, unregulated Th1 and Th2 differentiation could play a role in autoimmune diseases. For example, uncontrolled Th2 differentiation has been demonstrated to be involved in immediate hypersensitivity, allergic reaction and asthma. Th1 cells have been shown to present in diabetes, MS, psoriasis, and lupus. Currently, IL-12 and IL-4 have been identified to be the key cytokines initiating the development of the Th1 and Th2 cells, respectively. Upon binding to its receptor, IL-12 activates Stat4, which then forms a homodimer, migrates into the nucleus and initiates down stream transcription events for Th1 development. IL-4 activates a different Stat molecule, Stat6, which induces transcription factor GATA3 expression. GATA-3 will then promote downstream differentiation of Th2 cells. The differentiation of Th1 and Th2 cells are a dynamic process, at each stage, there are different molecular events happening and different gene expression profiles. For example, at the early stage naive T cells are sensitive to environment stimuli, such as cytokines and costimulatory signals. If they receive the Th2 priming signal, they will quickly shut down the expression of the IL-12 receptor b2 chain expression and block further Th1 development. However, at the late stage of Th1 development, applying Th2 differentiation cytokines will fail to switch cells to a Th2 type. In this experiment, we mapped the gene expression profiles during the whole process of Th1 and Th2 development. We isolated naive CD4 T cells from normal human donors. Th1 cells were generated by stimulation of T cells with anti-CD3 and CD-28 plus IL-12, and anti-IL-4 antibody. Th2 cells were generated by similar TCR stimulation plus IL-4, anti-IL12, and anti-IFN-g antibodies. The undifferentiated T cells were generated by TCR stimulation, and neutralizing antibodies for IL-12, IL-4 and IFN-gamma. T cells were expanded on day 3 of primary activation with 5 volumes of fresh media. The fully differentiated Th1 and Th2 cells were then restimulated by anti-CD3 and anti-CD28. RNA was purified at different stages of T cell development, and RNA isolated for gene chip based expression analysis. Comparing gene expression profiles enabled us to identified genes preferentially expressed in Th1 or Th2 cell at different stages. These genes could play very important roles in the initiation of Th1/Th2 differentiation, maintenance of Th1/Th2 phenotype, activation of Th1/Th2 cells, and effector functions, such as cytokine production, of Th1/Th2 cells. These genes could also serve as molecular markers to identify and target specific Th1 and Th2 subsets. Thus, these genes are potential therapeutic targets for many autoimmune diseases.

[0010] Autoimmune related diseases could be treated by suppressing the immune response. Using neutralizing antibodies that inhibit molecules having immune stimulatory activity would be beneficial in the treatment of immune-mediated and inflammatory diseases. Molecules which inhibit the immune response can be utilized (proteins directly or via the use of antibody agonists) to inhibit the immune response and thus ameliorate immune related disease.

[0011] Despite the above identified advances in T cell research, there is a great need for additional diagnostic and therapeutic agents capable of detecting the presence of a T cell mediated disorders in a mammal and for effectively reducing these disorders. Accordingly, it is an objective of the present invention to identify polypeptides that are overexpressed in activated T cells as compared to resting T cells, and to use those polypeptides, and their encoding nucleic acids, to produce compositions of matter useful in the therapeutic treatment and diagnostic detection of T cell mediated disorders in mammals.

### SUMMARY OF THE INVENTION

### A. Embodiments

[0012] The present invention concerns compositions and methods useful for the diagnosis and treatment of immune related disease in mammals, including humans. The present invention is based on the identification of proteins (including agonist and antagonist antibodies) which are a result of stimulation of the immune response in mammals. Immune related diseases can be treated by suppressing or enhancing the immune response. Molecules that enhance the immune response stimulate or potentiate the immune response to an antigen. Molecules which stimulate the immune response can be used therapeutically where enhancement of the immune response would be beneficial. Alternatively, molecules that suppress the immune response attenuate or reduce the immune response to an antigen (e.g., neutralizing antibodies) can be used therapeutically where attenuation of the immune response would be beneficial (e.g., inflammation). Accordingly, the PRO polypeptides, agonists and antagonists thereof are also useful to prepare medicines and medicaments for the treatment of immune-related and inflammatory diseases. In a specific aspect, such medicines and medicaments comprise a therapeutically effective amount of a PRO polypeptide, agonist or antagonist thereof with a pharmaceutically acceptable carrier. Preferably, the admixture is sterile.

[0013] In a further embodiment, the invention concerns a method of identifying agonists or antagonists to a PRO polypeptide which comprises contacting the PRO polypeptide with a candidate molecule and monitoring a biological activity mediated by said PRO polypeptide. Preferably, the PRO polypeptide is a native sequence PRO polypeptide. In a specific aspect, the PRO agonist or antagonist is an anti-PRO antibody.

[0014] In another embodiment, the invention concerns a composition of matter comprising a PRO polypeptide or an agonist or antagonist antibody which binds the polypeptide in admixture with a carrier or excipient. In one aspect, the composition comprises a therapeutically effective amount of the polypeptide or antibody. In another aspect, when the composition comprises an immune stimulating molecule, the composition is useful for: (a) increasing infiltration of inflammatory cells into a tissue of a mammal in need thereof, (b) stimulating or enhancing an immune response in a mammal in need thereof, (c) increasing the proliferation of T-lymphocytes in a mammal in need thereof in response to an antigen, (d) stimulating the activity of T-lymphocytes or (e) increasing the vascular permeability. In a further aspect, when the composition comprises an immune inhibiting molecule, the composition is useful for: (a) decreasing infiltration of inflammatory cells into a tissue of a mammal in need thereof, (b) inhibiting or reducing an immune response in a mammal in need thereof, (c) decreasing the activity of T-lymphocytes or (d) decreasing the proliferation of T-lymphocytes in a mammal in need thereof in response to an antigen. In another aspect, the composition comprises a further active ingredient, which may, for example, be a further antibody or a cytotoxic or chemotherapeutic agent. Preferably, the composition is sterile.

[0015] In another embodiment, the invention concerns a method of treating an immune related disorder in a mammal in need thereof, comprising administering to the mammal an effective amount of a PRO polypeptide, an agonist thereof, or an antagonist thereto. In a preferred aspect, the immune related disorder is selected from the group consisting of: systemic lupus erythematosis, rheumatoid arthritis, osteoarthritis, juvenile chronic arthritis, spondyloarthropathies, systemic sclerosis, idiopathic inflammatory myopathies, Sjögren's syndrome, systemic vasculitis, sarcoidosis, autoimmune hemolytic anemia, autoimmune thrombocytopenia, thyroiditis, diabetes mellitus, immune-mediated renal disease, demyelinating diseases of the central and peripheral nervous systems such as multiple sclerosis, idiopathic demyelinating polyneuropathy or Guillain-Barré syndrome, and chronic inflammatory demyelinating polyneuropathy, hepatobiliary diseases such as infectious, autoimmune chronic active hepatitis, primary biliary cirrhosis, granulomatous hepatitis, and sclerosing cholangitis, inflammatory bowel disease, gluten-sensitive enteropathy, and Whipple's disease, autoimmune or immune-mediated skin diseases including bullous skin diseases, erythema multiforme and contact dermatitis, psoriasis, allergic diseases such as asthma, allergic rhinitis, atopic dermatitis, food hypersensitivity and urticaria, immunologic diseases of the lung such as eosinophilic pneumonias, idiopathic pulmonary fibrosis and hypersensitivity pneumonitis, transplantation associated diseases including graft rejection and graft-versus-host-disease.

[0016] In another embodiment, the invention provides an antibody which specifically binds to any of the above or below described polypeptides. Optionally, the antibody is a monoclonal antibody, humanized antibody, antibody fragment or single-chain antibody. In one aspect, the present invention concerns an isolated antibody which binds a PRO polypeptide. In another aspect, the antibody mimics the activity of a PRO polypeptide (an agonist antibody) or conversely the antibody inhibits or neutralizes the activity of a PRO polypeptide (an antagonist antibody). In another aspect, the antibody is a monoclonal antibody, which preferably has nonhuman complementarity determining region (CDR) residues and human framework region (FR) residues. The antibody may be labeled and may be immobilized on a solid support. In a further aspect, the antibody is an antibody fragment, a monoclonal antibody, a single-chain antibody, or an anti-idiotypic antibody.

[0017] In yet another embodiment, the present invention provides a composition comprising an anti-PRO antibody in admixture with a pharmaceutically acceptable carrier. In one aspect, the composition comprises a therapeutically effective amount of the antibody. Preferably, the composition is sterile. The composition may be administered in the form of a liquid pharmaceutical formulation, which may be preserved to achieve extended storage stability. Alternatively, the antibody is a monoclonal antibody, an antibody fragment, a humanized antibody, or a single-chain antibody.

[0018] In a further embodiment, the invention concerns an article of manufacture, comprising:
[0019] (a) a composition of matter comprising a PRO polypeptide or agonist or antagonist thereof;
[0020] (b) a container containing said composition; and
[0021] (c) a label affixed to said container, or a package insert included in said container referring to the use of said PRO polypeptide or agonist or antagonist thereof in the treatment of an immune related disease. The composition may comprise a therapeutically effective amount of the PRO polypeptide or the agonist or antagonist thereof.

[0022] In yet another embodiment, the present invention concerns a method of diagnosing an immune related disease in a mammal, comprising detecting the level of expression of a gene encoding a PRO polypeptide (a) in a test sample of tissue cells obtained from the mammal, and (b) in a control sample of known normal tissue cells of the same cell type, wherein a higher or lower expression level in the test sample as compared to the control sample indicates the presence of immune related disease in the mammal from which the test tissue cells were obtained.

[0023] In another embodiment, the present invention concerns a method of diagnosing an immune disease in a mammal, comprising (a) contacting an anti-PRO antibody with a test sample of tissue cells obtained from the mammal, and (b) detecting the formation of a complex between the antibody and a PRO polypeptide, in the test sample; wherein the formation of said complex is indicative of the presence or absence of said disease. The detection may be qualitative or quantitative, and may be performed in comparison with monitoring the complex formation in a control sample of known normal tissue cells of the same cell type. A larger quantity of complexes formed in the test sample indicates the presence or absence of an immune disease in the mammal from which the test tissue cells were obtained. The antibody preferably carries a detectable label. Complex formation can be monitored, for example, by light microscopy, flow cytometry, fluorimetry, or other techniques known in the art. The test sample is usually obtained from an individual suspected of having a deficiency or abnormality of the immune system.

[0024] In another embodiment, the invention provides a method for determining the presence of a PRO polypeptide in a sample comprising exposing a test sample of cells suspected of containing the PRO polypeptide to an anti-PRO antibody and determining the binding of said antibody to said cell sample. In a specific aspect, the sample comprises a cell suspected of containing the PRO polypeptide and the antibody binds to the cell. The antibody is preferably detectably labeled and/or bound to a solid support.

[0025] In another embodiment, the present invention concerns an immune-related disease diagnostic kit, comprising an anti-PRO antibody and a carrier in suitable packaging. The kit preferably contains instructions for using the antibody to detect the presence of the PRO polypeptide. Preferably the carrier is pharmaceutically acceptable.

[0026] In another embodiment, the present invention concerns a diagnostic kit, containing an anti-PRO antibody in suitable packaging. The kit preferably contains instructions for using the antibody to detect the PRO polypeptide.

[0027] In another embodiment, the invention provides a method of diagnosing an immune-related disease in a mammal which comprises detecting the presence or absence or a PRO polypeptide in a test sample of tissue cells obtained from said mammal, wherein the presence or absence of the PRO polypeptide in said test sample is indicative of the presence of an immune-related disease in said mammal.

[0028] In another embodiment, the present invention concerns a method for identifying an agonist of a PRO polypeptide comprising:

[0029] (a) contacting cells and a test compound to be screened under conditions suitable for the induction of a cellular response normally induced by a PRO polypeptide; and

[0030] (b) determining the induction of said cellular response to determine if the test compound is an effective agonist, wherein the induction of said cellular response is indicative of said test compound being an effective agonist.

[0031] In another embodiment, the invention concerns a method for identifying a compound capable of inhibiting the activity of a PRO polypeptide comprising contacting a candidate compound with a PRO polypeptide under conditions and for a time sufficient to allow these two components to interact and determining whether the activity of the PRO polypeptide is inhibited. In a specific aspect, either the candidate compound or the PRO polypeptide is immobilized on a solid support. In another aspect, the non-immobilized component carries a detectable label. In a preferred aspect, this method comprises the steps of:

[0032] (a) contacting cells and a test compound to be screened in the presence of a PRO polypeptide under conditions suitable for the induction of a cellular response normally induced by a PRO polypeptide; and

[0033] (b) determining the induction of said cellular response to determine if the test compound is an effective antagonist.

[0034] In another embodiment, the invention provides a method for identifying a compound that inhibits the expression of a PRO polypeptide in cells that normally express the polypeptide, wherein the method comprises contacting the cells with a test compound and determining whether the expression of the PRO polypeptide is inhibited. In a preferred aspect, this method comprises the steps of:

[0035] (a) contacting cells and a test compound to be screened under conditions suitable for allowing expression of the PRO polypeptide; and

[0036] (b) determining the inhibition of expression of said polypeptide.

[0037] In yet another embodiment, the present invention concerns a method for treating an immune-related disorder in a mammal that suffers therefrom comprising administering to the mammal a nucleic acid molecule that codes for either (a) a PRO polypeptide, (b) an agonist of a PRO polypeptide or (c) an antagonist of a PRO polypeptide, wherein said agonist or antagonist may be an anti-PRO antibody. In a preferred embodiment, the mammal is human. In another preferred embodiment, the nucleic acid is administered via ex vivo gene therapy. In a further preferred embodiment, the nucleic acid is comprised within a vector, more preferably an adenoviral, adeno-associated viral, lentiviral or retroviral vector.

[0038] In yet another aspect, the invention provides a recombinant viral particle comprising a viral vector consisting essentially of a promoter, nucleic acid encoding (a) a PRO polypeptide, (b) an agonist polypeptide of a PRO polypeptide, or (c) an antagonist polypeptide of a PRO polypeptide, and a signal sequence for cellular secretion of the polypeptide, wherein the viral vector is in association with viral structural proteins. Preferably, the signal sequence is from a mammal, such as from a native PRO polypeptide.

[0039] In a still further embodiment, the invention concerns an ex vivo producer cell comprising a nucleic acid construct that expresses retroviral structural proteins and also comprises a retroviral vector consisting essentially of a promoter, nucleic acid encoding (a) a PRO polypeptide, (b) an agonist polypeptide of a PRO polypeptide or (c) an antagonist polypeptide of a PRO polypeptide, and a signal sequence for cellular secretion of the polypeptide, wherein said producer cell packages the retroviral vector in association with the structural proteins to produce recombinant retroviral particles.

[0040] In a still further embodiment, the invention provides a method of increasing the activity of T-lymphocytes in a mammal comprising administering to said mammal (a) a PRO polypeptide, (b) an agonist of a PRO polypeptide, or (c) an antagonist of a PRO polypeptide, wherein the activity of T-lymphocytes in the mammal is increased.

[0041] In a still further embodiment, the invention provides a method of decreasing the activity of T-lymphocytes in a mammal comprising administering to said mammal (a) a PRO polypeptide, (b) an agonist of a PRO polypeptide, or (c) an antagonist of a PRO polypeptide, wherein the activity of T-lymphocytes in the mammal is decreased.

[0042] In a still further embodiment, the invention provides a method of increasing the proliferation of T-lymphocytes in a mammal comprising administering to said mammal (a) a PRO polypeptide, (b) an agonist of a PRO polypeptide, or (c) an antagonist of a PRO polypeptide, wherein the proliferation of T-lymphocytes in the mammal is increased.

[0043] In a still further embodiment, the invention provides a method of decreasing the proliferation of T-lymphocytes in a mammal comprising administering to said mammal (a) a PRO polypeptide, (b) an agonist of a PRO polypeptide, or (c) an antagonist of a PRO polypeptide, wherein the proliferation of T-lymphocytes in the mammal is decreased.

### B. Additional Embodiments

[0044] In other embodiments of the present invention, the invention provides vectors comprising DNA encoding any of the herein described polypeptides. Host cell comprising any such vector are also provided. By way of example, the host cells may be CHO cells, E. coli, or yeast. A process for producing any of the herein described polypeptides is further provided and comprises culturing host cells under conditions suitable for expression of the desired polypeptide and recovering the desired polypeptide from the cell culture.

[0045] In other embodiments, the invention provides chimeric molecules comprising any of the herein described polypeptides fused to a heterologous polypeptide or amino acid sequence. Example of such chimeric molecules comprise any of the herein described polypeptides fused to an epitope tag sequence or a Fc region of an immunoglobulin.

[0046] In another embodiment, the invention provides an antibody which specifically binds to any of the above or below described polypeptides. Optionally, the antibody is a monoclonal antibody, humanized antibody, antibody fragment or single-chain antibody.

[0047] In yet other embodiments, the invention provides oligonucleotide probes useful for isolating genomic and cDNA nucleotide sequences or as antisense probes, wherein those probes may be derived from any of the above or below described nucleotide sequences.

[0048] In other embodiments, the invention provides an isolated nucleic acid molecule comprising a nucleotide sequence that encodes a PRO polypeptide.

[0049] In one aspect, the isolated nucleic acid molecule comprises a nucleotide sequence having at least about 80% nucleic acid sequence identity, alternatively at least about 81% nucleic acid sequence identity, alternatively at least about 82% nucleic acid sequence identity, alternatively at least about 83% nucleic acid sequence identity, alternatively at least about 84% nucleic acid sequence identity, alternatively at least about 85% nucleic acid sequence identity, alternatively at least about 86% nucleic acid sequence identity, alternatively at least about 87% nucleic acid sequence identity, alternatively at least about 88% nucleic acid sequence identity, alternatively at least about 89% nucleic acid sequence identity, alternatively at least about 90% nucleic acid sequence identity, alternatively at least about 91% nucleic acid sequence identity, alternatively at least about 92% nucleic acid sequence identity, alternatively at least about 93% nucleic acid sequence identity, alternatively at least about 94% nucleic acid sequence identity, alternatively at least about 95% nucleic acid sequence identity, alternatively at least about 96% nucleic acid sequence identity, alternatively at least about 97% nucleic acid sequence identity, alternatively at least about 98% nucleic acid sequence identity and alternatively at least about 99% nucleic acid sequence identity to (a) a DNA molecule encoding a PRO polypeptide having a full-length amino acid sequence as disclosed herein, an amino acid sequence lacking the signal peptide as disclosed herein, an extracellular domain of a transmembrane protein, with or without the signal peptide, as disclosed herein or any other specifically defined fragment of the full-length amino acid sequence as disclosed herein, or (b) the complement of the DNA molecule of (a).

[0050] In other aspects, the isolated nucleic acid molecule comprises a nucleotide sequence having at least about 80% nucleic acid sequence identity, alternatively at least about 81% nucleic acid sequence identity, alternatively at least about 82% nucleic acid sequence identity, alternatively at least about 83% nucleic acid sequence identity, alternatively at least about 84% nucleic acid sequence identity, alternatively at least about 85% nucleic acid sequence identity, alternatively at least about 86% nucleic acid sequence identity, alternatively at least about 87% nucleic acid sequence identity, alternatively at least about 88% nucleic acid sequence identity, alternatively at least about 89% nucleic acid sequence identity, alternatively at least about 90% nucleic acid sequence identity, alternatively at least about 91% nucleic acid sequence identity, alternatively at least about 92% nucleic acid sequence identity, alternatively at least about 93% nucleic acid sequence identity, alternatively at least about 94% nucleic acid sequence identity, alternatively at least about 95% nucleic acid sequence identity, alternatively at least about 96% nucleic acid sequence identity, alternatively at least about 97% nucleic acid sequence identity, alternatively at least about 98% nucleic acid sequence identity and alternatively at least about 99% nucleic acid sequence identity to (a) a DNA molecule comprising the coding sequence of a full-length PRO polypeptide cDNA as disclosed herein, the coding sequence of a PRO polypeptide lacking the signal peptide as disclosed herein, the coding sequence of an extracellular domain of a transmembrane PRO polypeptide, with or without the signal peptide, as disclosed herein or the coding sequence of any other specifically defined fragment of the full-length amino acid sequence as disclosed herein, or (b) the complement of the DNA molecule of (a).

[0051] In a further aspect, the invention concerns an isolated nucleic acid molecule comprising a nucleotide sequence having at least about 80% nucleic acid sequence identity, alternatively at least about 81% nucleic acid sequence identity, alternatively at least about 82% nucleic acid sequence identity, alternatively at least about 83% nucleic acid sequence identity, alternatively at least about 84% nucleic acid sequence identity, alternatively at least about 85% nucleic acid sequence identity, alternatively at least about 86% nucleic acid sequence identity, alternatively at least about 87% nucleic acid sequence identity, alternatively at least about 88% nucleic acid sequence identity, alternatively at least about 89% nucleic acid sequence identity, alternatively at least about 90% nucleic acid sequence identity, alternatively at least about 91% nucleic acid sequence identity, alternatively at least about 92% nucleic acid sequence identity, alternatively at least about 93% nucleic acid sequence identity, alternatively at least about 94% nucleic acid sequence identity, alternatively at least about 95% nucleic acid sequence identity, alternatively at least about 96% nucleic acid sequence identity, alternatively at least about 97% nucleic acid sequence identity, alternatively at least about 98% nucleic acid sequence identity and alternatively at least about 99% nucleic acid sequence identity to (a) a DNA molecule that encodes the same mature polypeptide encoded by any of the human protein cDNAs as disclosed herein, or (b) the complement of the DNA molecule of (a).

[0052] Another aspect the invention provides an isolated nucleic acid molecule comprising a nucleotide sequence encoding a PRO polypeptide which is either transmembrane domain-deleted or transmembrane domain-inactivated, or is complementary to such encoding nucleotide sequence, wherein the transmembrane domain(s) of such polypeptide are disclosed herein. Therefore, soluble extracellular domains of the herein described PRO polypeptides are contemplated.

[0053] Another embodiment is directed to fragments of a PRO polypeptide coding sequence, or the complement thereof, that may find use as, for example, hybridization probes, for encoding fragments of a PRO polypeptide that may optionally encode a polypeptide comprising a binding site for an anti-PRO antibody or as antisense oligonucleotide probes. Such nucleic acid fragments are usually at least about 20 nucleotides in length, alternatively at least about 30 nucleotides in length, alternatively at least about 40 nucleotides in length, alternatively at least about 50 nucleotides in length, alternatively at least about 60 nucleotides in length, alternatively at least about 70 nucleotides in length, alternatively at least about 80 nucleotides in length, alternatively at least about 90 nucleotides in length, alternatively at least about 100 nucleotides in length, alternatively at least about 110 nucleotides in length, alternatively at least about 120 nucleotides in length, alternatively at least about 130 nucleotides in length, alternatively at least about 140 nucleotides in length, alternatively at least about 150 nucleotides in length, alternatively at least about 160 nucleotides in length, alternatively at least about 170 nucleotides in length, alternatively at least about 180 nucleotides in length, alternatively at least about 190 nucleotides in length, alternatively at least about 200 nucleotides in length, alternatively at least about 250 nucleotides in length, alternatively at least about 300 nucleotides in length, alternatively at least about 350 nucleotides in length, alternatively at least about 400 nucleotides in length, alternatively at least about 450 nucleotides in length, alternatively at least about 500 nucleotides in length, alternatively at least about 600 nucleotides in length, alternatively at least about 700 nucleotides in length, alternatively at least about 800 nucleotides in length, alternatively at least about 900 nucleotides in length and alternatively at least about 1000 nucleotides in length, wherein in this context the term “about” means the referenced nucleotide sequence length plus or minus 10% of that referenced length. It is noted that novel fragments of a PRO polypeptide-encoding nucleotide sequence may be determined in a routine manner by aligning the PRO polypeptide-encoding nucleotide sequence with other known nucleotide sequences using any of a number of well known sequence alignment programs and determining which PRO polypeptide-encoding nucleotide sequence fragment(s) are novel. All of such PRO polypeptide-encoding nucleotide sequences are contemplated herein. Also contemplated are the PRO polypeptide fragments encoded by these nucleotide molecule fragments, preferably those PRO polypeptide fragments that comprise a binding site for an anti-PRO antibody.

[0054] In another embodiment, the invention provides isolated PRO polypeptide encoded by any of the isolated nucleic acid sequences herein above identified.

[0055] In a certain aspect, the invention concerns an isolated PRO polypeptide, comprising an amino acid sequence having at least about 80% amino acid sequence identity, alternatively at least about 81% amino acid sequence identity, alternatively at least about 82% amino acid sequence identity, alternatively at least about 83% amino acid sequence identity, alternatively at least about 84% amino acid sequence identity, alternatively at least about 85% amino acid sequence identity, alternatively at least about 86% amino acid sequence identity, alternatively at least about 87% amino acid sequence identity, alternatively at least about 88% amino acid sequence identity, alternatively at least about 89% amino acid sequence identity, alternatively at least about 90% amino acid sequence identity, alternatively at least about 91% amino acid sequence identity, alternatively at least about 92% amino acid sequence identity, alternatively at least about 93% amino acid sequence identity, alternatively at least about 94% amino acid sequence identity, alternatively at least about 95% amino acid sequence identity, alternatively at least about 96% amino acid sequence identity, alternatively at least about 97% amino acid sequence identity, alternatively at least about 98% amino acid sequence identity and alternatively at least about 99% amino acid sequence identity to a PRO polypeptide having a full-length amino acid sequence as disclosed herein, an amino acid sequence lacking the signal peptide as disclosed herein, an extracellular domain of a transmembrane protein, with or without the signal peptide, as disclosed herein or any other specifically defined fragment of the full-length amino acid sequence as disclosed herein.

[0056] In a further aspect, the invention concerns an isolated PRO polypeptide comprising an amino acid sequence having at least about 80% amino acid sequence identity, alternatively at least about 81% amino acid sequence identity, alternatively at least about 82% amino acid sequence identity, alternatively at least about 83% amino acid sequence identity, alternatively at least about 84% amino acid sequence identity, alternatively at least about 85% amino acid sequence identity, alternatively at least about 86% amino acid sequence identity, alternatively at least about 87% amino acid sequence identity, alternatively at least about 88% amino acid sequence identity, alternatively at least about 89% amino acid sequence identity, alternatively at least about 90% amino acid sequence identity, alternatively at least about 91% amino acid sequence identity, alternatively at least about 92% amino acid sequence identity, alternatively at least about 93% amino acid sequence identity, alternatively at least about 94% amino acid sequence identity, alternatively at least about 95% amino acid sequence identity, alternatively at least about 96% amino acid sequence identity, alternatively at least about 97% amino acid sequence identity, alternatively at least about 98% amino acid sequence identity and alternatively at least about 99% amino acid sequence identity to an amino acid sequence encoded by any of the human protein cDNAs as disclosed herein.

[0057] In a specific aspect, the invention provides an isolated PRO polypeptide without the N-terminal signal sequence and/or the initiating methionine and is encoded by a nucleotide sequence that encodes such an amino acid sequence as herein before described. Processes for producing the same are also herein described, wherein those processes comprise culturing a host cell comprising a vector which comprises the appropriate encoding nucleic acid molecule under conditions suitable for expression of the PRO polypeptide and recovering the PRO polypeptide from the cell culture.

[0058] Another aspect the invention provides an isolated PRO polypeptide which is either transmembrane domain-deleted or transmembrane domain-inactivated. Processes for producing the same are also herein described, wherein those processes comprise culturing a host cell comprising a vector which comprises the appropriate encoding nucleic acid molecule under conditions suitable for expression of the PRO polypeptide and recovering the PRO polypeptide from the cell culture.

[0059] In yet another embodiment, the invention concerns agonists and antagonists of a native PRO polypeptide as defined herein. In a particular embodiment, the agonist or antagonist is an anti-PRO antibody or a small molecule.

[0060] In a further embodiment, the invention concerns a method of identifying agonists or antagonists to a PRO polypeptide which comprise contacting the PRO polypeptide with a candidate molecule and monitoring a biological activity mediated by said PRO polypeptide. Preferably, the PRO polypeptide is a native PRO polypeptide.

[0061] In a still further embodiment, the invention concerns a composition of matter comprising a PRO polypeptide, or an agonist or antagonist of a PRO polypeptide as herein described, or an anti-PRO antibody, in combination with a carrier. Optionally, the carrier is a pharmaceutically acceptable carrier.

[0062] Another embodiment of the present invention is directed to the use of a PRO polypeptide, or an agonist or antagonist thereof as herein before described, or an anti-PRO antibody, for the preparation of a medicament useful in the treatment of a condition which is responsive to the PRO polypeptide, an agonist or antagonist thereof or an anti-PRO antibody.

### BRIEF DESCRIPTION OF THE DRAWINGS

[0063] The sequence listing submitted herewith, and incorporated by reference in its entirety, discloses the nucleic acids of the invention and their encoded PRO polypeptides as SEQ ID NOs: 1-6464. The present application encompasses specific cDNA sequences which are differentially expressed in activated T cells as compared to resting control T cells and are individually identified, along with the corresponding encoded polypeptide sequence, with a specific SEQ ID NO and alphanumeric designation.

### DETAILED DESCRIPTION OF THE PREFERRED EMBODIMENTS

### I. Definitions

[0064] The terms “PRO polypeptide” and “PRO” as used herein and when immediately followed by a numerical designation refer to various polypeptides, wherein the complete designation (i.e., PRO/number) refers to specific polypeptide sequences as described herein. The terms “PRO/number polypeptide” and “PRO/number” wherein the term “number” is provided as an actual numerical designation as used herein encompass native sequence polypeptides and polypeptide variants (which are further defined herein). The PRO polypeptides described herein may be isolated from a variety of sources, such as from human tissue types or from another source, or prepared by recombinant or synthetic methods. The term “PRO polypeptide” refers to each individual PRO/number polypeptide disclosed herein. All disclosures in this specification which refer to the “PRO polypeptide” refer to each of the polypeptides individually as well as jointly. For example, descriptions of the preparation of, purification of, derivation of, formation of antibodies to or against, administration of, compositions containing, treatment of a disease with, etc., pertain to each polypeptide of the invention individually. The term “PRO polypeptide” also includes variants of the PRO/number polypeptides disclosed herein.

[0065] A “native sequence PRO polypeptide” comprises a polypeptide having the same amino acid sequence as the corresponding PRO polypeptide derived from nature. Such native sequence PRO polypeptides can be isolated from nature or can be produced by recombinant or synthetic means. The term “native sequence PRO polypeptide” specifically encompasses naturally-occurring truncated or secreted forms of the specific PRO polypeptide (e.g., an extracellular domain sequence), naturally-occurring variant forms (e.g., alternatively spliced forms) and naturally-occurring allelic variants of the polypeptide. In various embodiments of the invention, the native sequence PRO polypeptides disclosed herein are mature or full-length native sequence polypeptides comprising the full-length amino acids sequences shown in the accompanying sequence listing. While the PRO polypeptide disclosed in the accompanying sequence listing are shown to begin with methionine residues designated herein as amino acid position 1 in the sequence listing, it is conceivable and possible that other methionine residues located either upstream or downstream from the amino acid position 1 in the sequence listing may be employed as the starting amino acid residue for the PRO polypeptides.

[0066] The PRO polypeptide “extracellular domain” or “ECD” refers to a form of the PRO polypeptide which is essentially free of the transmembrane and cytoplasmic domains. Ordinarily, a PRO polypeptide ECD will have less than 1% of such transmembrane and/or cytoplasmic domains and preferably, will have less than 0.5% of such domains. It will be understood that any transmembrane domains identified for the PRO polypeptides of the present invention are identified pursuant to criteria routinely employed in the art for identifying that type of hydrophobic domain. The exact boundaries of a transmembrane domain may vary but most likely by no more than about 5 amino acids at either end of the domain as initially identified herein. Optionally, therefore, an extracellular domain of a PRO polypeptide may contain from about 5 or fewer amino acids on either side of the transmembrane domain/extracellular domain boundary as identified in the Examples or specification and such polypeptides, with or without the associated signal peptide, and nucleic acid encoding them, are contemplated by the present invention.

[0067] The approximate location of the “signal peptides” of the various PRO polypeptides disclosed herein are shown in the present specification and/or the accompanying sequence listing. It is noted, however, that the C-terminal boundary of a signal peptide may vary, but most likely by no more than about 5 amino acids on either side of the signal peptide C-terminal boundary as initially identified herein, wherein the C-terminal boundary of the signal peptide may be identified pursuant to criteria routinely employed in the art for identifying that type of amino acid sequence element (e.g., Nielsen et al., Prot. Eng. 10:1-6 (1997) and von Heinje et al., Nucl. Acids. Res. 14:4683-4690 (1986)). Moreover, it is also recognized that, in some cases, cleavage of a signal sequence from a secreted polypeptide is not entirely uniform, resulting in more than one secreted species. These mature polypeptides, where the signal peptide is cleaved within no more than about 5 amino acids on either side of the C-terminal boundary of the signal peptide as identified herein, and the polynucleotides encoding them, are contemplated by the present invention.

[0068] “PRO polypeptide variant” means an active PRO polypeptide as defined above or below having at least about 80% amino acid sequence identity with a full-length native sequence PRO polypeptide sequence as disclosed herein, a PRO polypeptide sequence lacking the signal peptide as disclosed herein, an extracellular domain of a PRO polypeptide, with or without the signal peptide, as disclosed herein or any other fragment of a full-length PRO polypeptide sequence as disclosed herein. Such PRO polypeptide variants include, for instance, PRO polypeptides wherein one or more amino acid residues are added, or deleted, at the N- or C-terminus of the full-length native amino acid sequence. Ordinarily, a PRO polypeptide variant will have at least about 80% amino acid sequence identity, alternatively at least about 81% amino acid sequence identity, alternatively at least about 82% amino acid sequence identity, alternatively at least about 83% amino acid sequence identity, alternatively at least about 84% amino acid sequence identity, alternatively at least about 85% amino acid sequence identity, alternatively at least about 86% amino acid sequence identity, alternatively at least about 87% amino acid sequence identity, alternatively at least about 88% amino acid sequence identity, alternatively at least about 89% amino acid sequence identity, alternatively at least about 90% amino acid sequence identity, alternatively at least about 91% amino acid sequence identity, alternatively at least about 92% amino acid sequence identity, alternatively at least about 93% amino acid sequence identity, alternatively at least about 94% amino acid sequence identity, alternatively at least about 95% amino acid sequence identity, alternatively at least about 96% amino acid sequence identity, alternatively at least about 97% amino acid sequence identity, alternatively at least about 98% amino acid sequence identity and alternatively at least about 99% amino acid sequence identity to a full-length native sequence PRO polypeptide sequence as disclosed herein, a PRO polypeptide sequence lacking the signal peptide as disclosed herein, an extracellular domain of a PRO polypeptide, with or without the signal peptide, as disclosed herein or any other specifically defined fragment of a full-length PRO polypeptide sequence as disclosed herein. Ordinarily, PRO variant polypeptides are at least about 10 amino acids in length, alternatively at least about 20 amino acids in length, alternatively at least about 30 amino acids in length, alternatively at least about 40 amino acids in length, alternatively at least about 50 amino acids in length, alternatively at least about 60 amino acids in length, alternatively at least about 70 amino acids in length, alternatively at least about 80 amino acids in length, alternatively at least about 90 amino acids in length, alternatively at least about 100 amino acids in length, alternatively at least about 150 amino acids in length, alternatively at least about 200 amino acids in length, alternatively at least about 300 amino acids in length, or more.

[0069] “Percent (%) amino acid sequence identity” with respect to the PRO polypeptide sequences identified herein is defined as the percentage of amino acid residues in a candidate sequence that are identical with the amino acid residues in the specific PRO polypeptide sequence, after aligning the sequences and introducing gaps, if necessary, to achieve the maximum percent sequence identity, and not considering any conservative substitutions as part of the sequence identity. Alignment for purposes of determining percent amino acid sequence identity can be achieved in various ways that are within the skill in the art, for instance, using publicly available computer software such as BLAST, BLAST-2, ALIGN or Megalign (DNASTAR) software. Those skilled in the art can determine appropriate parameters for measuring alignment, including any algorithms needed to achieve maximal alignment over the full length of the sequences being compared. For purposes herein, however, % amino acid sequence identity values are generated using the sequence comparison computer program ALIGN-2, wherein the complete source code for the ALIGN-2 program is provided in Table 1 below. The ALIGN-2 sequence comparison computer program was authored by Genentech, Inc. and the source code shown in Table 1 below has been filed with user documentation in the U.S. Copyright Office, Washington D.C., 20559, where it is registered under U.S. Copyright Registration No. TXU510087. The ALIGN-2 program is publicly available through Genentech, Inc., South San Francisco, Calif. or may be compiled from the source code provided in Table 1 below. The ALIGN-2 program should be compiled for use on a UNIX operating system, preferably digital UNIX V4.0D. All sequence comparison parameters are set by the ALIGN-2 program and do not vary.

[0070] In situations where ALIGN-2 is employed for amino acid sequence comparisons, the % amino acid sequence identity of a given amino acid sequence A to, with, or against a given amino acid sequence B (which can alternatively be phrased as a given amino acid sequence A that has or comprises a certain % amino acid sequence identity to, with, or against a given amino acid sequence B) is calculated as follows:

100 times the fraction X/Y

where X is the number of amino acid residues scored as identical matches by the sequence alignment program ALIGN-2 in that program's alignment of A and B, and where Y is the total number of amino acid residues in B. It will be appreciated that where the length of amino acid sequence A is not equal to the length of amino acid sequence B, the % amino acid sequence identity of A to B will not equal the % amino acid sequence identity of B to A. As examples of % amino acid sequence identity calculations using this method, Tables 2 and 3 demonstrate how to calculate the % amino acid sequence identity of the amino acid sequence designated “Comparison Protein” to the amino acid sequence designated “PRO”, wherein “PRO” represents the amino acid sequence of a hypothetical PRO polypeptide of interest, “Comparison Protein” represents the amino acid sequence of a polypeptide against which the “PRO” polypeptide of interest is being compared, and “X, “Y” and “Z” each represent different hypothetical amino acid residues.

[0071] Unless specifically stated otherwise, all % amino acid sequence identity values used herein are obtained as described in the immediately preceding paragraph using the ALIGN-2 computer program. However, % amino acid sequence identity values may also be obtained as described below by using the WU-BLAST-2 computer program (Altschul et al., Methods in Enzymology 266:460-480 (1996)). Most of the WU-BLAST-2 search parameters are set to the default values. Those not set to default values, i.e., the adjustable parameters, are set with the following values: overlap span=1, overlap fraction=0.125, word threshold (T)=11, and scoring matrix=BLOSUM62. When WU-BLAST-2 is employed, a % amino acid sequence identity value is determined by dividing (a) the number of matching identical amino acid residues between the amino acid sequence of the PRO polypeptide of interest having a sequence derived from the native PRO polypeptide and the comparison amino acid sequence of interest (i.e., the sequence against which the PRO polypeptide of interest is being compared which may be a PRO variant polypeptide) as determined by WU-BLAST-2 by (b) the total number of amino acid residues of the PRO polypeptide of interest. For example, in the statement “a polypeptide comprising an the amino acid sequence A which has or having at least 80% amino acid sequence identity to the amino acid sequence B”, the amino acid sequence A is the comparison amino acid sequence of interest and the amino acid sequence B is the amino acid sequence of the PRO polypeptide of interest.

[0072] Percent amino acid sequence identity may also be determined using the sequence comparison program NCBI-BLAST2 (Altschul et al., Nucleic Acids Res. 25:3389-3402 (1997)). The NCBI-BLAST2 sequence comparison program may be downloaded from http://www.ncbi.nlm.nih.gov or otherwise obtained from the National Institute of Health, Bethesda, Md. NCBI-BLAST2 uses several search parameters, wherein all of those search parameters are set to default values including, for example, unmask=yes, strand=all, expected occurrences=10, minimum low complexity length=15/5, multi-pass e-value=0.01, constant for multi-pass=25, dropoff for final gapped alignment=25 and scoring matrix=BLOSUM62.

[0073] In situations where NCBI-BLAST2 is employed for amino acid sequence comparisons, the % amino acid sequence identity of a given amino acid sequence A to, with, or against a given amino acid sequence B (which can alternatively be phrased as a given amino acid sequence A that has or comprises a certain % amino acid sequence identity to, with, or against a given amino acid sequence B) is calculated as follows:

100 times the fraction X/Y

where X is the number of amino acid residues scored as identical matches by the sequence alignment program NCBI-BLAST2 in that program's alignment of A and B, and where Y is the total number of amino acid residues in B. It will be appreciated that where the length of amino acid sequence A is not equal to the length of amino acid sequence B, the % amino acid sequence identity of A to B will not equal the % amino acid sequence identity of B to A.

[0074] “PRO variant polynucleotide” or “PRO variant nucleic acid sequence” means a nucleic acid molecule which encodes an active PRO polypeptide as defined below and which has at least about 80% nucleic acid sequence identity with a nucleotide acid sequence encoding a full-length native sequence PRO polypeptide sequence as disclosed herein, a full-length native sequence PRO polypeptide sequence lacking the signal peptide as disclosed herein, an extracellular domain of a PRO polypeptide, with or without the signal peptide, as disclosed herein or any other fragment of a full-length PRO polypeptide sequence as disclosed herein. Ordinarily, a PRO variant polynucleotide will have at least about 80% nucleic acid sequence identity, alternatively at least about 81% nucleic acid sequence identity, alternatively at least about 82% nucleic acid sequence identity, alternatively at least about 83% nucleic acid sequence identity, alternatively at least about 84% nucleic acid sequence identity, alternatively at least about 85% nucleic acid sequence identity, alternatively at least about 86% nucleic acid sequence identity, alternatively at least about 87% nucleic acid sequence identity, alternatively at least about 88% nucleic acid sequence identity, alternatively at least about 89% nucleic acid sequence identity, alternatively at least about 90% nucleic acid sequence identity, alternatively at least about 91% nucleic acid sequence identity, alternatively at least about 92% nucleic acid sequence identity, alternatively at least about 93% nucleic acid sequence identity, alternatively at least about 94% nucleic acid sequence identity, alternatively at least about 95% nucleic acid sequence identity, alternatively at least about 96% nucleic acid sequence identity, alternatively at least about 97% nucleic acid sequence identity, alternatively at least about 98% nucleic acid sequence identity and alternatively at least about 99% nucleic acid sequence identity with a nucleic acid sequence encoding a full-length native sequence PRO polypeptide sequence as disclosed herein, a full-length native sequence PRO polypeptide sequence lacking the signal peptide as disclosed herein, an extracellular domain of a PRO polypeptide, with or without the signal sequence, as disclosed herein or any other fragment of a full-length PRO polypeptide sequence as disclosed herein. Variants do not encompass the native nucleotide sequence.

[0075] Ordinarily, PRO variant polynucleotides are at least about 30 nucleotides in length, alternatively at least about 60 nucleotides in length, alternatively at least about 90 nucleotides in length, alternatively at least about 120 nucleotides in length, alternatively at least about 150 nucleotides in length, alternatively at least about 180 nucleotides in length, alternatively at least about 210 nucleotides in length, alternatively at least about 240 nucleotides in length, alternatively at least about 270 nucleotides in length, alternatively at least about 300 nucleotides in length, alternatively at least about 450 nucleotides in length, alternatively at least about 600 nucleotides in length, alternatively at least about 900 nucleotides in length, or more.

[0076] “Percent (%) nucleic acid sequence identity” with respect to PRO-encoding nucleic acid sequences identified herein is defined as the percentage of nucleotides in a candidate sequence that are identical with the nucleotides in the PRO nucleic acid sequence of interest, after aligning the sequences and introducing gaps, if necessary, to achieve the maximum percent sequence identity. Alignment for purposes of determining percent nucleic acid sequence identity can be achieved in various ways that are within the skill in the art, for instance, using publicly available computer software such as BLAST, BLAST-2, ALIGN or Megalign (DNASTAR) software. For purposes herein, however, % nucleic acid sequence identity values are generated using the sequence comparison computer program ALIGN-2, wherein the complete source code for the ALIGN-2 program is provided in Table 1 below. The ALIGN-2 sequence comparison computer program was authored by Genentech, Inc. and the source code shown in Table 1 below has been filed with user documentation in the U.S. Copyright Office, Washington D.C., 20559, where it is registered under U.S. Copyright Registration No. TXU510087. The ALIGN-2 program is publicly available through Genentech, Inc., South San Francisco, Calif. or may be compiled from the source code provided in Table 1 below. The ALIGN-2 program should be compiled for use on a UNIX operating system, preferably digital UNIX V4.0D. All sequence comparison parameters are set by the ALIGN-2 program and do not vary.

[0077] In situations where ALIGN-2 is employed for nucleic acid sequence comparisons, the % nucleic acid sequence identity of a given nucleic acid sequence C to, with, or against a given nucleic acid sequence D (which can alternatively be phrased as a given nucleic acid sequence C that has or comprises a certain % nucleic acid sequence identity to, with, or against a given nucleic acid sequence D) is calculated as follows:

100 times the fraction W/Z

where W is the number of nucleotides scored as identical matches by the sequence alignment program ALIGN-2 in that program's alignment of C and D, and where Z is the total number of nucleotides in D. It will be appreciated that where the length of nucleic acid sequence C is not equal to the length of nucleic acid sequence D, the % nucleic acid sequence identity of C to D will not equal the % nucleic acid sequence identity of D to C. As examples of % nucleic acid sequence identity calculations, Tables 4 and 5, demonstrate how to calculate the % nucleic acid sequence identity of the nucleic acid sequence designated “Comparison DNA” to the nucleic acid sequence designated “PRO-DNA”, wherein “PRO-DNA” represents a hypothetical PRO-encoding nucleic acid sequence of interest, “Comparison DNA” represents the nucleotide sequence of a nucleic acid molecule against which the “PRO-DNA” nucleic acid molecule of interest is being compared, and “N”, “L” and “V” each represent different hypothetical nucleotides.

[0078] Unless specifically stated otherwise, all % nucleic acid sequence identity values used herein are obtained as described in the immediately preceding paragraph using the ALIGN-2 computer program. However, % nucleic acid sequence identity values may also be obtained as described below by using the WU-BLAST-2 computer program (Altschul et al., Methods in Enzymology 266:460-480 (1996)). Most of the WU-BLAST-2 search parameters are set to the default values. Those not set to default values, i.e., the adjustable parameters, are set with the following values: overlap span=1, overlap fraction=0.125, word threshold (T)=11, and scoring matrix=BLOSUM62. When WU-BLAST-2 is employed, a % nucleic acid sequence identity value is determined by dividing (a) the number of matching identical nucleotides between the nucleic acid sequence of the PRO polypeptide-encoding nucleic acid molecule of interest having a sequence derived from the native sequence PRO polypeptide-encoding nucleic acid and the comparison nucleic acid molecule of interest (i.e., the sequence against which the PRO polypeptide-encoding nucleic acid molecule of interest is being compared which may be a variant PRO polynucleotide) as determined by WU-BLAST-2 by (b) the total number of nucleotides of the PRO polypeptide-encoding nucleic acid molecule of interest. For example, in the statement “an isolated nucleic acid molecule comprising a nucleic acid sequence A which has or having at least 80% nucleic acid sequence identity to the nucleic acid sequence B”, the nucleic acid sequence A is the comparison nucleic acid molecule of interest and the nucleic acid sequence B is the nucleic acid sequence of the PRO polypeptide-encoding nucleic acid molecule of interest.

[0079] Percent nucleic acid sequence identity may also be determined using the sequence comparison program NCBI-BLAST2 (Altschul et al., Nucleic Acids Res. 25:3389-3402 (1997)). The NCBI-BLAST2 sequence comparison program may be downloaded from http://www.ncbi.nlm.nih.gov or otherwise obtained from the National Institute of Health, Bethesda, Md. NCBI-BLAST2 uses several search parameters, wherein all of those search parameters are set to default values including, for example, unmask=yes, strand=all, expected occurrences=10, minimum low complexity length=15/5, multi-pass e-value=0.01, constant for multi-pass=25, dropoff for final gapped alignment=25 and scoring matrix=BLOSUM62.

[0080] In situations where NCBI-BLAST2 is employed for sequence comparisons, the % nucleic acid sequence identity of a given nucleic acid sequence C to, with, or against a given nucleic acid sequence D (which can alternatively be phrased as a given nucleic acid sequence C that has or comprises a certain % nucleic acid sequence identity to, with, or against a given nucleic acid sequence D) is calculated as follows:

100 times the fraction W/Z

where W is the number of nucleotides scored as identical matches by the sequence alignment program NCBI-BLAST2 in that program's alignment of C and D, and where Z is the total number of nucleotides in D. It will be appreciated that where the length of nucleic acid sequence C is not equal to the length of nucleic acid sequence D, the % nucleic acid sequence identity of C to D will not equal the % nucleic acid sequence identity of D to C.

[0081] In other embodiments, PRO variant polynucleotides are nucleic acid molecules that encode an active PRO polypeptide and which are capable of hybridizing, preferably under stringent hybridization and wash conditions, to nucleotide sequences encoding a full-length PRO polypeptide as disclosed herein. PRO variant polypeptides may be those that are encoded by a PRO variant polynucleotide.

[0082] “Isolated,” when used to describe the various polypeptides disclosed herein, means polypeptide that has been identified and separated and/or recovered from a component of its natural environment. Contaminant components of its natural environment are materials that would typically interfere with diagnostic or therapeutic uses for the polypeptide, and in may include enzymes, hormones, and other proteinaceous or non-proteinaceous solutes. In preferred embodiments, the polypeptide will be purified (1) to a degree sufficient to obtain at least 15 residues of N-terminal or internal amino acid sequence by use of a spinning cup sequenator, or (2) to homogeneity by SDS-PAGE under non-reducing or reducing conditions using Coomassie blue or, preferably, silver stain. Isolated polypeptide includes polypeptide in situ within recombinant cells, since at least one component of the PRO polypeptide natural environment will not be present. Ordinarily, however, isolated polypeptide will be prepared by at least one purification step.

[0083] An “isolated” PRO polypeptide-encoding nucleic acid or other polypeptide-encoding nucleic acid is a nucleic acid molecule that is identified and separated from at least one contaminant nucleic acid molecule with which it is ordinarily associated in the natural source of the polypeptide-encoding nucleic acid. An isolated polypeptide-encoding nucleic acid molecule is other than in the form or setting in which it is found in nature. Isolated polypeptide-encoding nucleic acid molecules therefore are distinguished from the specific polypeptide-encoding nucleic acid molecule as it exists in natural cells. However, an isolated polypeptide-encoding nucleic acid molecule includes polypeptide-encoding nucleic acid molecules contained in cells that ordinarily express the polypeptide where, for example, the nucleic acid molecule is in a chromosomal location different from that of natural cells.

[0084] The term “control sequences” refers to DNA sequences necessary for the expression of an operably linked coding sequence in a particular host organism. The control sequences that are suitable for prokaryotes, for example, include a promoter, optionally an operator sequence, and a ribosome binding site. Eukaryotic cells are known to utilize promoters, polyadenylation signals, and enhancers.

[0085] Nucleic acid is “operably linked” when it is placed into a functional relationship with another nucleic acid sequence. For example, DNA for a presequence or secretory leader is operably linked to DNA for a polypeptide if it is expressed as a preprotein that participates in the secretion of the polypeptide; a promoter or enhancer is operably linked to a coding sequence if it affects the transcription of the sequence; or a ribosome binding site is operably linked to a coding sequence if it is positioned so as to facilitate translation. Generally, “operably linked” means that the DNA sequences being linked are contiguous, and, in the case of a secretory leader, contiguous and in reading phase. However, enhancers do not have to be contiguous. Linking is accomplished by ligation at convenient restriction sites. If such sites do not exist, the synthetic oligonucleotide adaptors or linkers are used in accordance with conventional practice.

[0086] The term “antibody” is used in the broadest sense and specifically covers, for example, single anti-PRO monoclonal antibodies (including agonist, antagonist, and neutralizing antibodies), anti-PRO antibody compositions with polyepitopic specificity, single chain anti-PRO antibodies, and fragments of anti-PRO antibodies (see below). The term “monoclonal antibody” as used herein refers to an antibody obtained from a population of substantially homogeneous antibodies, i.e., the individual antibodies comprising the population are identical except for possible naturally-occurring mutations that may be present in minor amounts.

[0087] “Stringency” of hybridization reactions is readily determinable by one of ordinary skill in the art, and generally is an empirical calculation dependent upon probe length, washing temperature, and salt concentration. In general, longer probes require higher temperatures for proper annealing, while shorter probes need lower temperatures. Hybridization generally depends on the ability of denatured DNA to reanneal when complementary strands are present in an environment below their melting temperature. The higher the degree of desired homology between the probe and hybridizable sequence, the higher the relative temperature which can be used. As a result, it follows that higher relative temperatures would tend to make the reaction conditions more stringent, while lower temperatures less so. For additional details and explanation of stringency of hybridization reactions, see Ausubel et al., Current Protocols in Molecular Biology, Wiley Interscience Publishers, (1995).

[0088] “Stringent conditions” or “high stringency conditions”, as defined herein, may be identified by those that: (1) employ low ionic strength and high temperature for washing, for example 0.015 M sodium chloride/0.0015 M sodium citrate/0.1% sodium dodecyl sulfate at 50° C.; (2) employ during hybridization a denaturing agent, such as formamide, for example, 50% (v/v) formamide with 0.1% bovine serum albumin/0.1% Ficoll/0.1% polyvinylpyrrolidone/50 mM sodium phosphate buffer at pH 6.5 with 750 mM sodium chloride, 75 mM sodium citrate at 42° C.; or (3) employ 50% formamide, 5×SSC (0.75 M NaCl, 0.075 M sodium citrate), 50 mM sodium phosphate (pH 6.8), 0.1% sodium pyrophosphate, 5×Denhardt's solution, sonicated salmon sperm DNA (50 μg/ml), 0.1% SDS, and 10% dextran sulfate at 42° C., with washes at 42° C. in 0.2×SSC (sodium chloride/sodium citrate) and 50% formamide at 55° C., followed by a high-stringency wash consisting of 0.1×SSC containing EDTA at 55° C.

[0089] “Moderately stringent conditions” may be identified as described by Sambrook et al., Molecular Cloning: A Laboratory Manual, New York: Cold Spring Harbor Press, 1989, and include the use of washing solution and hybridization conditions (e.g., temperature, ionic strength and % SDS) less stringent that those described above. An example of moderately stringent conditions is overnight incubation at 37° C. in a solution comprising: 20% formamide, 5×SSC (150 mM NaCl, 15 mM trisodium citrate), 50 mM sodium phosphate (pH 7.6), 5×Denhardt's solution, 10% dextran sulfate, and 20 mg/ml denatured sheared salmon sperm DNA, followed by washing the filters in 1×SSC at about 37-50° C. The skilled artisan will recognize how to adjust the temperature, ionic strength, etc. as necessary to accommodate factors such as probe length and the like.

[0090] The term “epitope tagged” when used herein refers to a chimeric polypeptide comprising a PRO polypeptide fused to a “tag polypeptide”. The tag polypeptide has enough residues to provide an epitope against which an antibody can be made, yet is short enough such that it does not interfere with activity of the polypeptide to which it is fused. The tag polypeptide preferably also is fairly unique so that the antibody does not substantially cross-react with other epitopes. Suitable tag polypeptides generally have at least six amino acid residues and usually between about 8 and 50 amino acid residues (preferably, between about 10 and 20 amino acid residues).

[0091] As used herein, the term “immunoadhesin” designates antibody-like molecules which combine the binding specificity of a heterologous protein (an “adhesin”) with the effector functions of immunoglobulin constant domains. Structurally, the immunoadhesins comprise a fusion of an amino acid sequence with the desired binding specificity which is other than the antigen recognition and binding site of an antibody (i.e., is “heterologous”), and an immunoglobulin constant domain sequence. The adhesin part of an immunoadhesin molecule typically is a contiguous amino acid sequence comprising at least the binding site of a receptor or a ligand. The immunoglobulin constant domain sequence in the immunoadhesin may be obtained from any immunoglobulin, such as IgG-1, IgG-2, IgG-3, or IgG-4 subtypes, IgA (including IgA-1 and IgA-2), IgE, IgD or IgM.

[0092] “Active” or “activity” for the purposes herein refers to form(s) of a PRO polypeptide which retain a biological and/or an immunological activity of native or naturally-occurring PRO, wherein “biological” activity refers to a biological function (either inhibitory or stimulatory) caused by a native or naturally-occurring PRO other than the ability to induce the production of an antibody against an antigenic epitope possessed by a native or naturally-occurring PRO and an “immunological” activity refers to the ability to induce the production of an antibody against an antigenic epitope possessed by a native or naturally-occurring PRO.

[0093] The term “antagonist” is used in the broadest sense, and includes any molecule that partially or fully blocks, inhibits, or neutralizes a biological activity of a native PRO polypeptide disclosed herein. In a similar manner, the term “agonist” is used in the broadest sense and includes any molecule that mimics a biological activity of a native PRO polypeptide disclosed herein. Suitable agonist or antagonist molecules specifically include agonist or antagonist antibodies or antibody fragments, fragments or amino acid sequence variants of native PRO polypeptides, peptides, antisense oligonucleotides, small organic molecules, etc. Methods for identifying agonists or antagonists of a PRO polypeptide may comprise contacting a PRO polypeptide with a candidate agonist or antagonist molecule and measuring a detectable change in one or more biological activities normally associated with the PRO polypeptide.

[0094] “Treatment” refers to both therapeutic treatment and prophylactic or preventative measures, wherein the object is to prevent or slow down (lessen) the targeted pathologic condition or disorder. Those in need of treatment include those already with the disorder as well as those prone to have the disorder or those in whom the disorder is to be prevented.

[0095] “Chronic” administration refers to administration of the agent(s) in a continuous mode as opposed to an acute mode, so as to maintain the initial therapeutic effect (activity) for an extended period of time. “Intermittent” administration is treatment that is not consecutively done without interruption, but rather is cyclic in nature.

[0096] “Mammal” for purposes of treatment refers to any animal classified as a mammal, including humans, domestic and farm animals, and zoo, sports, or pet animals, such as dogs, cats, cattle, horses, sheep, pigs, goats, rabbits, etc. Preferably, the mammal is human.

[0097] Administration “in combination with” one or more further therapeutic agents includes simultaneous (concurrent) and consecutive administration in any order.

[0098] “Carriers” as used herein include pharmaceutically acceptable carriers, excipients, or stabilizers which are nontoxic to the cell or mammal being exposed thereto at the dosages and concentrations employed. Often the physiologically acceptable carrier is an aqueous pH buffered solution. Examples of physiologically acceptable carriers include buffers such as phosphate, citrate, and other organic acids; antioxidants including ascorbic acid; low molecular weight (less than about 10 residues) polypeptide; proteins, such as serum albumin, gelatin, or immunoglobulins; hydrophilic polymers such as polyvinylpyrrolidone; amino acids such as glycine, glutamine, asparagine, arginine or lysine; monosaccharides, disaccharides, and other carbohydrates including glucose, mannose, or dextrins; chelating agents such as EDTA; sugar alcohols such as mannitol or sorbitol; salt-forming counterions such as sodium; and/or nonionic surfactants such as TWEEN™, polyethylene glycol (PEG), and PLURONICS™.

[0099] “Antibody fragments” comprise a portion of an intact antibody, preferably the antigen binding or variable region of the intact antibody. Examples of antibody fragments include Fab, Fab′, F(ab′)₂, and Fv fragments; diabodies; linear antibodies (Zapata et al., Protein Eng. 8(10): 1057-1062 [1995]); single-chain antibody molecules; and multispecific antibodies formed from antibody fragments.

[0100] Papain digestion of antibodies produces two identical antigen-binding fragments, called “Fab” fragments, each with a single antigen-binding site, and a residual “Fc” fragment, a designation reflecting the ability to crystallize readily. Pepsin treatment yields an F(ab′)₂ fragment that has two antigen-combining sites and is still capable of cross-linking antigen.

[0101] “Fv” is the minimum antibody fragment which contains a complete antigen-recognition and -binding site. This region consists of a dimer of one heavy- and one light-chain variable domain in tight, non-covalent association. It is in this configuration that the three CDRs of each variable domain interact to define an antigen-binding site on the surface of the V_{H}-V_{L} dimer. Collectively, the six CDRs confer antigen-binding specificity to the antibody. However, even a single variable domain (or half of an Fv comprising only three CDRs specific for an antigen) has the ability to recognize and bind antigen, although at a lower affinity than the entire binding site.

[0102] The Fab fragment also contains the constant domain of the light chain and the first constant domain (CH1) of the heavy chain. Fab fragments differ from Fab′ fragments by the addition of a few residues at the carboxy terminus of the heavy chain CH1 domain including one or more cysteines from the antibody hinge region. Fab′-SH is the designation herein for Fab′ in which the cysteine residue(s) of the constant domains bear a free thiol group. F(ab′)₂ antibody fragments originally were produced as pairs of Fab′ fragments which have hinge cysteines between them. Other chemical couplings of antibody fragments are also known.

[0103] The “light chains” of antibodies (immunoglobulins) from any vertebrate species can be assigned to one of two clearly distinct types, called kappa and lambda, based on the amino acid sequences of their constant domains.

[0104] Depending on the amino acid sequence of the constant domain of their heavy chains, immunoglobulins can be assigned to different classes. There are five major classes of immunoglobulins: IgA, IgD, IgE, IgG, and IgM, and several of these may be further divided into subclasses (isotypes), e.g., IgG1, IgG2, IgG3, IgG4, IgA, and IgA2.

[0105] “Single-chain Fv” or “sFv” antibody fragments comprise the V_{H} and V_{L} domains of antibody, wherein these domains are present in a single polypeptide chain. Preferably, the Fv polypeptide further comprises a polypeptide linker between the V_{H} and V_{L} domains which enables the sFv to form the desired structure for antigen binding. For a review of sFv, see Pluckthun in The Pharmacology of Monoclonal Antibodies, vol. 113, Rosenburg and Moore eds., Springer-Verlag, New York, pp. 269-315 (1994).

[0106] The term “diabodies” refers to small antibody fragments with two antigen-binding sites, which fragments comprise a heavy-chain variable domain (V_{H}) connected to a light-chain variable domain (V_{L}) in the same polypeptide chain (V_{H}-V_{L}). By using a linker that is too short to allow pairing between the two domains on the same chain, the domains are forced to pair with the complementary domains of another chain and create two antigen-binding sites. Diabodies are described more fully in, for example, EP 404,097; WO 93/11161; and Hollinger et al., Proc. Natl. Acad. Sci. USA, 90:6444-6448 (1993).

[0107] An “isolated” antibody is one which has been identified and separated and/or recovered from a component of its natural environment. Contaminant components of its natural environment are materials which would interfere with diagnostic or therapeutic uses for the antibody, and may include enzymes, hormones, and other proteinaceous or nonproteinaceous solutes. In preferred embodiments, the antibody will be purified (1) to greater than 95% by weight of antibody as determined by the Lowry method, and most preferably more than 99% by weight, (2) to a degree sufficient to obtain at least 15 residues of N-terminal or internal amino acid sequence by use of a spinning cup sequenator, or (3) to homogeneity by SDS-PAGE under reducing or nonreducing conditions using Coomassie blue or, preferably, silver stain. Isolated antibody includes the antibody in situ within recombinant cells since at least one component of the antibody's natural environment will not be present. Ordinarily, however, isolated antibody will be prepared by at least one purification step.

[0108] An antibody that “specifically binds to” or is “specific for” a particular polypeptide or an epitope on a particular polypeptide is one that binds to that particular polypeptide or epitope on a particular polypeptide without substantially binding to any other polypeptide or polypeptide epitope.

[0109] The word “label” when used herein refers to a detectable compound or composition which is conjugated directly or indirectly to the antibody so as to generate a “labeled” antibody. The label may be detectable by itself (e.g. radioisotope labels or fluorescent labels) or, in the case of an enzymatic label, may catalyze chemical alteration of a substrate compound or composition which is detectable.

[0110] By “solid phase” is meant a non-aqueous matrix to which the antibody of the present invention can adhere. Examples of solid phases encompassed herein include those formed partially or entirely of glass (e.g., controlled pore glass), polysaccharides (e.g., agarose), polyacrylamides, polystyrene, polyvinyl alcohol and silicones. In certain embodiments, depending on the context, the solid phase can comprise the well of an assay plate; in others it is a purification column (e.g., an affinity chromatography column). This term also includes a discontinuous solid phase of discrete particles, such as those described in U.S. Pat. No. 4,275,149.

[0111] A “liposome” is a small vesicle composed of various types of lipids, phospholipids and/or surfactant which is useful for delivery of a drug (such as a PRO polypeptide or antibody thereto) to a mammal. The components of the liposome are commonly arranged in a bilayer formation, similar to the lipid arrangement of biological membranes.

[0112] A “small molecule” is defined herein to have a molecular weight below about 500 Daltons.

[0113] The term “immune related disease” means a disease in which a component of the immune system of a mammal causes, mediates or otherwise contributes to a morbidity in the mammal. Also included are diseases in which stimulation or intervention of the immune response has an ameliorative effect on progression of the disease. Included within this term are immune-mediated inflammatory diseases, non-immune-mediated inflammatory diseases, infectious diseases, immunodeficiency diseases, neoplasia, etc.

[0114] The term “T cell mediated disease” means a disease in which T cells directly or indirectly mediate or otherwise contribute to a morbidity in a mammal. The T cell mediated disease may be associated with cell mediated effects, lymphokine mediated effects, etc., and even effects associated with B cells if the B cells are stimulated, for example, by the lymphokines secreted by T cells.

[0115] Examples of immune-related and inflammatory diseases, some of which are immune or T cell mediated, which can be treated according to the invention include systemic lupus erythematosis, rheumatoid arthritis, juvenile chronic arthritis, spondyloarthropathies, systemic sclerosis (scleroderma), idiopathic inflammatory myopathies (dermatomyositis, polymyositis), Sjögren's syndrome, systemic vasculitis, sarcoidosis, autoimmune hemolytic anemia (immune pancytopenia, paroxysmal nocturnal hemoglobinuria), autoimmune thrombocytopenia (idiopathic thrombocytopenic purpura, immune-mediated thrombocytopenia), thyroiditis (Grave's disease, Hashimoto's thyroiditis, juvenile lymphocytic thyroiditis, atrophic thyroiditis), diabetes mellitus, immune-mediated renal disease (glomerulonephritis, tubulointerstitial nephritis), demyelinating diseases of the central and peripheral nervous systems such as multiple sclerosis, idiopathic demyelinating polyneuropathy or Guillain-Barré syndrome, and chronic inflammatory demyelinating polyneuropathy, hepatobiliary diseases such as infectious hepatitis (hepatitis A, B, C, D, E and other non-hepatotropic viruses), autoimmune chronic active hepatitis, primary biliary cirrhosis, granulomatous hepatitis, and sclerosing cholangitis, inflammatory bowel disease (ulcerative colitis: Crohn's disease), gluten-sensitive enteropathy, and Whipple's disease, autoimmune or immune-mediated skin diseases including bullous skin diseases, erythema multiforme and contact dermatitis, psoriasis, allergic diseases such as asthma, allergic rhinitis, atopic dermatitis, food hypersensitivity and urticaria, immunologic diseases of the lung such as eosinophilic pneumonias, idiopathic pulmonary fibrosis and hypersensitivity pneumonitis, transplantation associated diseases including graft rejection and graft-versus-host-disease. Infectious diseases including viral diseases such as AIDS (HIV infection), hepatitis A, B, C, D, and E, herpes, etc., bacterial infections, fungal infections, protozoal infections and parasitic infections.

[0116] The term “effective amount” is a concentration or amount of a PRO polypeptide and/or agonist/antagonist which results in achieving a particular stated purpose. An “effective amount” of a PRO polypeptide or agonist or antagonist thereof may be determined empirically. Furthermore, a “therapeutically effective amount” is a concentration or amount of a PRO polypeptide and/or agonist/antagonist which is effective in for achieving a stated therapeutic effect. This amount may also be determined empirically.

[0117] The term “cytotoxic agent” as used herein refers to a substance that inhibits or prevents the function of cells and/or causes destruction of cells. The term is intended to include radioactive isotopes (e.g., I¹³¹, I¹²⁵, Y⁹⁰ and Re¹⁸⁶), chemotherapeutic agents, and toxins such as enzymatically active toxins of bacterial, fungal, plant or animal origin, or fragments thereof.

[0118] A “chemotherapeutic agent” is a chemical compound useful in the treatment of cancer. Examples of chemotherapeutic agents include adriamycin, doxorubicin, epirubicin, 5-fluorouracil, cytosine arabinoside (“Ara-C”), cyclophosphamide, thiotepa, busulfan, cytoxin, taxoids, e.g., paclitaxel (Taxol, Bristol-Myers Squibb Oncology, Princeton, N.J.), and doxetaxel (Taxotere, Rhone-Poulenc Rorer, Antony, France), toxotere, methotrexate, cisplatin, melphalan, vinblastine, bleomycin, etoposide, ifosfamide, mitomycin C, mitoxantrone, vincristine, vinorelbine, carboplatin, teniposide, daunomycin, caminomycin, aminopterin, dactinomycin, mitomycins, esperamicins (see U.S. Pat. No. 4,675,187), melphalan and other related nitrogen mustards. Also included in this definition are hormonal agents that act to regulate or inhibit hormone action on tumors such as tamoxifen and onapristone.

[0119] A “growth inhibitory agent” when used herein refers to a compound or composition which inhibits growth of a cell, especially cancer cell overexpressing any of the genes identified herein, either in vitro or in vivo. Thus, the growth inhibitory agent is one which significantly reduces the percentage of cells overexpressing such genes in S phase. Examples of growth inhibitory agents include agents that block cell cycle progression (at a place other than S phase), such as agents that induce G1 arrest and M-phase arrest. Classical M-phase blockers include the vincas (vincristine and vinblastine), taxol, and topo II inhibitors such as doxorubicin, epirubicin, daunorubicin, etoposide, and bleomycin. Those agents that arrest G1 also spill over into S-phase arrest, for example, DNA alkylating agents such as tamoxifen, prednisone, dacarbazine, mechlorethamine, cisplatin, methotrexate, 5-fluorouracil, and ara-C. Further information can be found in The Molecular Basis of Cancer, Mendelsohn and Israel, eds., Chapter 1, entitled “Cell cycle regulation, oncogens, and antineoplastic drugs” by Murakami et al. (WB Saunders: Philadelphia, 1995), especially p. 13.

[0120] The term “cytokine” is a generic term for proteins released by one cell population which act on another cell as intercellular mediators. Examples of such cytokines are lymphokines, monokines, and traditional polypeptide hormones. Included among the cytokines are growth hormone such as human growth hormone, N-methionyl human growth hormone, and bovine growth hormone; parathyroid hormone; thyroxine; insulin; proinsulin; relaxin; prorelaxin; glycoprotein hormones such as follicle stimulating hormone (FSH), thyroid stimulating hormone (TSH), and luteinizing hormone (LH); hepatic growth factor; fibroblast growth factor; prolactin; placental lactogen; tumor necrosis factor-α and -β; mullerian-inhibiting substance; mouse gonadotropin-associated peptide; inhibin; activin; vascular endothelial growth factor; integrin; thrombopoietin (TPO); nerve growth factors such as NGF-β; platelet-growth factor; transforming growth factors (TGFs) such as TGF-α and TGF-β; insulin-like growth factor-I and -II; erythropoietin (EPO); osteoinductive factors; interferons such as interferon-α, -β, and -γ; colony stimulating factors (CSFs) such as macrophage-CSF (M-CSF); granulocyte-macrophage-CSF (GM-CSF); and granulocyte-CSF (G-CSF); interleukins (ILs) such as IL-1, IL-1α, IL-2, IL-3, IL-4, IL-5, IL-6, IL-7, IL-8, IL-9, IL-11, IL-12; a tumor necrosis factor such as TNF-α or TNF-β; and other polypeptide factors including LIF and kit ligand (KL). As used herein, the term cytokine includes proteins from natural sources or from recombinant cell culture and biologically active equivalents of the native sequence cytokines

[0121] As used herein, the term “immunoadhesin” designates antibody-like molecules which combine the binding specificity of a heterologous protein (an “adhesin”) with the effector functions of immunoglobulin constant domains. Structurally, the immunoadhesins comprise a fusion of an amino acid sequence with the desired binding specificity which is other than the antigen recognition and binding site of an antibody (i.e., is “heterologous”), and an immunoglobulin constant domain sequence. The adhesin part of an immunoadhesin molecule typically is a contiguous amino acid sequence comprising at least the binding site of a receptor or a ligand. The immunoglobulin constant domain sequence in the immunoadhesin may be obtained from any immunoglobulin, such as IgG-1, IgG-2, IgG-3, or IgG-4 subtypes, IgA (including IgA-1 and IgA-2), IgE, IgD or IgM.

[0122] As used herein, the term “inflammatory cells” designates cells that enhance the inflammatory response such as mononuclear cells, eosinophils, macrophages, and polymorphonuclear neutrophils (PMN).

TABLE 1
/*
*
* C-C increased from 12 to 15
* Z is average of EQ
* B is average of ND
* match with stop is _M; stop−stop = 0; J (joker) match = 0
*/

| | | | |
|---|---|---|---|
| #define | _M | −8 | /* value of a match with a stop */ |

| | |
|---|---|
| int | _day[26][26] = { |

/* A B C D E F G H I J K L M N O P Q R S T U V W X Y Z */

| | |
|---|---|
| /* A */ | { 2, 0,−2, 0, 0,−4, 1,−1,−1, 0,−1,−2,−1, 0,_M, 1, 0,−2, 1, 1, 0, 0,−6, 0,−3, 0}, |
| /* B */ | { 0, 3,−4, 3, 2,−5, 0, 1,−2, 0, 0,−3,−2, 2,_M,−1, 1, 0, 0, 0, 0,−2,−5, 0,−3, 1}, |
| /* C */ | {−2,−4,15,−5,−5,−4,−3,−3,−2, 0,−5,−6,−5,−4,_M,−3,−5,−4, 0,−2, 0,−2,−8, 0, 0,−5}, |
| /* D */ | { 0, 3,−5, 4, 3,−6, 1, 1,−2, 0, 0,−4,−3, 2,_M,−1, 2,−1, 0, 0, 0,−2,−7, 0,−4, 2}, |
| /* E */ | { 0, 2,−5, 3, 4,−5, 0, 1,−2, 0, 0,−3,−2, 1,_M,−1, 2,−1, 0, 0, 0,−2,−7, 0,−4, 3}, |
| /* F */ | {−4,−5,−4,−6,−5, 9,−5,−2, 1, 0,−5, 2, 0,−4,_M,−5,−5,−4,−3,−3, 0,−1, 0, 0, 7,−5}, |
| /* G */ | { 1, 0,−3, 1, 0,−5, 5,−2,−3, 0,−2,−4,−3, 0,_M,−1,−1,−3, 1, 0, 0,−1,−7, 0,−5, 0}, |
| /* H */ | {−1, 1,−3, 1, 1,−2,−2, 6,−2, 0, 0,−2,−2, 2,_M, 0, 3, 2,−1,−1, 0,−2,−3, 0, 0, 2}, |
| /* I */ | {−1,−2,−2,−2,−2, 1,−3,−2, 5, 0,−2, 2, 2,−2,_M,−2,−2,−2,−1, 0, 0, 4,−5, 0,−1,−2}, |
| /* J */ | { 0, 0, 0, 0, 0, 0, 0, 0, 0, 0, 0, 0, 0, 0,_M, 0, 0, 0, 0, 0, 0, 0, 0, 0, 0, 0}, |
| /* K */ | {−1, 0,−5, 0, 0,−5,−2, 0,−2, 0, 5,−3, 0, 1,_M,−1, 1, 3, 0, 0, 0,−2,−3, 0,−4, 0}, |
| /* L */ | {−2,−3,−6,−4,−3, 2,−4,−2, 2, 0,−3, 6, 4,−3,_M,−3,−2,−3,−3,−1, 0, 2,−2, 0,−1,−2}, |
| /* M */ | {−1,−2,−5,−3,−2, 0,−3,−2, 2, 0, 0, 4, 6,−2,_M,−2,−1, 0,−2,−1, 0, 2,−4, 0,−2,−1}, |
| /* N */ | { 0, 2,−4, 2, 1,−4, 0, 2,−2, 0, 1,−3,−2, 2,_M,−1, 1, 0, 1, 0, 0,−2,−4, 0,−2, 1}, |
| /* O */ | {_M,_M,_M,_M,_M,_M,_M,_M,_M,_M,_M,_M,_M,_M, 0,_M,_M, |
| | _M,_M,_M,_M,_M,_M,_M,_M,_M}, |
| /* P */ | { 1,−1,−3,−1,−1,−5,−1, 0,−2, 0,−1,−3,−2,−1,_M, 6, 0, 0, 1, 0, 0,−1,−6, 0,−5, 0}, |
| /* Q */ | { 0, 1,−5, 2, 2,−5,−1, 3,−2, 0, 1,−2,−1, 1,_M, 0, 4, 1,−1,−1, 0,−2,−5, 0,−4, 3}, |
| /* R */ | {−2, 0,−4,−1,−1,−4,−3, 2,−2, 0, 3,−3, 0, 0,_M, 0, 1, 6, 0,−1, 0,−2, 2, 0,−4, 0}, |
| /* S */ | { 1, 0, 0, 0, 0,−3, 1,−1,−1, 0, 0,−3,−2, 1,_M, 1,−1, 0, 2, 1, 0,−1,−2, 0,−3, 0}, |
| /* T */ | { 1, 0,−2, 0, 0,−3, 0,−1, 0, 0, 0,−1,−1, 0,_M, 0,−1,−1, 1, 3, 0, 0,−5, 0,−3, 0}, |
| /* U */ | { 0, 0, 0, 0, 0, 0, 0, 0, 0, 0, 0, 0, 0, 0,_M, 0, 0, 0, 0, 0, 0, 0, 0, 0, 0, 0}, |
| /* V */ | { 0,−2,−2,−2,−2,−1,−1,−2, 4, 0,−2, 2, 2,−2,_M,−1,−2,−2,−1, 0, 0, 4,−6, 0,−2,−2}, |
| /* W */ | {−6,−5,−8,−7,−7, 0,−7,−3,−5, 0,−3,−2,−4,−4,_M,−6,−5, 2,−2,−5, 0,−6,17, 0, 0,−6}, |
| /* X */ | { 0, 0, 0, 0, 0, 0, 0, 0, 0, 0, 0, 0, 0, 0,_M, 0, 0, 0, 0, 0, 0, 0, 0, 0, 0, 0}, |
| /* Y */ | {−3,−3, 0,−4,−4, 7,−5, 0,−1, 0,−4,−1,−2,−2,_M,−5,−4,−4,−3,−3, 0,−2, 0, 0,10,−4}, |
| /* Z */ | { 0, 1,−5, 2, 3,−5, 0, 2,−2, 0, 0,−2,−1, 1,_M, 0, 3, 0, 0, 0, 0,−2,−6, 0,−4, 4} |

};
/*
*/

| | | | |
|---|---|---|---|
| #include | <stdio.h> | | |
| #include | <ctype.h> | | |
| #define | MAXJMP | 16 | /* max jumps in a diag */ |
| #define | MAXGAP | 24 | /* don't continue to penalize gaps larger than this */ |
| #define | JMPS | 1024 | /* max jmps in an path */ |
| #define | MX | 4 | /* save if there's at least MX−1 bases since last jmp */ |
| #define | DMAT | 3 | /* value of matching bases */ |
| #define | DMIS | 0 | /* penalty for mismatched bases */ |
| #define | DINS0 | 8 | /* penalty for a gap */ |
| #define | DINS1 | 1 | /* penalty per base */ |
| #define | PINS0 | 8 | /* penalty for a gap */ |
| #define | PINS1 | 4 | /* penalty per residue */ |

struct jmp {

| | | |
|---|---|---|
| short | n[MAXJMP]; | /* size of jmp (neg for dely) */ |
| unsigned short | x[MAXJMP]; | /* base no. of jmp in seq x */ |

| | |
|---|---|
| }; | /* limits seq to 2\hat{ }16 −1 */ |

struct diag {

| | | |
|---|---|---|
| int | score; | /* score at last jmp */ |
| long | offset; | /* offset of prev block */ |
| short | ijmp; | /* current jmp index */ |
| struct jmp | jp; | /* list of jmps */ |

};
struct path {

| | | |
|---|---|---|
| int | spc; | /* number of leading spaces */ |

| | |
|---|---|
| short | n[JMPS];/* size of jmp (gap) */ |
| int | x[JMPS];/* loc of jmp (last elem before gap) */ |

};

| char | | *ofile; | /* output file name */ |
|---|---|---|---|
| char | | *namex[2]; | /* seq names: getseqs( ) */ |
| char | | *prog; | /* prog name for err msgs */ |
| char | | *seqx[2]; | /* seqs: getseqs( ) */ |
| int | | dmax; | /* best diag: nw( ) */ |
| int | | dmax0; | /* final diag */ |
| int | | dna; | /* set if dna: main( ) */ |
| int | | endgaps; | /* set if penalizing end gaps */ |
| int | | gapx, gapy; | /* total gaps in seqs */ |
| int | | len0, len1; | /* seq lens */ |
| int | | ngapx, ngapy; | /* total size of gaps */ |
| int | | smax; | /* max score: nw( ) */ |
| int | | *xbm; | /* bitmap for matching */ |
| long | | offset; | /* current offset in jmp file */ |
| struct | diag | *dx; | /* holds diagonals */ |
| struct | path | pp[2]; | /* holds path for seqs */ |

| | |
|---|---|
| char | *calloc( ), *malloc( ), *index( ), *strcpy( ); |
| char | *getseq( ), *g_calloc( ); |

/* Needleman-Wunsch alignment program
*
* usage: progs file1 file2
* where file1 and file2 are two dna or two protein sequences.
* The sequences can be in upper- or lower-case an may contain ambiguity
* Any lines beginning with ‘;’, ‘>’ or ‘<’ are ignored
* Max file length is 65535 (limited by unsigned short x in the jmp struct)
* A sequence with ⅓ or more of its elements ACGTU is assumed to be DNA
* Output is in the file “align.out”
*
* The program may create a tmp file in /tmp to hold info about traceback.
* Original version developed under BSD 4.3 on a vax 8650
*/
#include “nw.h”
#include “day.h”

| | |
|---|---|
| static | _dbval[26] = { |
| | 1,14,2,13,0,0,4,11,0,0,12,0,3,15,0,0,0,5,6,8,8,7,9,0,10,0 |

};

| | |
|---|---|
| static | _pbval[26] = { |
| | 1, 2\|(1<<(‘D’−‘A’))\|(1<<(‘N’−‘A’)), 4, 8, 16, 32, 64, |
| | 128, 256, 0xFFFFFFF, 1<<10, 1<<11, 1<<12, 1<<13, 1<<14, |
| | 1<<15, 1<<16, 1<<17, 1<<18, 1<<19, 1<<20, 1<<21, 1<<22, |
| | 1<<23, 1<<24, 1<<25\|(1<<(‘E’−‘A’))\|(1<<(‘Q’−‘A’)) |

};
main(ac, av)

| main | |
|---|---|
| int | ac; |
| char | *av[ ]; |

{

prog = av[0];
if (ac != 3) {

fprintf(stderr,“usage: %s file1 file2\n”, prog);
fprintf(stderr,“where file1 and file2 are two dna or two protein sequences.\n”);
fprintf(stderr,“The sequences can be in upper- or lower-case\n”);
fprintf(stderr,“Any lines beginning with ‘;’ or ‘<’ are ignored\n”);
fprintf(stderr,“Output is in the file \“align.out\”\n”);
exit(1);

| } | |
|---|---|
| namex[0] = av[1]; | |
| namex[1] = av[2]; | |
| seqx[0] = getseq(namex[0], &len0); | |
| seqx[1] = getseq(namex[1], &len1); | |
| xbm = (dna)? _dbval : _pbval; | |
| endgaps = 0; | /* 1 to penalize endgaps */ |

| | |
|---|---|
| ofile = “align.out”; | /* output file */ |

| | |
|---|---|
| nw( ); | /* fill in the matrix, get the possible jmps */ |
| readjmps( ); | /* get the actual jmps */ |
| print( ); | /* print stats, alignment */ |
| cleanup(0); | /* unlink any tmp files */ |

}
/* do the alignment, return best score: main( )
* dna: values in Fitch and Smith, PNAS, 80, 1382-1386, 1983
* pro: PAM 250 values
* When scores are equal, we prefer mismatches to any gap, prefer
* a new gap to extending an ongoing gap, and prefer a gap in seqx
* to a gap in seq y.
*/
nw( )

nw

{

| | | |
|---|---|---|
| char | *px, *py; | /* seqs and ptrs */ |
| int | *ndely, *dely; | /* keep track of dely */ |
| int | ndelx, delx; | /* keep track of delx */ |
| int | *tmp; | /* for swapping row0, row1 */ |
| int | mis; | /* score for each type */ |
| int | ins0, ins1; | /* insertion penalties */ |
| register | id; | /* diagonal index */ |
| register | ij; | /* jmp index*/ |
| register | *col0, *col1; | /* score for curr, last row */ |
| register | xx, yy; | /* index into seqs */ |

dx = (struct diag *)g_calloc(“to get diags”, len0+len1+1, sizeof(struct diag));
ndely = (int *)g_calloc(“to get ndely”, len1+1, sizeof(int));
dely = (int *)g_calloc(“to get dely”, len1+1, sizeof(int));
col0 = (int *)g_calloc(“to get col0”, len1+1, sizeof(int));
col1 = (int *)g_calloc(“to get col1”, len1+1, sizeof(int));
ins0 = (dna)? DINS0 : PINS0;
ins1 = (dna)? DINS1 : PINS1;
smax = −10000;
if (endgaps) {

for (col0[0] = dely[0] = −ins0, yy = 1 ; yy <= len1 ; yy++) {

col0[yy] = dely[yy] = col0[yy−1] − ins1;
ndely[yy] = yy;

| } | |
|---|---|
| col0[0] = 0; | /* Waterman Bull Math Biol 84 */ |

}
else

for (yy = 1; yy <= len1; yy++)

dely[yy] = −ins0;

/* fill in match matrix
*/
for (px = seqx[0], xx = 1; xx <= len0; px++, xx++) {

/* initialize first entry in col
*/
if (endgaps) {

if (xx == 1)

col1[0] = delx = −(ins0+ins1);

else

col1[0] = delx = col0[0] − ins1;

ndelx = xx;

}
else {

col1[0] = 0;
delx = −ins0;
ndelx = 0;

}

...nw

for (py = seqx[1], yy = 1; yy <= len1; py++, yy++) {

mis = col0[yy−1];
if (dna)

mis += (xbm[*px−‘A’]&xbm[*py−‘A’])? DMAT : DMIS;

else

mis += _day[*px−‘A’][*py−‘A’];

/* update penalty for del in x seq;
* favor new del over ongong del
* ignore MAXGAP if weighting endgaps
*/
if (endgaps ∥ ndely[yy] < MAXGAP) {

if (col0[yy] − ins0 >= dely[yy]) {

dely[yy] = col0[yy] − (ins0+ins1);
ndely[yy] = 1;

} else {

dely[yy] −= ins1;
ndely[yy]++;

}

} else {

if (col0[yy] − (ins0+ins1) >= dely[yy]) {

dely[yy] = col0[yy] − (ins0+ins1);
ndely[yy] = 1;

} else

ndely[yy]++;

}
/* update penalty for del in y seq;
* favor new del over ongong del
*/
if (endgaps ∥ ndelx < MAXGAP) {

if (col1[yy−1] − ins0 >= delx) {

delx = col1[yy−1] − (ins0+ins1);
ndelx = 1;

} else {

delx −= ins1;
ndelx++;

}

} else {

if (col1[yy−1] − (ins0+ins1) >= delx) {

delx = col1[yy−1] − (ins0+ins1);
ndelx = 1;

} else

ndelx++;

}
/* pick the maximum score; we're favoring
* mis over any del and delx over dely
*/

...nw

id = xx − yy + len1 − 1;
if (mis >= delx && mis >= dely[yy])

col1[yy] = mis;

else if (delx >= dely[yy]) {

col1[yy] = delx;
ij = dx[id].ijmp;
if (dx[id].jp.n[0] && (!dna || (ndelx >= MAXJMP
&& xx > dx[id].jp.x[ij]+MX) ∥ mis > dx[id].score+DINS0)) {

dx[id].ijmp++;
if (++ij >= MAXJMP) {

writejmps(id);
ij = dx[id].ijmp = 0;
dx[id].offset = offset;
offset += sizeof(struct jmp) + sizeof(offset);

}

}
dx[id].jp.n[ij] = ndelx;
dx[id].jp.x[ij] =xx;
dx[id].score = delx;

}
else {

col1[yy] = dely[yy];
ij = dx[id].ijmp;

if (dx[id].jp.n[0] && (!dna ∥ (ndely[yy] >= MAXJMP

&& xx > dx[id].jp.x[ij]+MX) ∥ mis > dx[id].score+DINS0)) {

dx[id].ijmp++;
if (++ij >= MAXJMP) {

writejmps(id);
ij = dx[id].ijmp = 0;
dx[id].offset = offset;
offset += sizeof(struct jmp) + sizeof(offset);

}

}
dx[id].jp.n[ij] = −ndely[yy];
dx[id].jp.x[ij] = xx;
dx[id].score = dely[yy];

}
if (xx == len0 && yy < len1) {

/* last col
*/
if (endgaps)

col1[yy] −= ins0+ins1*(len1−yy);

if (col1[yy] > smax) {

smax = col1[yy];
dmax = id;

}

}

}
if (endgaps && xx < len0)

col1[yy−1] −= ins0+ins1*(len0−xx);

if (col1[yy−1] > smax) {

smax = col1[yy−1];
dmax = id;

}
tmp = col0; col0 = col1; col1 = tmp;

| } | |
|---|---|
| (void) free((char *)ndely); | |
| (void) free((char *)dely); | |
| (void) free((char *)col0); | |
| (void) free((char *)col1); | } |

/*
*
* print( ) -- only routine visible outside this module
*
* static:
* getmat( ) -- trace back best path, count matches: print( )
* pr_align( ) -- print alignment of described in array p[ ]: print( )
* dumpblock( ) -- dump a block of lines with numbers, stars: pr_align( )
* nums( ) -- put out a number line: dumpblock( )
* putline( ) -- put out a line (name, [num], seq, [num]): dumpblock( )
* stars( ) - -put a line of stars: dumpblock( )
* stripname( ) -- strip any path and prefix from a seqname
*/
#include “nw.h”

| #define SPC | 3 | |
|---|---|---|
| #define P_LINE | 256 | /* maximum output line */ |
| #define P_SPC | 3 | /* space between name or num and seq */ |

| extern | _day[26][26]; | |
|---|---|---|
| int | olen; | /* set output line length */ |
| FILE | *fx; | /* output file */ |

print( )

print

{

| | | |
|---|---|---|
| int | lx, ly, firstgap, lastgap; | /* overlap */ |

if ((fx = fopen(ofile, “w”)) == 0) {

fprintf(stderr,“%s: can't write %s\n”, prog, ofile);
cleanup(1);

| } | |
|---|---|
| fprintf(fx, “<first sequence: %s (length = %d)\n”, namex[0], len0); | |
| fprintf(fx, “<second sequence: %s (length = %d)\n”, namex[1], len1); | |
| olen = 60; | |
| lx = len0; | |
| ly = len1; | |
| firstgap = lastgap = 0; | |
| if (dmax < len1 − 1) { | /* leading gap in x */ |

pp[0].spc = firstgap = len1 − dmax − 1;
ly −= pp[0].spc;

| } | |
|---|---|
| else if (dmax > len1 − 1) { | /* leading gap in y */ |

pp[1].spc = firstgap = dmax − (len1 − 1);
lx −= pp[1].spc;

| } | |
|---|---|
| if (dmax0 < len0 − 1) { | /* trailing gap in x */ |

lastgap = len0 − dmax0 −1;
lx −= lastgap;

| } | |
|---|---|
| else if (dmax0 > len0 − 1) { | /* trailing gap in y */ |

lastgap = dmax0 − (len0 − 1);
ly −= lastgap;

}
getmat(lx, ly, firstgap, lastgap);
pr_align( );

}
/*
* trace back the best path, count matches
*/
static

| | |
|---|---|
| getmat(lx, ly, firstgap, lastgap) | getmat |

| | | |
|---|---|---|
| int | lx, ly; | /* “core” (minus endgaps) */ |
| int | firstgap, lastgap; | /* leading trailing overlap */ |

{

| | |
|---|---|
| int | nm, i0, i1, siz0, siz1; |
| char | outx[32]; |
| double | pct; |
| register | n0, n1; |
| register char | *p0, *p1; |

/* get total matches, score
*/
i0 = i1 = siz0 = siz1 = 0;
p0 = seqx[0] + pp[1].spc;
p1 = seqx[1] + pp[0].spc;
n0 = pp[1].spc + 1;
n1 = pp[0].spc + 1;
nm = 0;
while ( *p0 && *p1 ) {

if (siz0) {

p1++;
n1++;
siz0−−;

}
else if (siz1) {

p0++;
n0++;
siz1−−;

}
else {

if (xbm[*p0−‘A’]&xbm[*p1−‘A’])

nm++;

if (n0++ == pp[0].x[i0])

siz0 = pp[0].n[i0++];

if (n1++ == pp[1].x[i1])

siz1 = pp[1].n[i1++];

p0++;
p1++;

}

}
/* pct homology:
* if penalizing endgaps, base is the shorter seq
* else, knock off overhangs and take shorter core
*/
if (endgaps)

lx = (len0 < len1)? len0 : len1;

else

lx = (lx < ly)? lx : ly;

pct = 100.*(double)nm/(double)lx;
fprintf(fx, “\n”);
fprintf(fx, “<%d match%s in an overlap of %d: %.2f percent similarity\n”,

nm, (nm == 1)? “” : “es”, lx, pct);

| | |
|---|---|
| fprintf(fx, “<gaps in first sequence: %d”, gapx); | ...getmat |

if (gapx) {

(void) sprintf(outx, “ (%d %s%s)”,

ngapx, (dna)? “base”:“residue”, (ngapx == 1)? “”:“s”);

fprintf(fx,“%s”, outx);

fprintf(fx, “, gaps in second sequence: %d”, gapy);
if (gapy) {

(void) sprintf(outx, “ (%d %s%s)”,

ngapy, (dna)? “base”:“residue”, (ngapy == 1)? “”:“s”);

fprintf(fx,“%s”, outx);

}
if (dna)

fprintf(fx,
“\n<score: %d (match = %d, mismatch = %d, gap penalty = %d + %d per base)\n”,
smax, DMAT, DMIS, DINS0, DINS1);

else

fprintf(fx,
“\n<score: %d (Dayhoff PAM 250 matrix, gap penalty = %d + %d per residue)\n”,
smax, PINS0, PINS1);

if (endgaps)

fprintf(fx,
“<endgaps penalized. left endgap: %d %s%s, right endgap: %d %s%s\n”,
firstgap, (dna)? “base” : “residue”, (firstgap == 1)? “” : “s”,
lastgap, (dna)? “base” : “residue”, (lastgap == 1)? “” : “s”);

else

fprintf(fx, “<endgaps not penalized\n”);

}

| | | |
|---|---|---|
| static | nm; | /* matches in core -- for checking */ |
| static | lmax; | /* lengths of stripped file names */ |
| static | ij[2]; | /* jmp index for a path */ |
| static | nc[2]; | /* number at start of current line */ |
| static | ni[2]; | /* current elem number -- for gapping */ |
| static | siz[2]; | |
| static char | *ps[2]; | /* ptr to current element */ |
| static char | *po[2]; | /* ptr to next output char slot */ |
| static char | out[2][P_LINE]; | /* output line */ |
| static char | star[P_LINE]; | /* set by stars( ) */ |

/*
* print alignment of described in struct path pp[ ]
*/
static

| | |
|---|---|
| pr_align( ) | pr_align |

{

| | | |
|---|---|---|
| int | nn; | /* char count */ |
| int | more; | |
| register | i; | |

for (i = 0, lmax = 0; i < 2; i++) {

nn = stripname(namex[i]);
if (nn > lmax)

lmax = nn;

| nc[i] = 1; | |
|---|---|
| ni[i] = 1; | |
| siz[i] = ij[i] = 0; | |
| ps[i] = seqx[i]; | |
| po[i] = out[i]; | } |

| | |
|---|---|
| for (nn = nm = 0, more = 1; more; ) { | ...pr_align |

for (i = more = 0; i < 2; i++) {

/*
* do we have more of this sequence?
*/
if (!*ps[i])

continue;

| more++; | |
|---|---|
| if (pp[i].spc) { | /* leading space */ |

*po[i]++ = ‘ ’;
pp[i].spc−−;

| } | |
|---|---|
| else if (siz[i]) { | /* in a gap */ |

*po[i]++ = ‘−’;
siz[i]−−;

| } | |
|---|---|
| else { | /* we're putting a seq element |
| | */ |

*po[i] = *ps[i];
if (islower(*ps[i]))

*ps[i] = toupper(*ps[i]);

po[i]++;
ps[i]++;
/*
* are we at next gap for this seq?
*/
if (ni[i] == pp[i].x[ij[i]]) {

/*
* we need to merge all gaps
* at this location
*/
siz[i] = pp[i].n[ij[i]++];
while (ni[i] == pp[i].x[ij[i]])

siz[i] += pp[i].n[ij[i]++];

}
ni[i]++;

}

}
if (++nn == olen ∥ !more && nn) {

dumpblock( );
for (i = 0; i < 2; i++)

po[i] = out[i];

nn = 0;

}

}

}
/*
* dump a block of lines, including numbers, stars: pr_align( )
*/
static
dumpblock( )

dumpblock

{

register i;
for (i = 0; i < 2; i++)

*po[i]−− = ‘\0’;

...dumpblock

(void) putc(‘\n’, fx);
for (i = 0; i < 2; i++) {

if (*out[i] && (*out[i] != ‘ ’ ∥ *(po[i]) != ‘ ’)) {

if (i == 0)

nums(i);

if (i == 0 && *out[1])

stars( );

putline(i);
if (i == 0 && *out[1])

fprintf(fx, star);

if (i == 1)

nums(i);

}

}

}
/*
* put out a number line: dumpblock( )
*/
static

| | |
|---|---|
| nums(ix) | nums |

| | | |
|---|---|---|
| int | ix; | /* index in out[ ] holding seq line */ |

{

| | |
|---|---|
| char | nline[P_LINE]; |
| register | i, j; |
| register char | *pn, *px, *py; |

for (pn = nline, i = 0; i < lmax+P_SPC; i++, pn++)

*pn = ‘ ’;

for (i = nc[ix], py = out[ix]; *py; py++, pn++) {

if (*py == ‘ ’ ∥ *py == ‘−’)

*pn = ‘ ’;

else {

if (i%10 == 0 ∥ (i == 1 && nc[ix] != 1)) {

j = (i < 0)? −i : i;
for (px = pn; j; j /= 10, px−−)

*px = j%10 + ‘0’;

if (i < 0)

*px = ‘−’;

}
else

*pn = ‘ ’;

i++;

}

}
*pn = ‘\0’;
nc[ix] = i;
for (pn = nline; *pn; pn++)

(void) putc(*pn, fx);

(void) putc(‘\n’, fx);

}
/*
* put out a line (name, [num], seq, [num]): dumpblock( )
*/
static

| | |
|---|---|
| putline(ix) | putline |

| | | |
|---|---|---|
| int | ix; | { |

...putline

| | |
|---|---|
| int | i; |
| register char | *px; |

for (px = namex[ix], i = 0; *px && *px != ‘:’; px++, i++)

(void) putc(*px, fx);

for (; i < lmax+P_SPC; i++)

(void) putc(‘ ’, fx);

/* these count from 1:
* ni[ ] is current element (from 1)
* nc[ ] is number at start of current line
*/
for (px = out[ix]; *px; px++)

(void) putc(*px&0x7F, fx);

(void) putc(‘\n’, fx);

}
/*
* put a line of stars (seqs always in out[0], out[1]): dumpblock( )
*/
static
stars( )

stars

{

| | |
|---|---|
| int | i; |
| register char | *p0, *p1, cx, *px; |

if (!*out[0] ∥ (*out[0] == ‘ ’ && *(po[0]) == ‘ ’) ∥
!*out[1] ∥ (*out[1] == ‘ ’ && *(po[1]) == ‘ ’))

return;

px = star;
for (i = lmax+P_SPC; i; i−−)

*px++ = ‘ ’;

for (p0 = out[0], p1 = out[1]; *p0 && *p1; p0++, p1++) {

if (isalpha(*p0) && isalpha(*p1)) {

if (xbm[*p0−‘A’]&xbm[*p1−‘A’]) {

cx = ‘*’;
nm++;

}
else if (!dna && _day[*p0−‘A’][*p1−‘A’] > 0)

cx = ‘.’;

else

cx = ‘ ’;

}
else

cx = ‘ ’;

*px++ = cx;

}
*px++ = ‘\n’;
*px = ‘\0’;

}
/*
* strip path or prefix from pn, return len: pr_align( )
*/
static
stripname(pn)

| stripname | | |
|---|---|---|
| char | *pn; | /* file name (may be path) */ |

{

| | |
|---|---|
| register char | *px, *py; |

py = 0;
for (px = pn; *px; px++)

if (*px == ‘/’)

py = px + 1;

if (py)

(void) strcpy(pn, py);

return(strlen(pn));

}
/*
* cleanup( ) -- cleanup any tmp file
* getseq( ) -- read in seq, set dna, len, maxlen
* g_calloc( ) -- calloc( ) with error checkin
* readjmps( ) -- get the good jmps, from tmp file if necessary
* writejmps( ) -- write a filled array of jmps to a tmp file: nw( )
*/
#include “nw.h”
#include <sys/file.h>

| | | |
|---|---|---|
| char | *jname = “/tmp/homgXXXXXX”; | /* tmp file for jmps */ |
| FILE | *fj; | |
| int | cleanup( ); | /* cleanup tmp file */ |
| long | lseek( ); | |

/*
* remove any tmp file if we blow
*/

| | |
|---|---|
| cleanup(i) | cleanup |

| | |
|---|---|
| int | i; |

{

if (fj)

(void) unlink(jname);

exit(i);

}
/*
* read, return ptr to seq, set dna, len, maxlen
* skip lines starting with ‘;’, ‘<’, or ‘>’
* seq in upper or lower case
*/

| | |
|---|---|
| char | * |

| | |
|---|---|
| getseq(file, len) | getseq |

| | | |
|---|---|---|
| char | *file; | /* file name */ |
| int | *len; | /* seq len */ |

{

| | |
|---|---|
| char | line[1024], *pseq; |
| register char | *px, *py; |
| int | natgc, tlen; |
| FILE | *fp; |

if ((fp = fopen(file,“r”)) == 0) {

fprintf(stderr,“%s: can't read %s\n”, prog, file);
exit(1);

}
tlen = natgc = 0;
while (fgets(line, 1024, fp)) {

if (*line == ‘;’ ∥ *line == ‘<’ ∥ *line == ‘>’)

continue;

for (px = line; *px != ‘\n’; px++)

if (isupper(*px) ∥ islower(*px))

tlen++;

}
if ((pseq = malloc((unsigned)(tlen+6))) == 0) {

fprintf(stderr,“%s: malloc( ) failed to get %d bytes for %s\n”, prog, tlen+6, file);
exit(1);

}
pseq[0] = pseq[1] = pseq[2] = pseq[3] = ‘\0’;

...getseq

py = pseq + 4;
*len = tlen;
rewind(fp);
while (fgets(line, 1024, fp)) {

if (*line == ‘;’ ∥ *line == ‘<’ ∥ *line == ‘>’)

continue;

for (px = line; *px != ‘\n’; px++) {

if (isupper(*px))

*py++ = *px;

else if (islower(*px))

*py++ = toupper(*px);

if (index(“ATGCU”,*(py−1)))

natgc++;

}

}
*py++ = ‘\0’;
*py = ‘\0’;
(void) fclose(fp);
dna = natgc > (tlen/3);
return(pseq+4);

}

| | |
|---|---|
| char | * |

| | |
|---|---|
| g_calloc(msg, nx, sz) | g_calloc |

| | | |
|---|---|---|
| char | *msg; | /* program, calling routine */ |
| int | nx, sz; | /* number and size of elements */ |

{

| | |
|---|---|
| char | *px, *calloc( ); |

if ((px = calloc((unsigned)nx, (unsigned)sz)) == 0) {

if (*msg) {

fprintf(stderr, “%s: g_calloc( ) failed %s (n=%d, sz=%d)\n”, prog, msg, nx, sz);
exit(1);

}

}
return(px);

}
/*
* get final jmps from dx[ ] or tmp file, set pp[ ], reset dmax: main( )
*/
readjmps( )

readjmps

{

| | |
|---|---|
| int | fd = −1; |
| int | siz, i0, i1; |

register i, j, xx;
if (fj) {

(void) fclose(fj);
if ((fd = open(jname, O_RDONLY, 0)) < 0) {

fprintf(stderr, “%s: can't open( ) %s\n”, prog, jname);
cleanup(1);

}

}
for (i = i0 = i1 = 0, dmax0 = dmax, xx = len0; ; i++) {

while (1) {

for (j = dx[dmax].ijmp; j >= 0 && dx[dmax].jp.x[j] >= xx; j−−)

;

...readjmps

if (j < 0 && dx[dmax].offset && fj) {

(void) lseek(fd, dx[dmax].offset, 0);
(void) read(fd, (char *)&dx[dmax].jp, sizeof(struct jmp));
(void) read(fd, (char *)&dx[dmax].offset, sizeof(dx[dmax].offset));
dx[dmax].ijmp = MAXJMP−1;

}
else

break;

}
if (i >= JMPS) {

fprintf(stderr, “%s: too many gaps in alignment\n”, prog);
cleanup(1);

}
if (j >= 0) {

| siz = dx[dmax].jp.n[j]; | |
|---|---|
| xx = dx[dmax].jp.x[j]; | |
| dmax += siz; | |
| if (siz < 0) { | /* gap in second seq */ |

pp[1].n[i1] = −siz;
xx += siz;
/* id = xx − yy + len1 − 1
*/
pp[1].x[i1] = xx − dmax + len1 − 1;
gapy++;
ngapy −= siz;

/* ignore MAXGAP when doing endgaps */

siz = (−siz < MAXGAP ∥ endgaps)? −siz : MAXGAP;
i1++;

}
else if (siz > 0) { /* gap in first seq */

pp[0].n[i0] = siz;
pp[0].x[i0] = xx;
gapx++;
ngapx += siz;

/* ignore MAXGAP when doing endgaps */

siz = (siz < MAXGAP ∥ endgaps)? siz : MAXGAP;
i0++;

}

}
else

break;

}
/* reverse the order of jmps
*/
for (j = 0, i0−−; j < i0; j++, i0−−) {

i = pp[0].n[j]; pp[0].n[j] = pp[0].n[i0]; pp[0].n[i0] = i;
i = pp[0].x[j]; pp[0].x[j] = pp[0].x[i0]; pp[0].x[i0] = i;

}
for (j = 0, i1−−; j < i1; j++, i1−−) {

i = pp[1].n[j]; pp[1].n[j] = pp[1].n[i1]; pp[1].n[i1] = i;
i = pp[1].x[j]; pp[1].x[j] = pp[1].x[i1]; pp[1].x[i1] = i;

}
if (fd >= 0)

(void) close(fd);

if (fj) {

(void) unlink(jname);
fj = 0;
offset = 0;

| | |
|---|---|
| } | } |

/*
* write a filled jmp struct offset of the prev one (if any): nw( )
*/
writejmps(ix)

| writejmps | |
|---|---|
| int | ix; |

{

| | |
|---|---|
| char | *mktemp( ); |

if (!fj) {

if (mktemp(jname) < 0) {

fprintf(stderr, “%s: can't mktemp( ) %s\n”, prog, jname);
cleanup(1);

}
if ((fj = fopen(jname, “w”)) == 0) {

fprintf(stderr, “%s: can't write %s\n”, prog, jname);
exit(1);

}

}
(void) fwrite((char *)&dx[ix].jp, sizeof(struct jmp), 1, fj);
(void) fwrite((char *)&dx[ix].offset, sizeof(dx[ix].offset), 1, fj);
}

TABLE 2

| | | |
|---|---|---|
| PRO | XXXXXXXXXXXXXXX | (Length = 15 amino acids) |
| Comparison | XXXXXYYYYYYY | (Length = 12 amino acids) |
| Protein | | |

% amino acid sequence identity = (the number of identically matching amino acid residues between the two polypeptide sequences as determined by ALIGN-2) divided by (the total number of amino acid residues of the PRO polypeptide) = 5 divided by 15 = 33.3%

TABLE 3

| | | |
|---|---|---|
| PRO | XXXXXXXXXX | (Length = 10 amino acids) |
| Comparison | XXXXXYYYYYYZZYZ | (Length = 15 amino acids) |
| Protein | | |

% amino acid sequence identity = (the number of identically matching amino acid residues between the two polypeptide sequences as determined by ALIGN-2) divided by (the total number of amino acid residues of the PRO polypeptide) = 5 divided by 10 = 50%

TABLE 4

| | | |
|---|---|---|
| PRO-DNA | NNNNNNNNNNNNNN | (Length = 14 nucleotides) |
| Comparison | NNNNNNLLLLLLLLLL | (Length = 16 nucleotides) |
| DNA | | |

% nucleic acid sequence identity = (the number of identically matching nucleotides between the two nucleic acid sequences as determined by ALIGN-2) divided by (the total number of nucleotides of the PRO-DNA nucleic acid sequence) = 6 divided by 14 = 42.9%

TABLE 5

| | | |
|---|---|---|
| PRO-DNA | NNNNNNNNNNNN | (Length = 12 nucleotides) |
| Comparison DNA | NNNNLLLVV | (Length = 9 nucleotides) |

% nucleic acid sequence identity = (the number of identically matching nucleotides between the two nucleic acid sequences as determined by ALIGN-2) divided by (the total number of nucleotides of the PRO-DNA nucleic acid sequence) = 4 divided by 12 = 33.3%

### II. Compositions and Methods of the Invention

[0123] A. Full-Length PRO Polypeptides

[0124] The present invention provides newly identified and isolated nucleotide sequences encoding polypeptides referred to in the present application as PRO polypeptides. In particular, cDNAs encoding various PRO polypeptides have been identified and isolated, as disclosed in further detail in the Examples below. However, for sake of simplicity, in the present specification the protein encoded by the full length native nucleic acid molecules disclosed herein as well as all further native homologues and variants included in the foregoing definition of PRO, will be referred to as “PRO/number”, regardless of their origin or mode of preparation.

[0125] As disclosed in the Examples below, various cDNA clones have been disclosed. The predicted amino acid sequence can be determined from the nucleotide sequence using routine skill. For the PRO polypeptides and encoding nucleic acids described herein, Applicants have identified what is believed to be the reading frame best identifiable with the sequence information available at the time.

[0126] B. PRO Polypeptide Variants

[0127] In addition to the full-length native sequence PRO polypeptides described herein, it is contemplated that PRO variants can be prepared. PRO variants can be prepared by introducing appropriate nucleotide changes into the PRO DNA, and/or by synthesis of the desired PRO polypeptide. Those skilled in the art will appreciate that amino acid changes may alter post-translational processes of the PRO, such as changing the number or position of glycosylation sites or altering the membrane anchoring characteristics.

[0128] Variations in the native full-length sequence PRO or in various domains of the PRO described herein, can be made, for example, using any of the techniques and guidelines for conservative and non-conservative mutations set forth, for instance, in U.S. Pat. No. 5,364,934. Variations may be a substitution, deletion or insertion of one or more codons encoding the PRO that results in a change in the amino acid sequence of the PRO as compared with the native sequence PRO. Optionally, the variation is by substitution of at least one amino acid with any other amino acid in one or more of the domains of the PRO. Guidance in determining which amino acid residue may be inserted, substituted or deleted without adversely affecting the desired activity may be found by comparing the sequence of the PRO with that of homologous known protein molecules and minimizing the number of amino acid sequence changes made in regions of high homology. Amino acid substitutions can be the result of replacing one amino acid with another amino acid having similar structural and/or chemical properties, such as the replacement of a leucine with a serine, i.e., conservative amino acid replacements. Insertions or deletions may optionally be in the range of about 1 to 5 amino acids. The variation allowed may be determined by systematically making insertions, deletions or substitutions of amino acids in the sequence and testing the resulting variants for activity exhibited by the full-length or mature native sequence.

[0129] PRO polypeptide fragments are provided herein. Such fragments may be truncated at the N-terminus or C-terminus, or may lack internal residues, for example, when compared with a full length native protein. Certain fragments lack amino acid residues that are not essential for a desired biological activity of the PRO polypeptide.

[0130] PRO fragments may be prepared by any of a number of conventional techniques. Desired peptide fragments may be chemically synthesized. An alternative approach involves generating PRO fragments by enzymatic digestion, e.g., by treating the protein with an enzyme known to cleave proteins at sites defined by particular amino acid residues, or by digesting the DNA with suitable restriction enzymes and isolating the desired fragment. Yet another suitable technique involves isolating and amplifying a DNA fragment encoding a desired polypeptide fragment, by polymerase chain reaction (PCR). Oligonucleotides that define the desired termini of the DNA fragment are employed at the 5′ and 3′ primers in the PCR. Preferably, PRO polypeptide fragments share at least one biological and/or immunological activity with the native PRO polypeptide disclosed herein.

[0131] In particular embodiments, conservative substitutions of interest are shown in Table 6 under the heading of preferred substitutions. If such substitutions result in a change in biological activity, then more substantial changes, denominated exemplary substitutions in Table 6, or as further described below in reference to amino acid classes, are introduced and the products screened.

TABLE 6

| Original | | |
|---|---|---|
| Residue | Exemplary Substitutions | Preferred Substitutions |
| Ala (A) | val; leu; ile | val |
| Arg (R) | lys; gln; asn | lys |
| Asn (N) | gln; his; lys; arg | gln |
| Asp (D) | glu | glu |
| Cys (C) | ser | ser |
| Gln (Q) | asn | asn |
| Glu (E) | asp | asp |
| Gly (G) | pro; ala | ala |
| His (H) | asn; gln; lys; arg | arg |
| Ile (I) | leu; val; met; ala; phe; norleucine | leu |
| Leu (L) | norleucine; ile; val; met; ala; phe | ile |
| Lys (K) | arg; gln; asn | arg |
| Met (M) | leu; phe; ile | leu |
| Phe (F) | leu; val; ile; ala; tyr | leu |
| Pro (P) | ala | ala |
| Ser (S) | thr | thr |
| Thr (T) | ser | ser |
| Trp (W) | tyr; phe | tyr |
| Tyr (Y) | trp; phe; thr; ser | phe |
| Val (V) | ile; leu; met; phe; ala; norleucine | leu |

[0132] Substantial modifications in function or immunological identity of the PRO polypeptide are accomplished by selecting substitutions that differ significantly in their effect on maintaining (a) the structure of the polypeptide backbone in the area of the substitution, for example, as a sheet or helical conformation, (b) the charge or hydrophobicity of the molecule at the target site, or (c) the bulk of the side chain. Naturally occurring residues are divided into groups based on common side-chain properties:

(1) hydrophobic: norleucine, met, ala, val, leu, ile;
(2) neutral hydrophilic: cys, ser, thr;
(3) acidic: asp, glu;
(4) basic: asn, gln, his, lys, arg;
(5) residues that influence chain orientation: gly, pro; and
(6) aromatic: trp, tyr, phe.

[0133] Non-conservative substitutions will entail exchanging a member of one of these classes for another class. Such substituted residues also may be introduced into the conservative substitution sites or, more preferably, into the remaining (non-conserved) sites.

[0134] The variations can be made using methods known in the art such as oligonucleotide-mediated (site-directed) mutagenesis, alanine scanning, and PCR mutagenesis. Site-directed mutagenesis [Carter et al., Nucl. Acids Res., 13:4331 (1986); Zoller et al., Nucl. Acids Res., 10:6487 (1987)], cassette mutagenesis [Wells et al., Gene, 34:315 (1985)], restriction selection mutagenesis [Wells et al., Philos. Trans. R. Soc. London SerA, 317:415 (1986)] or other known techniques can be performed on the cloned DNA to produce the PRO variant DNA.

[0135] Scanning amino acid analysis can also be employed to identify one or more amino acids along a contiguous sequence. Among the preferred scanning amino acids are relatively small, neutral amino acids. Such amino acids include alanine, glycine, serine, and cysteine. Alanine is typically a preferred scanning amino acid among this group because it eliminates the side-chain beyond the beta-carbon and is less likely to alter the main-chain conformation of the variant [Cunningham and Wells, Science, 244: 1081-1085 (1989)]. Alanine is also typically preferred because it is the most common amino acid. Further, it is frequently found in both buried and exposed positions [Creighton, The Proteins, (W.H. Freeman & Co., N.Y.); Chothia, J. Mol. Biol., 150:1 (1976)]. If alanine substitution does not yield adequate amounts of variant, an isoteric amino acid can be used.

[0136] C. Modifications of PRO

[0137] Covalent modifications of PRO are included within the scope of this invention. One type of covalent modification includes reacting targeted amino acid residues of a PRO polypeptide with an organic derivatizing agent that is capable of reacting with selected side chains or the N- or C-terminal residues of the PRO. Derivatization with bifunctional agents is useful, for instance, for crosslinking PRO to a water-insoluble support matrix or surface for use in the method for purifying anti-PRO antibodies, and vice-versa. Commonly used crosslinking agents include, e.g., 1,1-bis(diazoacetyl)-2-phenylethane, glutaraldehyde, N-hydroxysuccinimide esters, for example, esters with 4-azidosalicylic acid, homobifunctional imidoesters, including disuccinimidyl esters such as 3,3′-dithiobis(succinimidylpropionate), bifunctional maleimides such as bis-N-maleimido-1,8-octane and agents such as methyl-3-[(p-azidophenyl)dithio]propioimidate.

[0138] Other modifications include deamidation of glutaminyl and asparaginyl residues to the corresponding glutamyl and aspartyl residues, respectively, hydroxylation of proline and lysine, phosphorylation of hydroxyl groups of seryl or threonyl residues, methylation of the α-amino groups of lysine, arginine, and histidine side chains [T. E. Creighton, Proteins: Structure and Molecular Properties, W.H. Freeman & Co., San Francisco, pp. 79-86 (1983)], acetylation of the N-terminal amine, and amidation of any C-terminal carboxyl group.

[0139] Another type of covalent modification of the PRO polypeptide included within the scope of this invention comprises altering the native glycosylation pattern of the polypeptide. “Altering the native glycosylation pattern” is intended for purposes herein to mean deleting one or more carbohydrate moieties found in native sequence PRO (either by removing the underlying glycosylation site or by deleting the glycosylation by chemical and/or enzymatic means), and/or adding one or more glycosylation sites that are not present in the native sequence PRO. In addition, the phrase includes qualitative changes in the glycosylation of the native proteins, involving a change in the nature and proportions of the various carbohydrate moieties present.

[0140] Addition of glycosylation sites to the PRO polypeptide may be accomplished by altering the amino acid sequence. The alteration may be made, for example, by the addition of, or substitution by, one or more serine or threonine residues to the native sequence PRO (for O-linked glycosylation sites). The PRO amino acid sequence may optionally be altered through changes at the DNA level, particularly by mutating the DNA encoding the PRO polypeptide at preselected bases such that codons are generated that will translate into the desired amino acids.

[0141] Another means of increasing the number of carbohydrate moieties on the PRO polypeptide is by chemical or enzymatic coupling of glycosides to the polypeptide. Such methods are described in the art, e.g., in WO 87/05330 published 11 Sep. 1987, and in Aplin and Wriston, CRC Crit. Rev. Biochem., pp. 259-306 (1981).

[0142] Removal of carbohydrate moieties present on the PRO polypeptide may be accomplished chemically or enzymatically or by mutational substitution of codons encoding for amino acid residues that serve as targets for glycosylation. Chemical deglycosylation techniques are known in the art and described, for instance, by Hakimuddin, et al., Arch. Biochem. Biophys., 259:52 (1987) and by Edge et al., Anal. Biochem., 118:131 (1981). Enzymatic cleavage of carbohydrate moieties on polypeptides can be achieved by the use of a variety of endo- and exo-glycosidases as described by Thotakura et al., Meth. Enzymol., 138:350 (1987).

[0143] Another type of covalent modification of PRO comprises linking the PRO polypeptide to one of a variety of nonproteinaceous polymers, e.g., polyethylene glycol (PEG), polypropylene glycol, or polyoxyalkylenes, in the manner set forth in U.S. Pat. No. 4,640,835; 4,496,689; 4,301,144; 4,670,417; 4,791,192 or 4,179,337.

[0144] The PRO of the present invention may also be modified in a way to form a chimeric molecule comprising PRO fused to another, heterologous polypeptide or amino acid sequence.

[0145] In one embodiment, such a chimeric molecule comprises a fusion of the PRO with a tag polypeptide which provides an epitope to which an anti-tag antibody can selectively bind. The epitope tag is generally placed at the amino- or carboxyl-terminus of the PRO. The presence of such epitope-tagged forms of the PRO can be detected using an antibody against the tag polypeptide. Also, provision of the epitope tag enables the PRO to be readily purified by affinity purification using an anti-tag antibody or another type of affinity matrix that binds to the epitope tag. Various tag polypeptides and their respective antibodies are well known in the art. Examples include poly-histidine (poly-his) or poly-histidine-glycine (poly-his-gly) tags; the flu HA tag polypeptide and its antibody 12CA5 [Field et al., Mol. Cell. Biol., 8:2159-2165 (1988)]; the c-myc tag and the 8F9, 3C7, 6E10, G4, B7 and 9E10 antibodies thereto [Evan et al., Molecular and Cellular Biology, 5:3610-3616 (1985)]; and the Herpes Simplex virus glycoprotein D (gD) tag and its antibody [Paborsky et al., Protein Engineering, 3(6):547-553 (1990)]. Other tag polypeptides include the Flag-peptide [Hopp et al., BioTechnology, 6:1204-1210 (1988)]; the KT3 epitope peptide [Martin et al., Science, 255:192-194 (1992)]; an alpha-tubulin epitope peptide [Skinner et al., J. Biol. Chem., 266:15163-15166 (1991)]; and the T7 gene 10 protein peptide tag [Lutz-Freyermuth et al., Proc. Natl. Acad. Sci. USA, 87:6393-6397 (1990)].

[0146] In an alternative embodiment, the chimeric molecule may comprise a fusion of the PRO with an immunoglobulin or a particular region of an immunoglobulin. For a bivalent form of the chimeric molecule (also referred to as an “immunoadhesin”), such a fusion could be to the Fc region of an IgG molecule. The Ig fusions preferably include the substitution of a soluble (transmembrane domain deleted or inactivated) form of a PRO polypeptide in place of at least one variable region within an Ig molecule. In a particularly preferred embodiment, the immunoglobulin fusion includes the hinge, CH2 and CH3, or the hinge, CH1, CH2 and CH3 regions of an IgG1 molecule. For the production of immunoglobulin fusions see also U.S. Pat. No. 5,428,130 issued Jun. 27, 1995.

[0147] D. Preparation of PRO

[0148] The description below relates primarily to production of PRO by culturing cells transformed or transfected with a vector containing PRO nucleic acid. It is, of course, contemplated that alternative methods, which are well known in the art, may be employed to prepare PRO. For instance, the PRO sequence, or portions thereof, may be produced by direct peptide synthesis using solid-phase techniques [see, e.g., Stewart et al., Solid-Phase Peptide Synthesis, W.H. Freeman Co., San Francisco, Calif. (1969); Merrifield, J. Am. Chem. Soc., 85:2149-2154 (1963)]. In vitro protein synthesis may be performed using manual techniques or by automation. Automated synthesis may be accomplished, for instance, using an Applied Biosystems Peptide Synthesizer (Foster City, Calif.) using manufacturer's instructions. Various portions of the PRO may be chemically synthesized separately and combined using chemical or enzymatic methods to produce the full-length PRO.

### 1. Isolation of DNA Encoding PRO

[0149] DNA encoding PRO may be obtained from a cDNA library prepared from tissue believed to possess the PRO mRNA and to express it at a detectable level. Accordingly, human PRO DNA can be conveniently obtained from a cDNA library prepared from human tissue, such as described in the Examples. The PRO-encoding gene may also be obtained from a genomic library or by known synthetic procedures (e.g., automated nucleic acid synthesis).

[0150] Libraries can be screened with probes (such as antibodies to the PRO or oligonucleotides of at least about 20-80 bases) designed to identify the gene of interest or the protein encoded by it. Screening the cDNA or genomic library with the selected probe may be conducted using standard procedures, such as described in Sambrook et al., Molecular Cloning: A Laboratory Manual (New York: Cold Spring Harbor Laboratory Press, 1989). An alternative means to isolate the gene encoding PRO is to use PCR methodology [Sambrook et al., supra; Dieffenbach et al., PCR Primer: A Laboratory Manual (Cold Spring Harbor Laboratory Press, 1995)].

[0151] The Examples below describe techniques for screening a cDNA library. The oligonucleotide sequences selected as probes should be of sufficient length and sufficiently unambiguous that false positives are minimized. The oligonucleotide is preferably labeled such that it can be detected upon hybridization to DNA in the library being screened. Methods of labeling are well known in the art, and include the use of radiolabels like ³²P-labeled ATP, biotinylation or enzyme labeling. Hybridization conditions, including moderate stringency and high stringency, are provided in Sambrook et al., supra.

[0152] Sequences identified in such library screening methods can be compared and aligned to other known sequences deposited and available in public databases such as GenBank or other private sequence databases. Sequence identity (at either the amino acid or nucleotide level) within defined regions of the molecule or across the full-length sequence can be determined using methods known in the art and as described herein.

[0153] Nucleic acid having protein coding sequence may be obtained by screening selected cDNA or genomic libraries using the deduced amino acid sequence disclosed herein for the first time, and, if necessary, using conventional primer extension procedures as described in Sambrook et al., supra, to detect precursors and processing intermediates of mRNA that may not have been reverse-transcribed into cDNA.

### 2. Selection and Transformation of Host Cells

[0154] Host cells are transfected or transformed with expression or cloning vectors described herein for PRO production and cultured in conventional nutrient media modified as appropriate for inducing promoters, selecting transformants, or amplifying the genes encoding the desired sequences. The culture conditions, such as media, temperature, pH and the like, can be selected by the skilled artisan without undue experimentation. In general, principles, protocols, and practical techniques for maximizing the productivity of cell cultures can be found in Mammalian Cell Biotechnology: a Practical Approach, M. Butler, ed. (IRL Press, 1991) and Sambrook et al., supra.

[0155] Methods of eukaryotic cell transfection and prokaryotic cell transformation are known to the ordinarily skilled artisan, for example, CaCl₂, CaPO₄, liposome-mediated and electroporation. Depending on the host cell used, transformation is performed using standard techniques appropriate to such cells. The calcium treatment employing calcium chloride, as described in Sambrook et al., supra, or electroporation is generally used for prokaryotes. Infection with Agrobacterium tumefaciens is used for transformation of certain plant cells, as described by Shaw et al., Gene, 23:315 (1983) and WO 89/05859 published 29 Jun. 1989. For mammalian cells without such cell walls, the calcium phosphate precipitation method of Graham and van der Eb, Virology, 52:456-457 (1978) can be employed. General aspects of mammalian cell host system transfections have been described in U.S. Pat. No. 4,399,216. Transformations into yeast are typically carried out according to the method of Van Solingen et al., J. Bact., 130:946 (1977) and Hsiao et al., Proc. Natl. Acad. Sci. (USA), 76:3829 (1979). However, other methods for introducing DNA into cells, such as by nuclear microinjection, electroporation, bacterial protoplast fusion with intact cells, or polycations, e.g., polybrene, polyornithine, may also be used. For various techniques for transforming mammalian cells, see Keown et al., Methods in Enzymology, 185:527-537 (1990) and Mansour et al., Nature, 336:348-352 (1988).

[0156] Suitable host cells for cloning or expressing the DNA in the vectors herein include prokaryote, yeast, or higher eukaryote cells. Suitable prokaryotes include but are not limited to eubacteria, such as Gram-negative or Gram-positive organisms, for example, Enterobacteriaceae such as E. coli. Various E. coli strains are publicly available, such as E. coli K12 strain MM294 (ATCC 31,446); E. coli X1776 (ATCC 31,537); E. coli strain W3110 (ATCC 27,325) and K5 772 (ATCC 53,635). Other suitable prokaryotic host cells include Enterobacteriaceae such as Escherichia, e.g., E. coli, Enterobacter, Erwinia, Klebsiella, Proteus, Salmonella, e.g., Salmonella typhimurium, Serratia, e.g., Serratia marcescans, and Shigella, as well as Bacilli such as B. subtilis and B. licheniformis (e.g., B. licheniformis 41P disclosed in DD 266,710 published 12 Apr. 1989), Pseudomonas such as P. aeruginosa, and Streptomyces. These examples are illustrative rather than limiting. Strain W3110 is one particularly preferred host or parent host because it is a common host strain for recombinant DNA product fermentations. Preferably, the host cell secretes minimal amounts of proteolytic enzymes. For example, strain W3110 may be modified to effect a genetic mutation in the genes encoding proteins endogenous to the host, with examples of such hosts including E. coli W3110 strain 1A2, which has the complete genotype tonA; E. coli W3110 strain 9E4, which has the complete genotype tonA ptr3; E. coli W3110 strain 27C7 (ATCC 55,244), which has the complete genotype tonA ptr3 phoA E15 (argF-lac)169 degP ompT kan^{r}; E. coli W3110 strain 37D6, which has the complete genotype tonA ptr3 phoA ELS (argF-lac)169 degP ompT rbs7 ilvG kan^{r}; E. coli W3110 strain 40B4, which is strain 37D6 with a non-kanamycin resistant degP deletion mutation; and an E. coli strain having mutant periplasmic protease disclosed in U.S. Pat. No. 4,946,783 issued 7 Aug. 1990. Alternatively, in vitro methods of cloning, e.g., PCR or other nucleic acid polymerase reactions, are suitable.

[0157] In addition to prokaryotes, eukaryotic microbes such as filamentous fungi or yeast are suitable cloning or expression hosts for PRO-encoding vectors. Saccharomyces cerevisiae is a commonly used lower eukaryotic host microorganism. Others include Schizosaccharomyces pombe (Beach and Nurse, Nature, 290: 140 [1981]; EP 139,383 published 2 May 1985); Kluyveromyces hosts (U.S. Pat. No. 4,943,529; Fleer et al., Bio/Technology, 9:968-975 (1991)) such as, e.g., K. lactis (MW98-8C, CBS683, CBS4574; Louvencourt et al., J. Bacteriol., 154(2):737-742 [1983]), K. fragilis (ATCC 12,424), K. bulgaricus (ATCC 16,045), K. wickeramii (ATCC 24,178), K. waltii (ATCC 56,500), K. drosophilarum (ATCC 36,906; Van den Berg et al., Bio/Technology, 8:135 (1990)), K. thermotolerans, and K. marxianus; yarrowia (EP 402,226); Pichia pastoris (EP 183,070; Sreekrishna et al., J. Basic Microbiol., 28:265-278 [1988]); Candida; Trichoderma reesia (EP 244,234); Neurospora crassa (Case et al., Proc. Natl. Acad. Sci. USA, 76:5259-5263 [1979]); Schwanniomyces such as Schwanniomyces occidentalis (EP 394,538 published 31 Oct. 1990); and filamentous fungi such as, e.g., Neurospora, Penicillium, Tolypocladium (WO 91/00357 published 10 Jan. 1991), and Aspergillus hosts such as A. nidulans (Ballance et al., Biochem. Biophys. Res. Commun., 112:284-289 [1983]; Tilburn et al., Gene, 26:205-221 [1983]; Yelton et al., Proc. Natl. Acad. Sci. USA, 81: 1470-1474 [1984]) and A. niger (Kelly and Hynes, EMBO J., 4:475-479 [1985]). Methylotropic yeasts are suitable herein and include, but are not limited to, yeast capable of growth on methanol selected from the genera consisting of Hansenula, Candida, Kloeckera, Pichia, Saccharomyces, Torulopsis, and Rhodotorula. A list of specific species that are exemplary of this class of yeasts may be found in C. Anthony, The Biochemistry of Methylotrophs, 269 (1982).

[0158] Suitable host cells for the expression of glycosylated PRO are derived from multicellular organisms. Examples of invertebrate cells include insect cells such as Drosophila S2 and Spodoptera Sf9, as well as plant cells. Examples of useful mammalian host cell lines include Chinese hamster ovary (CHO) and COS cells. More specific examples include monkey kidney CV1 line transformed by SV40 (COS-7, ATCC CRL 1651); human embryonic kidney line (293 or 293 cells subcloned for growth in suspension culture, Graham et al., J. Gen Virol., 36:59 (1977)); Chinese hamster ovary cells/-DHFR (CHO, Urlaub and Chasin, Proc. Natl. Acad. Sci. USA, 77:4216 (1980)); mouse sertoli cells (TM4, Mather, Biol. Reprod., 23:243-251 (1980)); human lung cells (W138, ATCC CCL 75); human liver cells (Hep G2, HB 8065); and mouse mammary tumor (MMT 060562, ATCC CCL51). The selection of the appropriate host cell is deemed to be within the skill in the art.

### 3. Selection and Use of a Replicable Vector

[0159] The nucleic acid (e.g., cDNA or genomic DNA) encoding PRO may be inserted into a replicable vector for cloning (amplification of the DNA) or for expression. Various vectors are publicly available. The vector may, for example, be in the form of a plasmid, cosmid, viral particle, or phage. The appropriate nucleic acid sequence may be inserted into the vector by a variety of procedures. In general, DNA is inserted into an appropriate restriction endonuclease site(s) using techniques known in the art. Vector components generally include, but are not limited to, one or more of a signal sequence, an origin of replication, one or more marker genes, an enhancer element, a promoter, and a transcription termination sequence. Construction of suitable vectors containing one or more of these components employs standard ligation techniques which are known to the skilled artisan.

[0160] The PRO may be produced recombinantly not only directly, but also as a fusion polypeptide with a heterologous polypeptide, which may be a signal sequence or other polypeptide having a specific cleavage site at the N-terminus of the mature protein or polypeptide. In general, the signal sequence may be a component of the vector, or it may be a part of the PRO-encoding DNA that is inserted into the vector. The signal sequence may be a prokaryotic signal sequence selected, for example, from the group of the alkaline phosphatase, penicillinase, 1 pp, or heat-stable enterotoxin II leaders. For yeast secretion the signal sequence may be, e.g., the yeast invertase leader, alpha factor leader (including Saccharomyces and Kluyveromyces α-factor leaders, the latter described in U.S. Pat. No. 5,010,182), or acid phosphatase leader, the C. albicans glucoamylase leader (EP 362,179 published 4 Apr. 1990), or the signal described in WO 90/13646 published 15 Nov. 1990. In mammalian cell expression, mammalian signal sequences may be used to direct secretion of the protein, such as signal sequences from secreted polypeptides of the same or related species, as well as viral secretory leaders.

[0161] Both expression and cloning vectors contain a nucleic acid sequence that enables the vector to replicate in one or more selected host cells. Such sequences are well known for a variety of bacteria, yeast, and viruses. The origin of replication from the plasmid pBR322 is suitable for most Gram-negative bacteria, the 2μ, plasmid origin is suitable for yeast, and various viral origins (SV40, polyoma, adenovirus, VSV or BPV) are useful for cloning vectors in mammalian cells.

[0162] Expression and cloning vectors will typically contain a selection gene, also termed a selectable marker. Typical selection genes encode proteins that (a) confer resistance to antibiotics or other toxins, e.g., ampicillin, neomycin, methotrexate, or tetracycline, (b) complement auxotrophic deficiencies, or (c) supply critical nutrients not available from complex media, e.g., the gene encoding D-alanine racemase for Bacilli.

[0163] An example of suitable selectable markers for mammalian cells are those that enable the identification of cells competent to take up the PRO-encoding nucleic acid, such as DHFR or thymidine kinase. An appropriate host cell when wild-type DHFR is employed is the CHO cell line deficient in DHFR activity, prepared and propagated as described by Urlaub et al., Proc. Natl. Acad. Sci. USA, 77:4216 (1980). A suitable selection gene for use in yeast is the trp1 gene present in the yeast plasmid YRp7 [Stinchcomb et al., Nature, 282:39 (1979); Kingsman et al., Gene, 7:141 (1979); Tschemper et al., Gene, 10:157 (1980)]. The trp1 gene provides a selection marker for a mutant strain of yeast lacking the ability to grow in tryptophan, for example, ATCC No. 44076 or PEP4-1 [Jones, Genetics, 85:12 (1977)].

[0164] Expression and cloning vectors usually contain a promoter operably linked to the PRO-encoding nucleic acid sequence to direct mRNA synthesis. Promoters recognized by a variety of potential host cells are well known. Promoters suitable for use with prokaryotic hosts include the β-lactamase and lactose promoter systems [Chang et al., Nature, 275:615 (1978); Goeddel et al., Nature, 281:544 (1979)], alkaline phosphatase, a tryptophan (trp) promoter system [Goeddel, Nucleic Acids Res., 8:4057 (1980); EP 36,776], and hybrid promoters such as the tac promoter [deBoer et al., Proc. Natl. Acad. Sci. USA, 80:21-25 (1983)]. Promoters for use in bacterial systems also will contain a Shine-Dalgarno (S.D.) sequence operably linked to the DNA encoding PRO.

[0165] Examples of suitable promoting sequences for use with yeast hosts include the promoters for 3-phosphoglycerate kinase [Hitzeman et al., J. Biol. Chem., 255:2073 (1980)] or other glycolytic enzymes [Hess et al., J. Adv. Enzyme Reg., 7:149 (1968); Holland, Biochemistry, 17:4900 (1978)], such as enolase, glyceraldehyde-3-phosphate dehydrogenase, hexokinase, pyruvate decarboxylase, phosphofructokinase, glucose-6-phosphate isomerase, 3-phosphoglycerate mutase, pyruvate kinase, triosephosphate isomerase, phosphoglucose isomerase, and glucokinase.

[0166] Other yeast promoters, which are inducible promoters having the additional advantage of transcription controlled by growth conditions, are the promoter regions for alcohol dehydrogenase 2, isocytochrome C, acid phosphatase, degradative enzymes associated with nitrogen metabolism, metallothionein, glyceraldehyde-3-phosphate dehydrogenase, and enzymes responsible for maltose and galactose utilization. Suitable vectors and promoters for use in yeast expression are further described in EP 73,657.

[0167] PRO transcription from vectors in mammalian host cells is controlled, for example, by promoters obtained from the genomes of viruses such as polyoma virus, fowlpox virus (UK 2,211,504 published 5 Jul. 1989), adenovirus (such as Adenovirus 2), bovine papilloma virus, avian sarcoma virus, cytomegalovirus, a retrovirus, hepatitis-B virus and Simian Virus 40 (SV40), from heterologous mammalian promoters, e.g., the actin promoter or an immunoglobulin promoter, and from heat-shock promoters, provided such promoters are compatible with the host cell systems.

[0168] Transcription of a DNA encoding the PRO by higher eukaryotes may be increased by inserting an enhancer sequence into the vector. Enhancers are cis-acting elements of DNA, usually about from 10 to 300 bp, that act on a promoter to increase its transcription. Many enhancer sequences are now known from mammalian genes (globin, elastase, albumin, α-fetoprotein, and insulin). Typically, however, one will use an enhancer from a eukaryotic cell virus. Examples include the SV40 enhancer on the late side of the replication origin (bp 100-270), the cytomegalovirus early promoter enhancer, the polyoma enhancer on the late side of the replication origin, and adenovirus enhancers. The enhancer may be spliced into the vector at a position 5′ or 3′ to the PRO coding sequence, but is preferably located at a site 5′ from the promoter.

[0169] Expression vectors used in eukaryotic host cells (yeast, fungi, insect, plant, animal, human, or nucleated cells from other multicellular organisms) will also contain sequences necessary for the termination of transcription and for stabilizing the mRNA. Such sequences are commonly available from the 5′ and, occasionally 3′, untranslated regions of eukaryotic or viral DNAs or cDNAs. These regions contain nucleotide segments transcribed as polyadenylated fragments in the untranslated portion of the mRNA encoding PRO.

[0170] Still other methods, vectors, and host cells suitable for adaptation to the synthesis of PRO in recombinant vertebrate cell culture are described in Gething et al., Nature, 293:620-625 (1981); Mantei et al., Nature, 281:40-46 (1979); EP 117,060; and EP 117,058.

### 4. Detecting Gene Amplification/Expression

[0171] Gene amplification and/or expression may be measured in a sample directly, for example, by conventional Southern blotting, Northern blotting to quantitate the transcription of mRNA [Thomas, Proc. Natl. Acad. Sci. USA, 77:5201-5205 (1980)], dot blotting (DNA analysis), or in situ hybridization, using an appropriately labeled probe, based on the sequences provided herein. Alternatively, antibodies may be employed that can recognize specific duplexes, including DNA duplexes, RNA duplexes, and DNA-RNA hybrid duplexes or DNA-protein duplexes. The antibodies in turn may be labeled and the assay may be carried out where the duplex is bound to a surface, so that upon the formation of duplex on the surface, the presence of antibody bound to the duplex can be detected.

[0172] Gene expression, alternatively, may be measured by immunological methods, such as immunohistochemical staining of cells or tissue sections and assay of cell culture or body fluids, to quantitate directly the expression of gene product. Antibodies useful for immunohistochemical staining and/or assay of sample fluids may be either monoclonal or polyclonal, and may be prepared in any mammal. Conveniently, the antibodies may be prepared against a native sequence PRO polypeptide or against a synthetic peptide based on the DNA sequences provided herein or against exogenous sequence fused to PRO DNA and encoding a specific antibody epitope.

### 5. Purification of Polypeptide

[0173] Forms of PRO may be recovered from culture medium or from host cell lysates. If membrane-bound, it can be released from the membrane using a suitable detergent solution (e.g. Triton-X 100) or by enzymatic cleavage. Cells employed in expression of PRO can be disrupted by various physical or chemical means, such as freeze-thaw cycling, sonication, mechanical disruption, or cell lysing agents.

[0174] It may be desired to purify PRO from recombinant cell proteins or polypeptides. The following procedures are exemplary of suitable purification procedures: by fractionation on an ion-exchange column; ethanol precipitation; reverse phase HPLC; chromatography on silica or on a cation-exchange resin such as DEAE; chromatofocusing; SDS-PAGE; ammonium sulfate precipitation; gel filtration using, for example, Sephadex G-75; protein A Sepharose columns to remove contaminants such as IgG; and metal chelating columns to bind epitope-tagged forms of the PRO. Various methods of protein purification may be employed and such methods are known in the art and described for example in Deutscher, Methods in Enzymology, 182 (1990); Scopes, Protein Purification: Principles and Practice, Springer-Verlag, New York (1982). The purification step(s) selected will depend, for example, on the nature of the production process used and the particular PRO produced.

[0175] E. Tissue Distribution

[0176] The location of tissues expressing the PRO can be identified by determining mRNA expression in various human tissues. The location of such genes provides information about which tissues are most likely to be affected by the stimulating and inhibiting activities of the PRO polypeptides. The location of a gene in a specific tissue also provides sample tissue for the activity blocking assays discussed below.

[0177] As noted before, gene expression in various tissues may be measured by conventional Southern blotting, Northern blotting to quantitate the transcription of mRNA (Thomas, Proc. Natl. Acad. Sci. USA, 77:5201-5205 [1980]), dot blotting (DNA analysis), or in situ hybridization, using an appropriately labeled probe, based on the sequences provided herein. Alternatively, antibodies may be employed that can recognize specific duplexes, including DNA duplexes, RNA duplexes, and DNA-RNA hybrid duplexes or DNA-protein duplexes.

[0178] Gene expression in various tissues, alternatively, may be measured by immunological methods, such as immunohistochemical staining of tissue sections and assay of cell culture or body fluids, to quantitate directly the expression of gene product. Antibodies useful for immunohistochemical staining and/or assay of sample fluids may be either monoclonal or polyclonal, and may be prepared in any mammal. Conveniently, the antibodies may be prepared against a native sequence of a PRO polypeptide or against a synthetic peptide based on the DNA sequences encoding the PRO polypeptide or against an exogenous sequence fused to a DNA encoding a PRO polypeptide and encoding a specific antibody epitope. General techniques for generating antibodies, and special protocols for Northern blotting and in situ hybridization are provided below.

[0179] F. Antibody Binding Studies

[0180] The activity of the PRO polypeptides can be further verified by antibody binding studies, in which the ability of anti-PRO antibodies to inhibit the effect of the PRO polypeptides, respectively, on tissue cells is tested. Exemplary antibodies include polyclonal, monoclonal, humanized, bispecific, and heteroconjugate antibodies, the preparation of which will be described hereinbelow.

[0181] Antibody binding studies may be carried out in any known assay method, such as competitive binding assays, direct and indirect sandwich assays, and immunoprecipitation assays. Zola, Monoclonal Antibodies: A Manual of Techniques, pp. 147-158 (CRC Press, Inc., 1987).

[0182] Competitive binding assays rely on the ability of a labeled standard to compete with the test sample analyte for binding with a limited amount of antibody. The amount of target protein in the test sample is inversely proportional to the amount of standard that becomes bound to the antibodies. To facilitate determining the amount of standard that becomes bound, the antibodies preferably are insolubilized before or after the competition, so that the standard and analyte that are bound to the antibodies may conveniently be separated from the standard and analyte which remain unbound.

[0183] Sandwich assays involve the use of two antibodies, each capable of binding to a different immunogenic portion, or epitope, of the protein to be detected. In a sandwich assay, the test sample analyte is bound by a first antibody which is immobilized on a solid support, and thereafter a second antibody binds to the analyte, thus forming an insoluble three-part complex. See, e.g., U.S. Pat. No. 4,376,110. The second antibody may itself be labeled with a detectable moiety (direct sandwich assays) or may be measured using an anti-immunoglobulin antibody that is labeled with a detectable moiety (indirect sandwich assay). For example, one type of sandwich assay is an ELISA assay, in which case the detectable moiety is an enzyme.

[0184] For immunohistochemistry, the tissue sample may be fresh or frozen or may be embedded in paraffin and fixed with a preservative such as formalin, for example.

[0185] G. Cell-Based Assays

[0186] Cell-based assays and animal models for immune related diseases can be used to further understand the relationship between the genes and polypeptides identified herein and the development and pathogenesis of immune related disease.

[0187] In a different approach, cells of a cell type known to be involved in a particular immune related disease are transfected with the cDNAs described herein, and the ability of these cDNAs to stimulate or inhibit immune function is analyzed. Suitable cells can be transfected with the desired gene, and monitored for immune function activity. Such transfected cell lines can then be used to test the ability of poly- or monoclonal antibodies or antibody compositions to inhibit or stimulate immune function, for example to modulate T-cell proliferation or inflammatory cell infiltration. Cells transfected with the coding sequences of the genes identified herein can further be used to identify drug candidates for the treatment of immune related diseases.

[0188] In addition, primary cultures derived from transgenic animals (as described below) can be used in the cell-based assays herein, although stable cell lines are preferred. Techniques to derive continuous cell lines from transgenic animals are well known in the art (see, e.g., Small et al., Mol. Cell. Biol. 5: 642-648 [1985]).

[0189] One suitable cell based assay is the mixed lymphocyte reaction (MLR). Current Protocols in Immunology, unit 3.12; edited by J E Coligan, A M Kruisbeek, D H Marglies, E M Shevach, W Strober, National Institutes of Health, Published by John Wiley & Sons, Inc. In this assay, the ability of a test compound to stimulate or inhibit the proliferation of activated T cells is assayed. A suspension of responder T cells is cultured with allogeneic stimulator cells and the proliferation of T cells is measured by uptake of tritiated thymidine. This assay is a general measure of T cell reactivity. Since the majority of T cells respond to and produce IL-2 upon activation, differences in responsiveness in this assay in part reflect differences in IL-2 production by the responding cells. The MLR results can be verified by a standard lymphokine (IL-2) detection assay. Current Protocols in Immunology, above, 3.15, 6.3.

[0190] A proliferative T cell response in an MLR assay may be due to direct mitogenic properties of an assayed molecule or to external antigen induced activation. Additional verification of the T cell stimulatory activity of the PRO polypeptides can be obtained by a costimulation assay. T cell activation requires an antigen specific signal mediated through the T-cell receptor (TCR) and a costimulatory signal mediated through a second ligand binding interaction, for example, the B7 (CD80, CD86)/CD28 binding interaction. CD28 crosslinking increases lymphokine secretion by activated T cells. T cell activation has both negative and positive controls through the binding of ligands which have a negative or positive effect. CD28 and CTLA-4 are related glycoproteins in the Ig superfamily which bind to B7. CD28 binding to B7 has a positive costimulation effect of T cell activation; conversely, CTLA-4 binding to B7 has a T cell deactivating effect. Chambers, C. A. and Allison, J. P., Curr. Opin. Immunol. (1997) 9:396. Schwartz, R. H., Cell (1992) 71:1065; Linsey, P. S, and Ledbetter, J. A., Annu. Rev. Immunol. (1993) 11:191; June, C. H. et al, Immunol. Today (1994) 15:321; Jenkins, M. K., Immunity (1994) 1:405. In a costimulation assay, the PRO polypeptides are assayed for T cell costimulatory or inhibitory activity.

[0191] Direct use of a stimulating compound as in the invention has been validated in experiments with 4-1BB glycoprotein, a member of the tumor necrosis factor receptor family, which binds to a ligand (4-1BBL) expressed on primed T cells and signals T cell in activation and growth. Alderson, M. E. et al., J. Immunol. (1994) 24:2219.

[0192] The use of an agonist stimulating compound has also been validated experimentally. Activation of 4-1BB by treatment with an agonist anti-4-1BB antibody enhances eradication of tumors. Hellstrom, I. and Hellstrom, K. E., Crit. Rev. Immunol. (1998) 18:1. Immunoadjuvant therapy for treatment of tumors, described in more detail below, is another example of the use of the stimulating compounds of the invention.

[0193] Alternatively, an immune stimulating or enhancing effect can also be achieved by administration of a PRO which has vascular permeability enhancing properties. Enhanced vascular permeability would be beneficial to disorders which can be attenuated by local infiltration of immune cells (e.g., monocytes, eosinophils, PMNs) and inflammation.

[0194] On the other hand, PRO polypeptides, as well as other compounds of the invention, which are direct inhibitors of T cell proliferation/activation, lymphokine secretion, and/or vascular permeability can be directly used to suppress the immune response. These compounds are useful to reduce the degree of the immune response and to treat immune related diseases characterized by a hyperactive, superoptimal, or autoimmune response. This use of the compounds of the invention has been validated by the experiments described above in which CTLA-4 binding to receptor B7 deactivates T cells. The direct inhibitory compounds of the invention function in an analogous manner. The use of compound which suppress vascular permeability would be expected to reduce inflammation. Such uses would be beneficial in treating conditions associated with excessive inflammation.

[0195] Alternatively, compounds, e.g., antibodies, which bind to stimulating PRO polypeptides and block the stimulating effect of these molecules produce a net inhibitory effect and can be used to suppress the T cell mediated immune response by inhibiting T cell proliferation/activation and/or lymphokine secretion. Blocking the stimulating effect of the polypeptides suppresses the immune response of the mammal. This use has been validated in experiments using an anti-IL2 antibody. In these experiments, the antibody binds to IL2 and blocks binding of IL2 to its receptor thereby achieving a T cell inhibitory effect.

[0196] H. Animal Models

[0197] The results of the cell based in vitro assays can be further verified using in vivo animal models and assays for T-cell function. A variety of well known animal models can be used to further understand the role of the genes identified herein in the development and pathogenesis of immune related disease, and to test the efficacy of candidate therapeutic agents, including antibodies, and other antagonists of the native polypeptides, including small molecule antagonists. The in vivo nature of such models makes them predictive of responses in human patients. Animal models of immune related diseases include both non-recombinant and recombinant (transgenic) animals. Non-recombinant animal models include, for example, rodent, e.g., murine models. Such models can be generated by introducing cells into syngeneic mice using standard techniques, e.g., subcutaneous injection, tail vein injection, spleen implantation, intraperitoneal implantation, implantation under the renal capsule, etc.

[0198] Graft-versus-host disease occurs when immunocompetent cells are transplanted into immunosuppressed or tolerant patients. The donor cells recognize and respond to host antigens. The response can vary from life threatening severe inflammation to mild cases of diarrhea and weight loss. Graft-versus-host disease models provide a means of assessing T cell reactivity against MHC antigens and minor transplant antigens. A suitable procedure is described in detail in Current Protocols in Immunology, above, unit 4.3.

[0199] An animal model for skin allograft rejection is a means of testing the ability of T cells to mediate in vivo tissue destruction and a measure of their role in transplant rejection. The most common and accepted models use murine tail-skin grafts. Repeated experiments have shown that skin allograft rejection is mediated by T cells, helper T cells and killer-effector T cells, and not antibodies. Auchincloss, H. Jr. and Sachs, D. H., Fundamental Immunology, 2nd ed., W. E. Paul ed., Raven Press, NY, 1989, 889-992. A suitable procedure is described in detail in Current Protocols in Immunology, above, unit 4.4. Other transplant rejection models which can be used to test the compounds of the invention are the allogeneic heart transplant models described by Tanabe, M. et al, Transplantation (1994) 58:23 and Tinubu, S. A. et al, J. Immunol. (1994) 4330-4338.

[0200] Animal models for delayed type hypersensitivity provides an assay of cell mediated immune function as well. Delayed type hypersensitivity reactions are a T cell mediated in vivo immune response characterized by inflammation which does not reach a peak until after a period of time has elapsed after challenge with an antigen. These reactions also occur in tissue specific autoimmune diseases such as multiple sclerosis (MS) and experimental autoimmune encephalomyelitis (EAE, a model for MS). A suitable procedure is described in detail in Current Protocols in Immunology, above, unit 4.5.

[0201] EAE is a T cell mediated autoimmune disease characterized by T cell and mononuclear cell inflammation and subsequent demyelination of axons in the central nervous system. EAE is generally considered to be a relevant animal model for MS in humans. Bolton, C., Multiple Sclerosis (1995) 1:143. Both acute and relapsing-remitting models have been developed. The compounds of the invention can be tested for T cell stimulatory or inhibitory activity against immune mediated demyelinating disease using the protocol described in Current Protocols in Immunology, above, units 15.1 and 15.2. See also the models for myelin disease in which oligodendrocytes or Schwann cells are grafted into the central nervous system as described in Duncan, I. D. et al, Molec. Med. Today (1997) 554-561.

[0202] Contact hypersensitivity is a simple delayed type hypersensitivity in vivo assay of cell mediated immune function. In this procedure, cutaneous exposure to exogenous haptens which gives rise to a delayed type hypersensitivity reaction which is measured and quantitated. Contact sensitivity involves an initial sensitizing phase followed by an elicitation phase. The elicitation phase occurs when the T lymphocytes encounter an antigen to which they have had previous contact. Swelling and inflammation occur, making this an excellent model of human allergic contact dermatitis. A suitable procedure is described in detail in Current Protocols in Immunology, Eds. J. E. Cologan, A. M. Kruisbeek, D. H. Margulies, E. M. Shevach and W. Strober, John Wiley & Sons, Inc., 1994, unit 4.2. See also Grabbe, S, and Schwarz, T, Immun. Today 19 (1): 37-44 (1998).

[0203] An animal model for arthritis is collagen-induced arthritis. This model shares clinical, histological and immunological characteristics of human autoimmune rheumatoid arthritis and is an acceptable model for human autoimmune arthritis. Mouse and rat models are characterized by synovitis, erosion of cartilage and subchondral bone. The compounds of the invention can be tested for activity against autoimmune arthritis using the protocols described in Current Protocols in Immunology, above, units 15.5. See also the model using a monoclonal antibody to CD18 and VLA-4 integrins described in Issekutz, A. C. et al., Immunology (1996) 88:569.

[0204] A model of asthma has been described in which antigen-induced airway hyper-reactivity, pulmonary eosinophilia and inflammation are induced by sensitizing an animal with ovalbumin and then challenging the animal with the same protein delivered by aerosol. Several animal models (guinea pig, rat, non-human primate) show symptoms in similar to atopic asthma in humans upon challenge with aerosol antigens. Murine models have many of the features of human asthma. Suitable procedures to test the compounds of the invention for activity and effectiveness in the treatment of asthma are described by Wolyniec, W. W. et al, Am. J. Respir. Cell Mol. Biol. (1998) 18:777 and the references cited therein.

[0205] Additionally, the compounds of the invention can be tested on animal models for psoriasis like diseases. Evidence suggests a T cell pathogenesis for psoriasis. The compounds of the invention can be tested in the scid/scid mouse model described by Schon, M. P. et al, Nat. Med. (1997) 3:183, in which the mice demonstrate histopathologic skin lesions resembling psoriasis. Another suitable model is the human skin/scid mouse chimera prepared as described by Nickoloff, B. J. et al, Am. J. Path. (1995) 146:580.

[0206] Recombinant (transgenic) animal models can be engineered by introducing the coding portion of the genes identified herein into the genome of animals of interest, using standard techniques for producing transgenic animals. Animals that can serve as a target for transgenic manipulation include, without limitation, mice, rats, rabbits, guinea pigs, sheep, goats, pigs, and non-human primates, e.g., baboons, chimpanzees and monkeys. Techniques known in the art to introduce a transgene into such animals include pronucleic microinjection (Hoppe and Wanger, U.S. Pat. No. 4,873,191); retrovirus-mediated gene transfer into germ lines (e.g., Van der Putten et al., Proc. Natl. Acad. Sci. USA 82, 6148-615 [1985]); gene targeting in embryonic stem cells (Thompson et al., Cell 56, 313-321 [1989]); electroporation of embryos (Lo, Mol. Cel. Biol. 3, 1803-1814 [1983]); sperm-mediated gene transfer (Lavitrano et al., Cell 57, 717-73 [1989]). For review, see, for example, U.S. Pat. No. 4,736,866.

[0207] For the purpose of the present invention, transgenic animals include those that carry the transgene only in part of their cells (“mosaic animals”). The transgene can be integrated either as a single transgene, or in concatamers, e.g., head-to-head or head-to-tail tandems. Selective introduction of a transgene into a particular cell type is also possible by following, for example, the technique of Lasko et al., Proc. Natl. Acad. Sci. USA 89, 6232-636 (1992).

[0208] The expression of the transgene in transgenic animals can be monitored by standard techniques. For example, Southern blot analysis or PCR amplification can be used to verify the integration of the transgene. The level of mRNA expression can then be analyzed using techniques such as in situ hybridization, Northern blot analysis, PCR, or immunocytochemistry.

[0209] The animals may be further examined for signs of immune disease pathology, for example by histological examination to determine infiltration of immune cells into specific tissues. Blocking experiments can also be performed in which the transgenic animals are treated with the compounds of the invention to determine the extent of the T cell proliferation stimulation or inhibition of the compounds. In these experiments, blocking antibodies which bind to the PRO polypeptide, prepared as described above, are administered to the animal and the effect on immune function is determined.

[0210] Alternatively, “knock out” animals can be constructed which have a defective or altered gene encoding a polypeptide identified herein, as a result of homologous recombination between the endogenous gene encoding the polypeptide and altered genomic DNA encoding the same polypeptide introduced into an embryonic cell of the animal. For example, cDNA encoding a particular polypeptide can be used to clone genomic DNA encoding that polypeptide in accordance with established techniques. A portion of the genomic DNA encoding a particular polypeptide can be deleted or replaced with another gene, such as a gene encoding a selectable marker which can be used to monitor integration. Typically, several kilobases of unaltered flanking DNA (both at the 5′ and 3′ ends) are included in the vector [see e.g., Thomas and Capecchi, Cell, 51:503 (1987) for a description of homologous recombination vectors]. The vector is introduced into an embryonic stem cell line (e.g., by electroporation) and cells in which the introduced DNA has homologously recombined with the endogenous DNA are selected [see e.g., Li et al., Cell, 69:915 (1992)]. The selected cells are then injected into a blastocyst of an animal (e.g., a mouse or rat) to form aggregation chimeras [see e.g., Bradley, in Teratocarcinomas and Embryonic Stem Cells: A Practical Approach, E. J. Robertson, ed. (IRL, Oxford, 1987), pp. 113-152]. A chimeric embryo can then be implanted into a suitable pseudopregnant female foster animal and the embryo brought to term to create a “knock out” animal. Progeny harboring the homologously recombined DNA in their germ cells can be identified by standard techniques and used to breed animals in which all cells of the animal contain the homologously recombined DNA. Knockout animals can be characterized for instance, for their ability to defend against certain pathological conditions and for their development of pathological conditions due to absence of the polypeptide.

[0211] I. ImmunoAdjuvant Therapy

[0212] In one embodiment, the immunostimulating compounds of the invention can be used in immunoadjuvant therapy for the treatment of tumors (cancer). It is now well established that T cells recognize human tumor specific antigens. One group of tumor antigens, encoded by the MAGE, BAGE and GAGE families of genes, are silent in all adult normal tissues, but are expressed in significant amounts in tumors, such as melanomas, lung tumors, head and neck tumors, and bladder carcinomas DeSmet et al., (1996) Proc. Natl. Acad. Sci. USA, 93:7149. It has been shown that costimulation of T cells induces tumor regression and an antitumor response both in vitro and in vivo. Melero, I. et al., Nature Medicine (1997) 3:682; Kwon, E. D. et al., Proc. Natl. Acad. Sci. USA (1997) 94: 8099; Lynch, D. H. et al, Nature Medicine (1997) 3:625; Finn, O. J. and Lotze, M. T., J. Immunol. (1998) 21:114. The stimulatory compounds of the invention can be administered as adjuvants, alone or together with a growth regulating agent, cytotoxic agent or chemotherapeutic agent, to stimulate T cell proliferation/activation and an antitumor response to tumor antigens. The growth regulating, cytotoxic, or chemotherapeutic agent may be administered in conventional amounts using known administration regimes. Immunostimulating activity by the compounds of the invention allows reduced amounts of the growth regulating, cytotoxic, or chemotherapeutic agents thereby potentially lowering the toxicity to the patient.

[0213] J. Screening Assays for Drug Candidates

[0214] Screening assays for drug candidates are designed to identify compounds that bind to or complex with the polypeptides encoded by the genes identified herein or a biologically active fragment thereof, or otherwise interfere with the interaction of the encoded polypeptides with other cellular proteins. Such screening assays will include assays amenable to high-throughput screening of chemical libraries, making them particularly suitable for identifying small molecule drug candidates. Small molecules contemplated include synthetic organic or inorganic compounds, including peptides, preferably soluble peptides, (poly)peptide-immunoglobulin fusions, and, in particular, antibodies including, without limitation, poly- and monoclonal antibodies and antibody fragments, single-chain antibodies, anti-idiotypic antibodies, and chimeric or humanized versions of such antibodies or fragments, as well as human antibodies and antibody fragments. The assays can be performed in a variety of formats, including protein-protein binding assays, biochemical screening assays, immunoassays and cell based assays, which are well characterized in the art. All assays are common in that they call for contacting the drug candidate with a polypeptide encoded by a nucleic acid identified herein under conditions and for a time sufficient to allow these two components to interact.

[0215] In binding assays, the interaction is binding and the complex formed can be isolated or detected in the reaction mixture. In a particular embodiment, the polypeptide encoded by the gene identified herein or the drug candidate is immobilized on a solid phase, e.g., on a microtiter plate, by covalent or non-covalent attachments. Non-covalent attachment generally is accomplished by coating the solid surface with a solution of the polypeptide and drying. Alternatively, an immobilized antibody, e.g., a monoclonal antibody, specific for the polypeptide to be immobilized can be used to anchor it to a solid surface. The assay is performed by adding the non-immobilized component, which may be labeled by a detectable label, to the immobilized component, e.g., the coated surface containing the anchored component. When the reaction is complete, the non-reacted components are removed, e.g., by washing, and complexes anchored on the solid surface are detected. When the originally non-immobilized component carries a detectable label, the detection of label immobilized on the surface indicates that complexing occurred. Where the originally non-immobilized component does not carry a label, complexing can be detected, for example, by using a labelled antibody specifically binding the immobilized complex.

[0216] If the candidate compound interacts with but does not bind to a particular protein encoded by a gene identified herein, its interaction with that protein can be assayed by methods well known for detecting protein-protein interactions. Such assays include traditional approaches, such as, cross-linking, co-immunoprecipitation, and co-purification through gradients or chromatographic columns. In addition, protein-protein interactions can be monitored by using a yeast-based genetic system described by Fields and co-workers [Fields and Song, Nature (London) 340, 245-246 (1989); Chien et al., Proc. Natl. Acad. Sci. USA 88, 9578-9582 (1991)] as disclosed by Chevray and Nathans, Proc. Natl. Acad. Sci. USA 89, 5789-5793 (1991). Many transcriptional activators, such as yeast GAL4, consist of two physically discrete modular domains, one acting as the DNA-binding domain, while the other one functioning as the transcription activation domain. The yeast expression system described in the foregoing publications (generally referred to as the “two-hybrid system”) takes advantage of this property, and employs two hybrid proteins, one in which the target protein is fused to the DNA-binding domain of GAL4, and another, in which candidate activating proteins are fused to the activation domain. The expression of a GAL1-lacZ reporter gene under control of a GAL4-activated promoter depends on reconstitution of GAL4 activity via protein-protein interaction. Colonies containing interacting polypeptides are detected with a chromogenic substrate for β-galactosidase. A complete kit (MATCHMAKER™) for identifying protein-protein interactions between two specific proteins using the two-hybrid technique is commercially available from Clontech. This system can also be extended to map protein domains involved in specific protein interactions as well as to pinpoint amino acid residues that are crucial for these interactions.

[0217] In order to find compounds that interfere with the interaction of a gene identified herein and other intra- or extracellular components can be tested, a reaction mixture is usually prepared containing the product of the gene and the intra- or extracellular component under conditions and for a time allowing for the interaction and binding of the two products. To test the ability of a test compound to inhibit binding, the reaction is run in the absence and in the presence of the test compound. In addition, a placebo may be added to a third reaction mixture, to serve as positive control. The binding (complex formation) between the test compound and the intra- or extracellular component present in the mixture is monitored as described above. The formation of a complex in the control reaction(s) but not in the reaction mixture containing the test compound indicates that the test compound interferes with the interaction of the test compound and its reaction partner.

[0218] K. Compositions and Methods for the Treatment of Immune Related Diseases

[0219] The compositions useful in the treatment of immune related diseases include, without limitation, proteins, antibodies, small organic molecules, peptides, phosphopeptides, antisense and ribozyme molecules, triple helix molecules, etc. that inhibit or stimulate immune function, for example, T cell proliferation/activation, lymphokine release, or immune cell infiltration.

[0220] For example, antisense RNA and RNA molecules act to directly block the translation of mRNA by hybridizing to targeted mRNA and preventing protein translation. When antisense DNA is used, oligodeoxyribonucleotides derived from the translation initiation site, e.g., between about −10 and +10 positions of the target gene nucleotide sequence, are preferred.

[0221] Ribozymes are enzymatic RNA molecules capable of catalyzing the specific cleavage of RNA. Ribozymes act by sequence-specific hybridization to the complementary target RNA, followed by endonucleolytic cleavage. Specific ribozyme cleavage sites within a potential RNA target can be identified by known techniques. For further details see, e.g., Rossi, Current Biology 4, 469-471 (1994), and PCT publication No. WO 97/33551 (published Sep. 18, 1997).

[0222] Nucleic acid molecules in triple helix formation used to inhibit transcription should be single-stranded and composed of deoxynucleotides. The base composition of these oligonucleotides is designed such that it promotes triple helix formation via Hoogsteen base pairing rules, which generally require sizeable stretches of purines or pyrimidines on one strand of a duplex. For further details see, e.g., PCT publication No. WO 97/33551, supra.

[0223] These molecules can be identified by any or any combination of the screening assays discussed above and/or by any other screening techniques well known for those skilled in the art.

[0224] L. Anti-PRO Antibodies

[0225] The present invention further provides anti-PRO antibodies. Exemplary antibodies include polyclonal, monoclonal, humanized, bispecific, and heteroconjugate antibodies.

[0226] 1. Polyclonal Antibodies

[0227] The anti-PRO antibodies may comprise polyclonal antibodies. Methods of preparing polyclonal antibodies are known to the skilled artisan. Polyclonal antibodies can be raised in a mammal, for example, by one or more injections of an immunizing agent and, if desired, an adjuvant. Typically, the immunizing agent and/or adjuvant will be injected in the mammal by multiple subcutaneous or intraperitoneal injections. The immunizing agent may include the PRO polypeptide or a fusion protein thereof. It may be useful to conjugate the immunizing agent to a protein known to be immunogenic in the mammal being immunized. Examples of such immunogenic proteins include but are not limited to keyhole limpet hemocyanin, serum albumin, bovine thyroglobulin, and soybean trypsin inhibitor. Examples of adjuvants which may be employed include Freund's complete adjuvant and MPL-TDM adjuvant (monophosphoryl Lipid A, synthetic trehalose dicorynomycolate). The immunization protocol may be selected by one skilled in the art without undue experimentation.

[0228] 2. Monoclonal Antibodies

[0229] The anti-PRO antibodies may, alternatively, be monoclonal antibodies. Monoclonal antibodies may be prepared using hybridoma methods, such as those described by Kohler and Milstein, Nature, 256:495 (1975). In a hybridoma method, a mouse, hamster, or other appropriate host animal, is typically immunized with an immunizing agent to elicit lymphocytes that produce or are capable of producing antibodies that will specifically bind to the immunizing agent. Alternatively, the lymphocytes may be immunized in vitro.

[0230] The immunizing agent will typically include the PRO polypeptide or a fusion protein thereof. Generally, either peripheral blood lymphocytes (“PBLs”) are used if cells of human origin are desired, or spleen cells or lymph node cells are used if non-human mammalian sources are desired. The lymphocytes are then fused with an immortalized cell line using a suitable fusing agent, such as polyethylene glycol, to form a hybridoma cell [Goding, Monoclonal Antibodies: Principles and Practice, Academic Press, (1986) pp. 59-103]. Immortalized cell lines are usually transformed mammalian cells, particularly myeloma cells of rodent, bovine and human origin. Usually, rat or mouse myeloma cell lines are employed. The hybridoma cells may be cultured in a suitable culture medium that preferably contains one or more substances that inhibit the growth or survival of the unfused, immortalized cells. For example, if the parental cells lack the enzyme hypoxanthine guanine phosphoribosyl transferase (HGPRT or HPRT), the culture medium for the hybridomas typically will include hypoxanthine, aminopterin, and thymidine (“HAT medium”), which substances prevent the growth of HGPRT-deficient cells.

[0231] Preferred immortalized cell lines are those that fuse efficiently, support stable high level expression of antibody by the selected antibody-producing cells, and are sensitive to a medium such as HAT medium. More preferred immortalized cell lines are murine myeloma lines, which can be obtained, for instance, from the Salk Institute Cell Distribution Center, San Diego, Calif. and the American Type Culture Collection, Manassas, Va. Human myeloma and mouse-human heteromyeloma cell lines also have been described for the production of human monoclonal antibodies [Kozbor, J. Immunol., 133:3001 (1984); Brodeur et al., Monoclonal Antibody Production Techniques and Applications, Marcel Dekker, Inc., New York, (1987) pp. 51-63].

[0232] The culture medium in which the hybridoma cells are cultured can then be assayed for the presence of monoclonal antibodies directed against PRO. Preferably, the binding specificity of monoclonal antibodies produced by the hybridoma cells is determined by immunoprecipitation or by an in vitro binding assay, such as radioimmunoassay (RIA) or enzyme-linked immunoabsorbent assay (ELISA). Such techniques and assays are known in the art. The binding affinity of the monoclonal antibody can, for example, be determined by the Scatchard analysis of Munson and Pollard, Anal. Biochem., 107:220 (1980).

[0233] After the desired hybridoma cells are identified, the clones may be subcloned by limiting dilution procedures and grown by standard methods [Goding, supra]. Suitable culture media for this purpose include, for example, Dulbecco's Modified Eagle's Medium and RPMI-1640 medium. Alternatively, the hybridoma cells may be grown in vivo as ascites in a mammal.

[0234] The monoclonal antibodies secreted by the subclones may be isolated or purified from the culture medium or ascites fluid by conventional immunoglobulin purification procedures such as, for example, protein A-Sepharose, hydroxylapatite chromatography, gel electrophoresis, dialysis, or affinity chromatography.

[0235] The monoclonal antibodies may also be made by recombinant DNA methods, such as those described in U.S. Pat. No. 4,816,567. DNA encoding the monoclonal antibodies of the invention can be readily isolated and sequenced using conventional procedures (e.g., by using oligonucleotide probes that are capable of binding specifically to genes encoding the heavy and light chains of murine antibodies). The hybridoma cells of the invention serve as a preferred source of such DNA. Once isolated, the DNA may be placed into expression vectors, which are then transfected into host cells such as simian COS cells, Chinese hamster ovary (CHO) cells, or myeloma cells that do not otherwise produce immunoglobulin protein, to obtain the synthesis of monoclonal antibodies in the recombinant host cells. The DNA also may be modified, for example, by substituting the coding sequence for human heavy and light chain constant domains in place of the homologous murine sequences [U.S. Pat. No. 4,816,567; Morrison et al., supra] or by covalently joining to the immunoglobulin coding sequence all or part of the coding sequence for a non-immunoglobulin polypeptide. Such a non-immunoglobulin polypeptide can be substituted for the constant domains of an antibody of the invention, or can be substituted for the variable domains of one antigen-combining site of an antibody of the invention to create a chimeric bivalent antibody.

[0236] The antibodies may be monovalent antibodies. Methods for preparing monovalent antibodies are well known in the art. For example, one method involves recombinant expression of immunoglobulin light chain and modified heavy chain. The heavy chain is truncated generally at any point in the Fc region so as to prevent heavy chain crosslinking. Alternatively, the relevant cysteine residues are substituted with another amino acid residue or are deleted so as to prevent crosslinking

[0237] In vitro methods are also suitable for preparing monovalent antibodies. Digestion of antibodies to produce fragments thereof, particularly, Fab fragments, can be accomplished using routine techniques known in the art.

[0238] 3. Human and Humanized Antibodies

[0239] The anti-PRO antibodies of the invention may further comprise humanized antibodies or human antibodies. Humanized forms of non-human (e.g., murine) antibodies are chimeric immunoglobulins, immunoglobulin chains or fragments thereof (such as Fv, Fab, Fab′, F(ab′)₂ or other antigen-binding subsequences of antibodies) which contain minimal sequence derived from non-human immunoglobulin. Humanized antibodies include human immunoglobulins (recipient antibody) in which residues from a complementary determining region (CDR) of the recipient are replaced by residues from a CDR of a non-human species (donor antibody) such as mouse, rat or rabbit having the desired specificity, affinity and capacity. In some instances, Fv framework residues of the human immunoglobulin are replaced by corresponding non-human residues. Humanized antibodies may also comprise residues which are found neither in the recipient antibody nor in the imported CDR or framework sequences. In general, the humanized antibody will comprise substantially all of at least one, and typically two, variable domains, in which all or substantially all of the CDR regions correspond to those of a non-human immunoglobulin and all or substantially all of the FR regions are those of a human immunoglobulin consensus sequence. The humanized antibody optimally also will comprise at least a portion of an immunoglobulin constant region (Fc), typically that of a human immunoglobulin [Jones et al., Nature, 321:522-525 (1986); Riechmann et al., Nature, 332:323-329 (1988); and Presta, Curr. Op. Struct. Biol., 2:593-596 (1992)].

[0240] Methods for humanizing non-human antibodies are well known in the art. Generally, a humanized antibody has one or more amino acid residues introduced into it from a source which is non-human. These non-human amino acid residues are often referred to as “import” residues, which are typically taken from an “import” variable domain. Humanization can be essentially performed following the method of Winter and co-workers [Jones et al., Nature, 321:522-525 (1986); Riechmann et al., Nature, 332:323-327 (1988); Verhoeyen et al., Science, 239:1534-1536 (1988)], by substituting rodent CDRs or CDR sequences for the corresponding sequences of a human antibody. Accordingly, such “humanized” antibodies are chimeric antibodies (U.S. Pat. No. 4,816,567), wherein substantially less than an intact human variable domain has been substituted by the corresponding sequence from a non-human species. In practice, humanized antibodies are typically human antibodies in which some CDR residues and possibly some FR residues are substituted by residues from analogous sites in rodent antibodies.

[0241] Human antibodies can also be produced using various techniques known in the art, including phage display libraries [Hoogenboom and Winter, J. Mol. Biol., 227:381 (1991); Marks et al., J. Mol. Biol., 222:581 (1991)]. The techniques of Cole et al. and Boerner et al. are also available for the preparation of human monoclonal antibodies (Cole et al., Monoclonal Antibodies and Cancer Therapy, Alan R. Liss, p. 77 (1985) and Boerner et al., J. Immunol., 147(1):86-95 (1991)]. Similarly, human antibodies can be made by introducing of human immunoglobulin loci into transgenic animals, e.g., mice in which the endogenous immunoglobulin genes have been partially or completely inactivated. Upon challenge, human antibody production is observed, which closely resembles that seen in humans in all respects, including gene rearrangement, assembly, and antibody repertoire. This approach is described, for example, in U.S. Pat. Nos. 5,545,807; 5,545,806; 5,569,825; 5,625,126; 5,633,425; 5,661,016, and in the following scientific publications: Marks et al., Bio/Technology 10, 779-783 (1992); Lonberg et al., Nature 368 856-859 (1994); Morrison, Nature 368, 812-13 (1994); Fishwild et al., Nature Biotechnology 14, 845-51 (1996); Neuberger, Nature Biotechnology 14, 826 (1996); Lonberg and Huszar, Intern. Rev. Immunol. 13 65-93 (1995).

[0242] The antibodies may also be affinity matured using known selection and/or mutagenesis methods as described above. Preferred affinity matured antibodies have an affinity which is five times, more preferably 10 times, even more preferably 20 or 30 times greater than the starting antibody (generally murine, humanized or human) from which the matured antibody is prepared.

[0243] 4. Bispecific Antibodies

[0244] Bispecific antibodies are monoclonal, preferably human or humanized, antibodies that have binding specificities for at least two different antigens. In the present case, one of the binding specificities is for the PRO, the other one is for any other antigen, and preferably for a cell-surface protein or receptor or receptor subunit.

[0245] Methods for making bispecific antibodies are known in the art. Traditionally, the recombinant production of bispecific antibodies is based on the co-expression of two in immunoglobulin heavy-chain/light-chain pairs, where the two heavy chains have different specificities [Milstein and Cuello, Nature, 305:537-539 (1983)]. Because of the random assortment of immunoglobulin heavy and light chains, these hybridomas (quadromas) produce a potential mixture of ten different antibody molecules, of which only one has the correct bispecific structure. The purification of the correct molecule is usually accomplished by affinity chromatography steps. Similar procedures are disclosed in WO 93/08829, published 13 May 1993, and in Traunecker et al., EMBO J., 10:3655-3659 (1991).

[0246] Antibody variable domains with the desired binding specificities (antibody-antigen combining sites) can be fused to immunoglobulin constant domain sequences. The fusion preferably is with an immunoglobulin heavy-chain constant domain, comprising at least part of the hinge, CH2, and CH3 regions. It is preferred to have the first heavy-chain constant region (CH1) containing the site necessary for light-chain binding present in at least one of the fusions. DNAs encoding the immunoglobulin heavy-chain fusions and, if desired, the immunoglobulin light chain, are inserted into separate expression vectors, and are co-transfected into a suitable host organism. For further details of generating bispecific antibodies see, for example, Suresh et al., Methods in Enzymology, 121:210 (1986).

[0247] According to another approach described in WO 96/27011, the interface between a pair of antibody molecules can be engineered to maximize the percentage of heterodimers which are recovered from recombinant cell culture. The preferred interface comprises at least a part of the CH3 region of an antibody constant domain. In this method, one or more small amino acid side chains from the interface of the first antibody molecule are replaced with larger side chains (e.g. tyrosine or tryptophan). Compensatory “cavities” of identical or similar size to the large side chain(s) are created on the interface of the second antibody molecule by replacing large amino acid side chains with smaller ones (e.g. alanine or threonine). This provides a mechanism for increasing the yield of the heterodimer over other unwanted end-products such as homodimers.

[0248] Bispecific antibodies can be prepared as full length antibodies or antibody fragments (e.g. F(ab′)₂ bispecific antibodies). Techniques for generating bispecific antibodies from antibody fragments have been described in the literature. For example, bispecific antibodies can be prepared can be prepared using chemical linkage. Brennan et al., Science 229:81 (1985) describe a procedure wherein intact antibodies are proteolytically cleaved to generate F(ab′)₂ fragments. These fragments are reduced in the presence of the dithiol complexing agent sodium arsenite to stabilize vicinal dithiols and prevent intermolecular disulfide formation. The Fab′ fragments generated are then converted to thionitrobenzoate (TNB) derivatives. One of the Fab′-TNB derivatives is then reconverted to the Fab′-thiol by reduction with mercaptoethylamine and is mixed with an equimolar amount of the other Fab′-TNB derivative to form the bispecific antibody. The bispecific antibodies produced can be used as agents for the selective immobilization of enzymes.

[0249] Fab′ fragments may be directly recovered from E. coli and chemically coupled to form bispecific antibodies. Shalaby et al., J. Exp. Med. 175:217-225 (1992) describe the production of a fully humanized bispecific antibody F(ab′)₂ molecule. Each Fab′ fragment was separately secreted from E. coli and subjected to directed chemical coupling in vitro to form the bispecific antibody. The bispecific antibody thus formed was able to bind to cells overexpressing the ErbB2 receptor and normal human T cells, as well as trigger the lytic activity of human cytotoxic lymphocytes against human breast tumor targets.

[0250] Various technique for making and isolating bispecific antibody fragments directly from recombinant cell culture have also been described. For example, bispecific antibodies have been produced using leucine zippers. Kostelny et al., J. Immunol. 148(5):1547-1553 (1992). The leucine zipper peptides from the Fos and Jun proteins were linked to the Fab′ portions of two different antibodies by gene fusion. The antibody homodimers were reduced at the hinge region to form monomers and then re-oxidized to form the antibody heterodimers. This method can also be utilized for the production of antibody homodimers. The “diabody” technology described by Hollinger et al., Proc. Natl. Acad. Sci. USA 90:6444-6448 (1993) has provided an alternative mechanism for making bispecific antibody fragments. The fragments comprise a heavy-chain variable domain (V_{H}) connected to a light-chain variable domain (V_{L}) by a linker which is too short to allow pairing between the two domains on the same chain. Accordingly, the V_{H} and V_{L} domains of one fragment are forced to pair with the complementary V_{L} and V_{H} domains of another fragment, thereby forming two antigen-binding sites. Another strategy for making bispecific antibody fragments by the use of single-chain Fv (sFv) dimers has also been reported. See, Gruber et al., J. Immunol. 152:5368 (1994).

Antibodies with more than two valencies are contemplated. For example, trispecific antibodies can be prepared. Tutt et al., J. Immunol. 147:60 (1991).

[0251] Exemplary bispecific antibodies may bind to two different epitopes on a given PRO polypeptide herein. Alternatively, an anti-PRO polypeptide arm may be combined with an arm which binds to a triggering molecule on a leukocyte such as a T-cell receptor molecule (e.g. CD2, CD3, CD28, or B7), or Fc receptors for IgG (FcγR), such as FcγRI (CD64), FcγRII (CD32) and FcγRIII (CD16) so as to focus cellular defense mechanisms to the cell expressing the particular PRO polypeptide. Bispecific antibodies may also be used to localize cytotoxic agents to cells which express a particular PRO polypeptide. These antibodies possess a PRO-binding arm and an arm which binds a cytotoxic agent or a radionuclide chelator, such as EOTUBE, DPTA, DOTA, or TETA. Another bispecific antibody of interest binds the PRO polypeptide and further binds tissue factor (TF).

[0252] 5. Heteroconjugate Antibodies

[0253] Heteroconjugate antibodies are also within the scope of the present invention. Heteroconjugate antibodies are composed of two covalently joined antibodies. Such antibodies have, for example, been proposed to target immune system cells to unwanted cells [U.S. Pat. No. 4,676,980], and for treatment of HIV infection [WO 91/00360; WO 92/200373; EP 03089]. It is contemplated that the antibodies may be prepared in vitro using known methods in synthetic protein chemistry, including those involving crosslinking agents. For example, immunotoxins may be constructed using a disulfide exchange reaction or by forming a thioether bond. Examples of suitable reagents for this purpose include iminothiolate and methyl-4-mercaptobutyrimidate and those disclosed, for example, in U.S. Pat. No. 4,676,980.

[0254] 6. Effector Function Engineering

[0255] It may be desirable to modify the antibody of the invention with respect to effector function, so as to enhance, e.g., the effectiveness of the antibody in treating cancer. For example, cysteine residue(s) may be introduced into the Fc region, thereby allowing interchain disulfide bond formation in this region. The homodimeric antibody thus generated may have improved internalization capability and/or increased complement-mediated cell killing and antibody-dependent cellular cytotoxicity (ADCC). See Caron et al., J. Exp Med., 176: 1191-1195 (1992) and Shopes, J. Immunol., 148: 2918-2922 (1992). Homodimeric antibodies with enhanced anti-tumor activity may also be prepared using heterobifunctional cross-linkers as described in Wolff et al. Cancer Research, 53: 2560-2565 (1993). Alternatively, an antibody can be engineered that has dual Fc regions and may thereby have enhanced complement lysis and ADCC capabilities. See Stevenson et al., Anti-Cancer Drug Design, 3: 219-230 (1989).

[0256] 7. Immunoconjugates

[0257] The invention also pertains to immunoconjugates comprising an antibody conjugated to a cytotoxic agent such as a chemotherapeutic agent, toxin (e.g., an enzymatically active toxin of bacterial, fungal, plant, or animal origin, or fragments thereof), or a radioactive isotope (i.e., a radioconjugate).

[0258] Chemotherapeutic agents useful in the generation of such immunoconjugates have been described above. Enzymatically active toxins and fragments thereof that can be used include diphtheria A chain, nonbinding active fragments of diphtheria toxin, exotoxin A chain (from Pseudomonas aeruginosa), ricin A chain, abrin A chain, modeccin A chain, alpha-sarcin, Aleurites fordii proteins, dianthin proteins, Phytolaca americana proteins (PAPI, PAPII, and PAP-S), momordica charantia inhibitor, curcin, crotin, sapaonaria officinalis inhibitor, gelonin, mitogellin, restrictocin, phenomycin, enomycin, and the tricothecenes. A variety of radionuclides are available for the production of radioconjugated antibodies. Examples include ²¹²Bi, ¹³¹I, ¹³¹In, ⁹⁰Y and ¹⁸⁶Re.

[0259] Conjugates of the antibody and cytotoxic agent are made using a variety of bifunctional protein-coupling agents such as N-succinimidyl-3-(2-pyridyldithiol) propionate (SPDP), iminothiolane (IT), bifunctional derivatives of imidoesters (such as dimethyl adipimidate HCL), active esters (such as disuccinimidyl suberate), aldehydes (such as glutareldehyde), bis-azido compounds (such as bis (p-azidobenzoyl) hexanediamine), bis-diazonium derivatives (such as bis-(p-diazoniumbenzoyl)-ethylenediamine), diisocyanates (such as tolyene 2,6-diisocyanate), and bis-active fluorine compounds (such as 1,5-difluoro-2,4-dinitrobenzene). For example, a ricin immunotoxin can be prepared as described in Vitetta et al., Science, 238: 1098 (1987). Carbon-14-labeled 1-isothiocyanatobenzyl-3-methyldiethylene triaminepentaacetic acid (MX-DTPA) is an exemplary chelating agent for conjugation of radionucleotide to the antibody. See WO94/11026.

[0260] In another embodiment, the antibody may be conjugated to a “receptor” (such streptavidin) for utilization in tumor pretargeting wherein the antibody-receptor conjugate is administered to the patient, followed by removal of unbound conjugate from the circulation using a clearing agent and then administration of a “ligand” (e.g., avidin) that is conjugated to a cytotoxic agent (e.g., a radionucleotide).

[0261] 8. Immunoliposomes

[0262] The antibodies disclosed herein may also be formulated as immunoliposomes. Liposomes containing the antibody are prepared by methods known in the art, such as described in Epstein et al., Proc. Natl. Acad. Sci. USA, 82: 3688 (1985); Hwang et al., Proc. Natl. Acad. Sci. USA, 77: 4030 (1980); and U.S. Pat. Nos. 4,485,045 and 4,544,545. Liposomes with enhanced circulation time are disclosed in U.S. Pat. No. 5,013,556.

[0263] Particularly useful liposomes can be generated by the reverse-phase evaporation method with a lipid composition comprising phosphatidylcholine, cholesterol, and PEG-derivatized phosphatidylethanolamine (PEG-PE). Liposomes are extruded through filters of defined pore size to yield liposomes with the desired diameter. Fab′ fragments of the antibody of the present invention can be conjugated to the liposomes as described in Martin et al., J. Biol. Chem., 257: 286-288 (1982) via a disulfide-interchange reaction. A chemotherapeutic agent (such as Doxorubicin) is optionally contained within the liposome. See Gabizon et al., J. National Cancer Inst., 81(19): 1484 (1989).

[0264] M. Pharmaceutical Compositions

[0265] The active PRO molecules of the invention (e.g., PRO polypeptides, anti-PRO antibodies, and/or variants of each) as well as other molecules identified by the screening assays disclosed above, can be administered for the treatment of immune related diseases, in the form of pharmaceutical compositions.

[0266] Therapeutic formulations of the active PRO molecule, preferably a polypeptide or antibody of the invention, are prepared for storage by mixing the active molecule having the desired degree of purity with optional pharmaceutically acceptable carriers, excipients or stabilizers (Remington's Pharmaceutical Sciences 16th edition, Osol, A. Ed. [1980]), in the form of lyophilized formulations or aqueous solutions. Acceptable carriers, excipients, or stabilizers are nontoxic to recipients at the dosages and concentrations employed, and include buffers such as phosphate, citrate, and other organic acids; antioxidants including ascorbic acid and methionine; preservatives (such as octadecyldimethylbenzyl ammonium chloride; hexamethonium chloride; benzalkonium chloride, benzethonium chloride; phenol, butyl or benzyl alcohol; alkyl parabens such as methyl or propyl paraben; catechol; resorcinol; cyclohexanol; 3-pentanol; and m-cresol); low molecular weight (less than about 10 residues) polypeptides; proteins, such as serum albumin, gelatin, or immunoglobulins; hydrophilic polymers such as polyvinylpyrrolidone; amino acids such in as glycine, glutamine, asparagine, histidine, arginine, or lysine; monosaccharides, disaccharides, and other carbohydrates including glucose, mannose, or dextrins; chelating agents such as EDTA; sugars such as sucrose, mannitol, trehalose or sorbitol; salt-forming counter-ions such as sodium; metal complexes (e.g., Zn-protein complexes); and/or non-ionic surfactants such as TWEEN™, PLURONICS™ or polyethylene glycol (PEG).

[0267] Compounds identified by the screening assays disclosed herein can be formulated in an analogous manner, using standard techniques well known in the art.

[0268] Lipofections or liposomes can also be used to deliver the PRO molecule into cells. Where antibody fragments are used, the smallest inhibitory fragment which specifically binds to the binding domain of the target protein is preferred. For example, based upon the variable region sequences of an antibody, peptide molecules can be designed which retain the ability to bind the target protein sequence. Such peptides can be synthesized chemically and/or produced by recombinant DNA technology (see, e.g., Marasco et al., Proc. Natl. Acad. Sci. USA 90, 7889-7893 [1993]).

[0269] The formulation herein may also contain more than one active compound as necessary for the particular indication being treated, preferably those with complementary activities that do not adversely affect each other. Alternatively, or in addition, the composition may comprise a cytotoxic agent, cytokine or growth inhibitory agent. Such molecules are suitably present in combination in amounts that are effective for the purpose intended.

[0270] The active PRO molecules may also be entrapped in microcapsules prepared, for example, by coacervation techniques or by interfacial polymerization, for example, hydroxymethylcellulose or gelatin-microcapsules and poly-(methylmethacylate) microcapsules, respectively, in colloidal drug delivery systems (for example, liposomes, albumin microspheres, microemulsions, nano-particles and nanocapsules) or in macroemulsions. Such techniques are disclosed in Remington's Pharmaceutical Sciences 16th edition, Osol, A. Ed. (1980).

[0271] The formulations to be used for in vivo administration must be sterile. This is readily accomplished by filtration through sterile filtration membranes.

[0272] Sustained-release preparations or the PRO molecules may be prepared. Suitable examples of sustained-release preparations include semipermeable matrices of solid hydrophobic polymers containing the antibody, which matrices are in the form of shaped articles, e.g., films, or microcapsules. Examples of sustained-release matrices include polyesters, hydrogels (for example, poly(2-hydroxyethyl-methacrylate), or poly(vinylalcohol)), polylactides (U.S. Pat. No. 3,773,919), copolymers of L-glutamic acid and y-ethyl-L-glutamate, non-degradable ethylene-vinyl acetate, degradable lactic acid-glycolic acid copolymers such as the LUPRON DEPO™ (injectable microspheres composed of lactic acid-glycolic acid copolymer and leuprolide acetate), and poly-D-(−)-3-hydroxybutyric acid. While polymers such as ethylene-vinyl acetate and lactic acid-glycolic acid enable release of molecules for over 100 days, certain hydrogels release proteins for shorter time periods. When encapsulated antibodies remain in the body for a long time, they may denature or aggregate as a result of exposure to moisture at 37° C., resulting in a loss of biological activity and possible changes in immunogenicity. Rational strategies can be devised for stabilization depending on the mechanism involved. For example, if the aggregation mechanism is discovered to be intermolecular S—S bond formation through thio-disulfide interchange, stabilization may be achieved by modifying sulfhydryl residues, lyophilizing from acidic solutions, controlling moisture content, using appropriate additives, and developing specific polymer matrix compositions.

[0273] N. Methods of Treatment

[0274] It is contemplated that the polypeptides, antibodies and other active compounds of the present invention may be used to treat various immune related diseases and conditions, such as T cell mediated diseases, including those characterized by infiltration of inflammatory cells into a tissue, stimulation of T-cell proliferation, inhibition of T-cell proliferation, increased or decreased vascular permeability or the inhibition thereof.

[0275] Exemplary conditions or disorders to be treated with the polypeptides, antibodies and other compounds of the invention, include, but are not limited to systemic lupus erythematosis, rheumatoid arthritis, juvenile chronic arthritis, osteoarthritis, spondyloarthropathies, systemic sclerosis (scleroderma), idiopathic inflammatory myopathies (dermatomyositis, polymyositis), Sjögren's syndrome, systemic vasculitis, sarcoidosis, autoimmune hemolytic anemia (immune pancytopenia, paroxysmal nocturnal hemoglobinuria), autoimmune thrombocytopenia (idiopathic thrombocytopenic purpura, immune-mediated thrombocytopenia), thyroiditis (Grave's disease, Hashimoto's thyroiditis, juvenile lymphocytic thyroiditis, atrophic thyroiditis), diabetes mellitus, immune-mediated renal disease (glomerulonephritis, tubulointerstitial nephritis), demyelinating diseases of the central and peripheral nervous systems such as multiple sclerosis, idiopathic demyelinating polyneuropathy or Guillain-Barré syndrome, and chronic inflammatory demyelinating polyneuropathy, hepatobiliary diseases such as infectious hepatitis (hepatitis A, B, C, D, E and other non-hepatotropic viruses), autoimmune chronic active hepatitis, primary biliary cirrhosis, granulomatous hepatitis, and sclerosing cholangitis, inflammatory bowel disease (ulcerative colitis: Crohn's disease), gluten-sensitive enteropathy, and Whipple's disease, autoimmune or immune-mediated skin diseases including bullous skin diseases, erythema multiforme and contact dermatitis, psoriasis, allergic diseases such as asthma, allergic rhinitis, atopic dermatitis, food hypersensitivity and urticaria, immunologic diseases of the lung such as eosinophilic pneumonias, idiopathic pulmonary fibrosis and hypersensitivity pneumonitis, transplantation associated diseases including graft rejection and graft-versus-host-disease.

[0276] In systemic lupus erythematosus, the central mediator of disease is the production of auto-reactive antibodies to self proteins/tissues and the subsequent generation of immune-mediated inflammation. Antibodies either directly or indirectly mediate tissue injury. Though T lymphocytes have not been shown to be directly involved in tissue damage, T lymphocytes are required for the development of auto-reactive antibodies. The genesis of the disease is thus T lymphocyte dependent. Multiple organs and systems are affected clinically including kidney, lung, musculoskeletal system, mucocutaneous, eye, central nervous system, cardiovascular system, gastrointestinal tract, bone marrow and blood.

[0277] Rheumatoid arthritis (RA) is a chronic systemic autoimmune inflammatory disease that mainly involves the synovial membrane of multiple joints with resultant injury to the articular cartilage. The pathogenesis is T lymphocyte dependent and is associated with the production of rheumatoid factors, auto-antibodies directed against self IgG, with the resultant formation of immune complexes that attain high levels in joint fluid and blood. These complexes in the joint may induce the marked infiltrate of lymphocytes and monocytes into the synovium and subsequent marked synovial changes; the joint space/fluid if infiltrated by similar cells with the addition of numerous neutrophils. Tissues affected are primarily the joints, often in symmetrical pattern. However, extra-articular disease also occurs in two major forms. One form is the development of extra-articular lesions with ongoing progressive joint disease and typical lesions of pulmonary fibrosis, vasculitis, and cutaneous ulcers. The second form of extra-articular disease is the so called Felty's syndrome which occurs late in the RA disease course, sometimes after joint disease has become quiescent, and involves the presence of neutropenia, thrombocytopenia and splenomegaly. This can be accompanied by vasculitis in multiple organs with formations of infarcts, skin ulcers and gangrene. Patients often also develop rheumatoid nodules in the subcutis tissue overlying affected joints; the nodules late stage have necrotic centers surrounded by a mixed inflammatory cell infiltrate. Other manifestations which can occur in RA include: pericarditis, pleuritis, coronary arteritis, intestitial pneumonitis with pulmonary fibrosis, keratoconjunctivitis sicca, and rhematoid nodules.

[0278] Juvenile chronic arthritis is a chronic idiopathic inflammatory disease which begins often at less than 16 years of age. Its phenotype has some similarities to RA; some patients which are rhematoid factor positive are classified as juvenile rheumatoid arthritis. The disease is sub-classified into three major categories: pauciarticular, polyarticular, and systemic. The arthritis can be severe and is typically destructive and leads to joint ankylosis and retarded growth. Other manifestations can include chronic anterior uveitis and systemic amyloidosis.

[0279] Spondyloarthropathies are a group of disorders with some common clinical features and the common association with the expression of HLA-B27 gene product. The disorders include: ankylosing sponylitis, Reiter's syndrome (reactive arthritis), arthritis associated with inflammatory bowel disease, spondylitis associated with psoriasis, juvenile onset spondyloarthropathy and undifferentiated spondyloarthropathy. Distinguishing features include sacroileitis with or without spondylitis; inflammatory asymmetric arthritis; association with HLA-B27 (a serologically defined allele of the HLA-B locus of class I MHC); ocular inflammation, and absence of autoantibodies associated with other rheumatoid disease. The cell most implicated as key to induction of the disease is the CD8+ T lymphocyte, a cell which targets antigen presented by class I MHC molecules. CD8+ T cells may react against the class I MHC allele HLA-B27 as if it were a foreign peptide expressed by MHC class 1 molecules. It has been hypothesized that an epitope of HLA-B27 may mimic a bacterial or other microbial antigenic epitope and thus induce a CD8+ T cells response.

[0280] Systemic sclerosis (scleroderma) has an unknown etiology. A hallmark of the disease is induration of the skin; likely this is induced by an active inflammatory process. Scleroderma can be localized or systemic; vascular lesions are common and endothelial cell injury in the microvasculature is an early and important event in the development of systemic sclerosis; the vascular injury may be immune mediated. An immunologic basis is implied by the presence of mononuclear cell infiltrates in the cutaneous lesions and the presence of anti-nuclear antibodies in many patients. ICAM-1 is often upregulated on the cell surface of fibroblasts in skin lesions suggesting that T cell interaction with these cells may have a role in the pathogenesis of the disease. Other organs involved include: the gastrointestinal tract: smooth muscle atrophy and fibrosis resulting in abnormal peristalsis/motility; kidney: concentric subendothelial intimal proliferation affecting small arcuate and interlobular arteries with resultant reduced renal cortical blood flow, results in proteinuria, azotemia and hypertension; skeletal muscle: atrophy, interstitial fibrosis; inflammation; lung: interstitial pneumonitis and interstitial fibrosis; and heart: contraction band necrosis, scarring/fibrosis.

[0281] Idiopathic inflammatory myopathies including dermatomyositis, polymyositis and others are disorders of chronic muscle inflammation of unknown etiology resulting in muscle weakness. Muscle injury/inflammation is often symmetric and progressive. Autoantibodies are associated with most forms. These myositis-specific autoantibodies are directed against and inhibit the function of components, proteins and RNA's, involved in protein synthesis.

[0282] Sjögren's syndrome is due to immune-mediated inflammation and subsequent functional destruction of the tear glands and salivary glands. The disease can be associated with or accompanied by inflammatory connective tissue diseases. The disease is associated with autoantibody production against Ro and La antigens, both of which are small RNA-protein complexes. Lesions result in keratoconjunctivitis sicca, xerostomia, with other manifestations or associations including bilary cirrhosis, peripheral or sensory neuropathy, and palpable purpura.

[0283] Systemic vasculitis are diseases in which the primary lesion is inflammation and subsequent damage to blood vessels which results in ischemia/necrosis/degeneration to tissues supplied by the affected vessels and eventual end-organ dysfunction in some cases. Vasculitides can also occur as a secondary lesion or sequelae to other immune-inflammatory mediated diseases such as rheumatoid arthritis, systemic sclerosis, etc., particularly in diseases also associated with the formation of immune complexes. Diseases in the primary systemic vasculitis group include: systemic necrotizing vasculitis: polyarteritis nodosa, allergic angiitis and granulomatosis, polyangiitis; Wegener's granulomatosis; lymphomatoid granulomatosis; and giant cell arteritis. Miscellaneous vasculitides include: mucocutaneous lymph node syndrome (MLNS or Kawasaki's disease), isolated CNS vasculitis, Behet's disease, thromboangiitis obliterans (Buerger's disease) and cutaneous necrotizing venulitis. The pathogenic mechanism of most of the types of vasculitis listed is believed to be primarily due to the deposition of immunoglobulin complexes in the vessel wall and subsequent induction of an inflammatory response either via ADCC, complement activation, or both.

[0284] Sarcoidosis is a condition of unknown etiology which is characterized by the presence of epithelioid granulomas in nearly any tissue in the body; involvement of the lung is most common. The pathogenesis involves the persistence of activated macrophages and lymphoid cells at sites of the disease with subsequent chronic sequelae resultant from the release of locally and systemically active products released by these cell types.

[0285] Autoimmune hemolytic anemia including autoimmune hemolytic anemia, immune pancytopenia, and paroxysmal noctural hemoglobinuria is a result of production of antibodies that react with antigens expressed on the surface of red blood cells (and in some cases other blood cells including platelets as well) and is a reflection of the removal of those antibody coated cells via complement mediated lysis and/or ADCC/Fc-receptor-mediated mechanisms.

[0286] In autoimmune thrombocytopenia including thrombocytopenic purpura, and immune-mediated thrombocytopenia in other clinical settings, platelet destruction/removal occurs as a result of either antibody or complement attaching to platelets and subsequent removal by complement lysis, ADCC or FC-receptor mediated mechanisms.

[0287] Thyroiditis including Grave's disease, Hashimoto's thyroiditis, juvenile lymphocytic thyroiditis, and atrophic thyroiditis, are the result of an autoimmune response against thyroid antigens with production of antibodies that react with proteins present in and often specific for the thyroid gland. Experimental models exist including spontaneous models: rats (BUF and BB rats) and chickens (obese chicken strain); inducible models: immunization of animals with either thyroglobulin, thyroid microsomal antigen (thyroid peroxidase).

[0288] Type I diabetes mellitus or insulin-dependent diabetes is the autoimmune destruction of pancreatic islet ∃ cells; this destruction is mediated by auto-antibodies and auto-reactive T cells. Antibodies to insulin or the insulin receptor can also produce the phenotype of insulin-non-responsiveness.

[0289] Immune mediated renal diseases, including glomerulonephritis and tubulointerstitial nephritis, are the result of antibody or T lymphocyte mediated injury to renal tissue either directly as a result of the production of autoreactive antibodies or T cells against renal antigens or indirectly as a result of the deposition of antibodies and/or immune complexes in the kidney that are reactive against other, non-renal antigens. Thus other immune-mediated diseases that result in the formation of immune-complexes can also induce immune mediated renal disease as an indirect sequelae. Both direct and indirect immune mechanisms result in inflammatory response that produces/induces lesion development in renal tissues with resultant organ function impairment and in some cases progression to renal failure. Both humoral and cellular immune mechanisms can be involved in the pathogenesis of lesions.

[0290] Demyelinating diseases of the central and peripheral nervous systems, including Multiple Sclerosis; idiopathic demyelinating polyneuropathy or Guillain-Barré syndrome; and Chronic Inflammatory Demyelinating Polyneuropathy, are believed to have an autoimmune basis and result in nerve demyelination as a result of damage caused to oligodendrocytes or to myelin directly. In MS there is evidence to suggest that disease induction and progression is dependent on T lymphocytes. Multiple Sclerosis is a demyelinating disease that is T lymphocyte-dependent and has either a relapsing-remitting course or a chronic progressive course. The etiology is unknown; however, viral infections, genetic predisposition, environment, and autoimmunity all contribute. Lesions contain infiltrates of predominantly T lymphocyte mediated, microglial cells and infiltrating macrophages; CD4+ T lymphocytes are the predominant cell type at lesions. The mechanism of oligodendrocyte cell death and subsequent demyelination is not known but is likely T lymphocyte driven.

[0291] Inflammatory and Fibrotic Lung Disease, including Eosinophilic Pneumonias; Idiopathic Pulmonary Fibrosis, and Hypersensitivity Pneumonitis may involve a disregulated immune-inflammatory response. Inhibition of that response would be of therapeutic benefit.

[0292] Autoimmune or Immune-mediated Skin Disease including Bullous Skin Diseases, Erythema Multiforme, and Contact Dermatitis are mediated by auto-antibodies, the genesis of which is T lymphocyte-dependent.

[0293] Psoriasis is a T lymphocyte-mediated inflammatory disease. Lesions contain infiltrates of T lymphocytes, macrophages and antigen processing cells, and some neutrophils.

[0294] Allergic diseases, including asthma; allergic rhinitis; atopic dermatitis; food hypersensitivity; and urticaria are T lymphocyte dependent. These diseases are predominantly mediated by T lymphocyte induced inflammation, IgE mediated-inflammation or a combination of both.

[0295] Transplantation associated diseases, including Graft rejection and Graft-Versus-Host-Disease (GVHD) are T lymphocyte-dependent; inhibition of T lymphocyte function is ameliorative.

Other diseases in which intervention of the immune and/or inflammatory response have benefit are infectious disease including but not limited to viral infection (including but not limited to AIDS, hepatitis A, B, C, D, E and herpes) bacterial infection, fungal infections, and protozoal and parasitic infections (molecules (or derivatives/agonists) which stimulate the MLR can be utilized therapeutically to enhance the immune response to infectious agents), diseases of immunodeficiency (molecules/derivatives/agonists) which stimulate the MLR can be utilized therapeutically to enhance the immune response for conditions of inherited, acquired, infectious induced (as in HIV infection), or iatrogenic (i.e., as from chemotherapy) immunodeficiency, and neoplasia.

[0296] It has been demonstrated that some human cancer patients develop an antibody and/or T lymphocyte response to antigens on neoplastic cells. It has also been shown in animal models of neoplasia that enhancement of the immune response can result in rejection or regression of that particular neoplasm. Molecules that enhance the T lymphocyte response in the MLR have utility in vivo in enhancing the immune response against neoplasia. Molecules which enhance the T lymphocyte proliferative response in the MLR (or small molecule agonists or antibodies that affected the same receptor in an agonistic fashion) can be used therapeutically to treat cancer. Molecules that inhibit the lymphocyte response in the MLR also function in vivo during neoplasia to suppress the immune response to a neoplasm; such molecules can either be expressed by the neoplastic cells themselves or their expression can be induced by the neoplasm in other cells. Antagonism of such inhibitory molecules (either with antibody, small molecule antagonists or other means) enhances immune-mediated tumor rejection.

[0297] Additionally, inhibition of molecules with proinflammatory properties may have therapeutic benefit in reperfusion injury; stroke; myocardial infarction; atherosclerosis; acute lung injury; hemorrhagic shock; burn; sepsis/septic shock; acute tubular necrosis; endometriosis; degenerative joint disease and pancreatis.

[0298] The compounds of the present invention, e.g., polypeptides or antibodies, are administered to a mammal, preferably a human, in accord with known methods, such as intravenous administration as a bolus or by continuous infusion over a period of time, by intramuscular, intraperitoneal, intracerobrospinal, subcutaneous, intra-articular, intrasynovial, intrathecal, oral, topical, or inhalation (intranasal, intrapulmonary) routes. Intravenous or inhaled administration of polypeptides and antibodies is preferred.

[0299] In immunoadjuvant therapy, other therapeutic regimens, such administration of an anti-cancer agent, may be combined with the administration of the proteins, antibodies or compounds of the instant invention. For example, the patient to be treated with a the immunoadjuvant of the invention may also receive an anti-cancer agent (chemotherapeutic agent) or radiation therapy. Preparation and dosing schedules for such chemotherapeutic agents may be used according to manufacturers' instructions or as determined empirically by the skilled practitioner. Preparation and dosing schedules for such chemotherapy are also described in Chemotherapy Service Ed., M. C. Perry, Williams & Wilkins, Baltimore, Md. (1992). The chemotherapeutic agent may precede, or follow administration of the immunoadjuvant or may be given simultaneously therewith. Additionally, an anti-estrogen compound such as tamoxifen or an anti-progesterone such as onapristone (see, EP 616812) may be given in dosages known for such molecules.

[0300] It may be desirable to also administer antibodies against other immune disease associated or tumor associated antigens, such as antibodies which bind to CD20, CD11a, CD18, ErbB2, EGFR, ErbB3, ErbB4, or vascular endothelial factor (VEGF). Alternatively, or in addition, two or more antibodies binding the same or two or more different antigens disclosed herein may be coadministered to the patient. Sometimes, it may be beneficial to also administer one or more cytokines to the patient. In one embodiment, the PRO polypeptides are coadministered with a growth inhibitory agent. For example, the growth inhibitory agent may be administered first, followed by a PRO polypeptide. However, simultaneous administration or administration first is also contemplated. Suitable dosages for the growth inhibitory agent are those presently used and may be lowered due to the combined action (synergy) of the growth inhibitory agent and the PRO polypeptide.

[0301] For the treatment or reduction in the severity of immune related disease, the appropriate dosage of an a compound of the invention will depend on the type of disease to be treated, as defined above, the severity and course of the disease, whether the agent is administered for preventive or therapeutic purposes, previous therapy, the patient's clinical history and response to the compound, and the discretion of the attending physician. The compound is suitably administered to the patient at one time or over a series of treatments.

[0302] For example, depending on the type and severity of the disease, about 1 μg/kg to 15 mg/kg (e.g., 0.1-20 mg/kg) of polypeptide or antibody is an initial candidate dosage for administration to the patient, whether, for example, by one or more separate administrations, or by continuous infusion. A typical daily dosage might range from about 1 μg/kg to 100 mg/kg or more, depending on the factors mentioned above. For repeated administrations over several days or longer, depending on the condition, the treatment is sustained until a desired suppression of disease symptoms occurs. However, other dosage regimens may be useful. The progress of this therapy is easily monitored by conventional techniques and assays.

[0303] O. Articles of Manufacture

[0304] In another embodiment of the invention, an article of manufacture containing materials (e.g., comprising a PRO molecule) useful for the diagnosis or treatment of the disorders described above is provided. The article of manufacture comprises a container and an instruction. Suitable containers include, for example, bottles, vials, syringes, and test tubes. The containers may be formed from a variety of materials such as glass or plastic. The container holds a composition which is effective for diagnosing or treating the condition and may have a sterile access port (for example the container may be an intravenous solution bag or a vial having a stopper pierceable by a hypodermic injection needle). The active agent in the composition is usually a polypeptide or an antibody of the invention. An instruction or label on, or associated with, the container indicates that the composition is used for diagnosing or treating the condition of choice. The article of manufacture may further comprise a second container comprising a pharmaceutically-acceptable buffer, such as phosphate-buffered saline, Ringer's solution and dextrose solution. It may further include other materials desirable from a commercial and user standpoint, including other buffers, diluents, filters, needles, syringes, and package inserts with instructions for use.

[0305] P. Diagnosis and Prognosis of Immune Related Disease

[0306] Cell surface proteins, such as proteins which are overexpressed in certain immune related diseases, are excellent targets for drug candidates or disease treatment. The same proteins along with secreted proteins encoded by the genes amplified in immune related disease states find additional use in the diagnosis and prognosis of these diseases. For example, antibodies directed against the protein products of genes amplified in multiple sclerosis, rheumatoid arthritis, or another immune related disease, can be used as diagnostics or prognostics.

[0307] For example, antibodies, including antibody fragments, can be used to qualitatively or quantitatively detect the expression of proteins encoded by amplified or overexpressed genes (“marker gene products”). The antibody preferably is equipped with a detectable, e.g., fluorescent label, and binding can be monitored by light microscopy, flow cytometry, fluorimetry, or other techniques known in the art. These techniques are particularly suitable, if the overexpressed gene encodes a cell surface protein Such binding assays are performed essentially as described above.

[0308] In situ detection of antibody binding to the marker gene products can be performed, for example, by immunofluorescence or immunoelectron microscopy. For this purpose, a histological specimen is removed from the patient, and a labeled antibody is applied to it, preferably by overlaying the antibody on a biological sample. This procedure also allows for determining the distribution of the marker gene product in the tissue examined. It will be apparent for those skilled in the art that a wide variety of histological methods are readily available for in situ detection.

[0309] The following examples are offered for illustrative purposes only, and are not intended to limit the scope of the present invention in any way.

[0310] All patent and literature references cited in the present specification are hereby incorporated by reference in their entirety.

### EXAMPLES

[0311] Commercially available reagents referred to in the examples were used according to manufacturer's instructions unless otherwise indicated. The source of those cells identified in the following examples, and throughout the specification, by ATCC accession numbers is the American Type Culture Collection, Manassas, Va.

### Example 1

### Microarray Analysis of Stimulated T-Cells

[0312] Nucleic acid microarrays, often containing thousands of gene sequences, are useful for identifying differentially expressed genes in diseased tissues as compared to their normal counterparts. Using nucleic acid microarrays, test and control mRNA samples from test and control tissue samples are reverse transcribed and labeled to generate cDNA probes. The cDNA probes are then hybridized to an array of nucleic acids immobilized on a solid support. The array is configured such that the sequence and position of each member of the array is known. For example, a selection of genes known to be expressed in certain disease states may be arrayed on a solid support. Hybridization of a labeled probe with a particular array member indicates that the sample from which the probe was derived expresses that gene. If the hybridization signal of a probe from a test (for example, activated CD4+ T cells) sample is greater than hybridization signal of a probe from a control (for example, non-stimulated CD4+ T cells) sample, the gene or genes overexpressed in the test tissue are identified. The implication of this result is that an overexpressed protein in a test tissue is useful not only as a diagnostic marker for the presence of a disease condition, but also as a therapeutic target for treatment of a disease condition.

[0313] The methodology of hybridization of nucleic acids and microarray technology is well known in the art. In one example, the specific preparation of nucleic acids for hybridization and probes, slides, and hybridization conditions are all detailed in PCT Patent Application Serial No. PCT/US01/10482, filed on Mar. 30, 2001 and which is herein incorporated by reference.

[0314] When CD4+ T cells mature from thymus and enter into the peripheral lymph system, they usually maintain their naive phenotype before encountering antigens specific for their T cell receptor [Sprent et al., Annu Rev Immunol. (2002); 20:551-79]. The binding to specific antigens presented by APC, causes T cell activation. Depending on the environment and cytokine stimulation, CD4+ T cells differentiate into a Th1 or Th2 phenotype and become effector or memory cells [Sprent et al., Annu Rev Immunol. (2002); 20:551-79 and Murphy et al., Nat Rev Immunol. (2002) December; 2(12):933-44]. This process is known as primary activation. Having undergone primary activation, CD4+ T cells become effector or memory cells, they maintain their phenotype as Th1 or Th2. Once these cells encounter antigen again, they undergo secondary activation, but this time the response to antigen will be quicker than the primary activation and results in the production of effector cytokines as determined by the primary activation [Sprent et al., Annu Rev Immunol. (2002); 20:551-79 and Murphy et al., Annu Rev Immunol. 2000; 18:451-94].

[0315] Studies have found during the primary and secondary activation of CD4+ T cells the expression of certain genes is variable [Rogge et al., Nature Genetics. 25, 96-101 (2000) and Ouyang et al., Proc Natl Acad Sci USA. (1999) March 30; 96(7):3888-93]. The present study represents a model to identify differentially expressed genes during the primary and secondary activation response in vitro.

[0316] For primary activation conditions, naïve T cells were activated by anti-CD3, anti-CD28 and specific cytokines (experimental conditions are described below). This primary activation was termed condition (a). RNA isolated from cells in this condition can provide information about what genes are differentially regulated during the primary activation, and what cytokines affect gene expression during Th1 and Th2 development. After primary activation, the CD4+ T cells were maintained in culture for a week. However, as the previous activation and cytokine treatment has been imprinted into these cells and they have become either effector or memory cells. During this period, because there are no APCs or antigens, the CD4+ T cells enter a resting stage. This resting stage, termed condition (b) (with experimental conditions described below), provides information about the differences between naive vs. memory cells, and resting memory Th1 vs. resting memory Th2 cells. The resting memory Th1 and Th2 cells then undergo secondary activation under condition (c) and condition (d), with both conditions being described below. These conditions provide information about the differences between activated naive and activated memory T cells, and the differences between activated memory Th1 vs. activated memory Th2 cells. This study demonstrates differential gene expression during different stages of CD4 T cell activation and differentiation. As we know, many autoimmune diseases are caused by memory Th1 and Th2 cells. The data now provide us opportunity to find markers to identify these cells and specifically target these cells as a new therapeutic approach.

[0317] In this experiment, CD4+ T cells were purified from a single donor using the RossetteSep™ protocol (Stem Cell Technologies, Vancouver BC) which contains anti-CD8, anti-CD16, anti-CD19, anti-CD36 and anti-CD56 antibodies used to produce a population of isolated CD4+ T cells with the modification to the protocol of using 1.3 ml reagent/25 ml blood. The isolated CD4+ T cells were washed by PBS (0.5% BSA) twice and counted. Naïve CD4+ T cells were further isolated by Miltenyi CD45RO beads (Miltenyi Biotec) through the autoMACS™ depletion program and the purity of the cells was determined by FACS analysis. Experiments proceeded only with >90% cell pure CD4+ T cells. At this point RNA was extracted from 50×10̂6 CD4+ T cells for use as a baseline control. The remainder of the cells were stimulated by plate bound anti-CD3 and anti-CD28 at 20×10̂6 cells/6 ml T cell media/well of a 6 well plate.

[0318] On Day 1, to induce Th1 differentiation, IL-12 (1 ng/ml) and anti-IL-4 (1μ/ml) were added. For Th2 differentiation, IL-4 (5 ng/ml), anti-IL-12 (0.5 μg/ml), and anti-IFN-g were added. For Th0 cells, anti-IL-12 (0.5 μg/ml), anti-IL-4 (1 m/ml) and anti -IFN-gamma (0.1 μg/ml) were added. All reagents were from R&D Systems (R & D Systems Inc. Minneapolis, Minn.).

[0319] On Day 2, cells from one well per condition were harvested for RNA purification to obtain a 48 hr time point (condition (a)). On Day 3, the cells were expanded 4 fold by removing the media used for differentiation, and adding fresh media plus IL-2 and cultured for 4 days. On Day 7, the cells were washed and counted, and the cytokine profiles were examined by intracellular cytokine staining and ELISA to determine if differentiation was complete. Half of the cells were harvested and RNA purified to determine the expression of genes in the resting state (condition (b)). IL-4 and IFN-gamma producing cells were enriched for by using the Miltenyi™ cytokine assay kit. The isolated IL-4 or IFN-gamma producing cells were expanded for two more weeks by using similar conditions as above.

[0320] On Day 21, cells were harvested and subject to intracellular cytokine staining and ELISA for cytokine production analysis. The remainder of the cells were re-stimulated by anti-CD3 and anti-CD28 (secondary activation). Cells were harvested at 12 hr (condition (c)) and 48 hr (condition (d)) for RNA purification. From the different conditions, RNA was extracted and analysis run on Affimax (Affymetrix Inc. Santa Clara, Calif.) microarray chips. Non-stimulated cells harvested immediately after purification, were subjected to the same analysis. Genes were compared whose expression was upregulated or downregulated at the different activated conditions vs. resting cells.

[0321] Below are the results of these experiments, demonstrating that various PRO polypeptides of the present invention are significantly upregulated or downregulated in isolated stimulated CD4+ T helper cells as compared to unstimulated CD4+ T helper cells or isolated resting CD4+ T helper cells. As Th1 and Th2 cells play a role in normal immune defense during infection, and play a role in immune disorders, this data demonstrate that the PRO polypeptides of the present invention are useful not only as diagnostic markers for the presence of one or more immune disorders, but also serve as therapeutic targets for the treatment of those immune disorders.

[0322] SEQ ID NOs 1-6464 show nucleic acids and their encoded proteins show differential expression at (condition (c)) or (condition (d)) vs. unstimulated cells as a normal control, cells that have undergone primary activation, or primary activated cells that had been in resting for 7 days.

### Example 2

### Use of PRO as a Hybridization Probe

[0323] The following method describes use of a nucleotide sequence encoding PRO as a hybridization probe.

[0324] DNA comprising the coding sequence of full-length or mature PRO as disclosed herein is employed as a probe to screen for homologous DNAs (such as those encoding naturally-occurring variants of PRO) in human tissue cDNA libraries or human tissue genomic libraries.

[0325] Hybridization and washing of filters containing either library DNAs is performed under the following high stringency conditions. Hybridization of radiolabeled PRO-derived probe to the filters is performed in a solution of 50% formamide, 5×SSC, 0.1% SDS, 0.1% sodium pyrophosphate, 50 mM sodium phosphate, pH 6.8, 2×Denhardt's solution, and 10% dextran sulfate at 42° C. for 20 hours. Washing of the filters is performed in an aqueous solution of 0.1×SSC and 0.1% SDS at 42° C.

[0326] DNAs having a desired sequence identity with the DNA encoding full-length native sequence PRO can then be identified using standard techniques known in the art.

### Example 3

### Expression of PRO in E. coli

[0327] This example illustrates preparation of an unglycosylated form of PRO by recombinant expression in E. coli.

[0328] The DNA sequence encoding PRO is initially amplified using selected PCR primers. The primers should contain restriction enzyme sites which correspond to the restriction enzyme sites on the selected expression vector. A variety of expression vectors may be employed. An example of a suitable vector is pBR322 (derived from E. coli; see Bolivar et al., Gene, 2:95 (1977)) which contains genes for ampicillin and tetracycline resistance. The vector is digested with restriction enzyme and dephosphorylated. The PCR amplified sequences are then ligated into the vector. The vector will preferably include sequences which encode for an antibiotic resistance gene, a trp promoter, a polyhis leader (including the first six STII codons, polyhis sequence, and enterokinase cleavage site), the PRO coding region, lambda transcriptional terminator, and an argU gene.

[0329] The ligation mixture is then used to transform a selected E. coli strain using the methods described in Sambrook et al., supra. Transformants are identified by their ability to grow on LB plates and antibiotic resistant colonies are then selected. Plasmid DNA can be isolated and confirmed by restriction analysis and DNA sequencing.

[0330] Selected clones can be grown overnight in liquid culture medium such as LB broth supplemented with antibiotics. The overnight culture may subsequently be used to inoculate a larger scale culture. The cells are then grown to a desired optical density, during which the expression promoter is turned on.

[0331] After culturing the cells for several more hours, the cells can be harvested by centrifugation. The cell pellet obtained by the centrifugation can be solubilized using various agents known in the art, and the solubilized PRO protein can then be purified using a metal chelating column under conditions that allow tight binding of the protein.

[0332] PRO may be expressed in E. coli in a poly-His tagged form, using the following procedure. The DNA encoding PRO is initially amplified using selected PCR primers. The primers will contain restriction enzyme sites which correspond to the restriction enzyme sites on the selected expression vector, and other useful sequences providing for efficient and reliable translation initiation, rapid purification on a metal chelation column, and proteolytic removal with enterokinase. The PCR-amplified, poly-His tagged sequences are then ligated into an expression vector, which is used to transform an E. coli host based on strain 52 (W3110 fuhA(tonA) lon galE rpoHts(htpRts) clpP(lacIq). Transformants are first grown in LB containing 50 mg/ml carbenicillin at 30° C. with shaking until an O.D.600 of 3-5 is reached. Cultures are then diluted 50-100 fold into CRAP media (prepared by mixing 3.57 g (NH₄)₂SO₄, 0.71 g sodium citrate.2H2O, 1.07 g KCl, 5.36 g Difco yeast extract, 5.36 g Sheffield hycase SF in 500 mL water, as well as 110 mM MPOS, pH 7.3, 0.55% (w/v) glucose and 7 mM MgSO₄) and grown for approximately 20-30 hours at 30° C. with shaking Samples are removed to verify expression by SDS-PAGE analysis, and the bulk culture is centrifuged to pellet the cells. Cell pellets are frozen until purification and refolding.

[0333] E. coli paste from 0.5 to 1 L fermentations (6-10 g pellets) is resuspended in 10 volumes (w/v) in 7 M guanidine, 20 mM Tris, pH 8 buffer. Solid sodium sulfite and sodium tetrathionate is added to make final concentrations of 0.1M and 0.02 M, respectively, and the solution is stirred overnight at 4° C. This step results in a denatured protein with all cysteine residues blocked by sulfitolization. The solution is centrifuged at 40,000 rpm in a Beckman Ultracentifuge for 30 min. The supernatant is diluted with 3-5 volumes of metal chelate column buffer (6 M guanidine, 20 mM Tris, pH 7.4) and filtered through 0.22 micron filters to clarify. The clarified extract is loaded onto a 5 ml Qiagen Ni-NTA metal chelate column equilibrated in the metal chelate column buffer. The column is washed with additional buffer containing 50 mM imidazole (Calbiochem, Utrol grade), pH 7.4. The protein is eluted with buffer containing 250 mM imidazole. Fractions containing the desired protein are pooled and stored at 4° C. Protein concentration is estimated by its absorbance at 280 nm using the calculated extinction coefficient based on its amino acid sequence.

[0334] The proteins are refolded by diluting the sample slowly into freshly prepared refolding buffer consisting of: 20 mM Tris, pH 8.6, 0.3 M NaCl, 2.5 M urea, 5 mM cysteine, 20 mM glycine and 1 mM EDTA. Refolding volumes are chosen so that the final protein concentration is between 50 to 100 micrograms/ml. The refolding solution is stirred gently at 4° C. for 12-36 hours. The refolding reaction is quenched by the addition of TFA to a final concentration of 0.4% (pH of approximately 3). Before further purification of the protein, the solution is filtered through a 0.22 micron filter and acetonitrile is added to 2-10% final concentration. The refolded protein is chromatographed on a Poros R1/H reversed phase column using a mobile buffer of 0.1% TFA with elution with a gradient of acetonitrile from 10 to 80%. Aliquots of fractions with A280 absorbance are analyzed on SDS polyacrylamide gels and fractions containing homogeneous refolded protein are pooled. Generally, the properly refolded species of most proteins are eluted at the lowest concentrations of acetonitrile since those species are the most compact with their hydrophobic interiors shielded from interaction with the reversed phase resin. Aggregated species are usually eluted at higher acetonitrile concentrations. In addition to resolving misfolded forms of proteins from the desired form, the reversed phase step also removes endotoxin from the samples.

[0335] Fractions containing the desired folded PRO polypeptide are pooled and the acetonitrile removed using a gentle stream of nitrogen directed at the solution. Proteins are formulated into 20 mM Hepes, pH 6.8 with 0.14 M sodium chloride and 4% mannitol by dialysis or by gel filtration using G25 Superfine (Pharmacia) resins equilibrated in the formulation buffer and sterile filtered.

[0336] Many of the PRO polypeptides disclosed herein were successfully expressed as described above.

### Example 4

### Expression of PRO in Mammalian Cells

[0337] This example illustrates preparation of a potentially glycosylated form of PRO by recombinant expression in mammalian cells.

[0338] The vector, pRK5 (see EP 307,247, published Mar. 15, 1989), is employed as the expression vector. Optionally, the PRO DNA is ligated into pRK5 with selected restriction enzymes to allow insertion of the PRO DNA using ligation methods such as described in Sambrook et al., supra. The resulting vector is called pRK5-PRO.

[0339] In one embodiment, the selected host cells may be 293 cells. Human 293 cells (ATCC CCL 1573) are grown to confluence in tissue culture plates in medium such as DMEM supplemented with fetal calf serum and optionally, nutrient components and/or antibiotics. About 10 μg pRK5-PRO DNA is mixed with about 1 μg DNA encoding the VA RNA gene [Thimmappaya et al., Cell, 31:543 (1982)] and dissolved in 500 μl of 1 mM Tris-HCl, 0.1 mM EDTA, 0.227 M CaCl₂. To this mixture is added, dropwise, 500 μl of 50 mM HEPES (pH 7.35), 280 mM NaCl, 1.5 mM NaPO₄, and a precipitate is allowed to form for 10 minutes at 25° C. The precipitate is suspended and added to the 293 cells and allowed to settle for about four hours at 37° C. The culture medium is aspirated off and 2 ml of 20% glycerol in PBS is added for 30 seconds. The 293 cells are then washed with serum free medium, fresh medium is added and the cells are incubated for about 5 days.

[0340] Approximately 24 hours after the transfections, the culture medium is removed and replaced with culture medium (alone) or culture medium containing 200 μCi/ml ³⁵S-cysteine and 200 μCi/ml ³⁵S-methionine. After a 12 hour incubation, the conditioned medium is collected, concentrated on a spin filter, and loaded onto a 15% SDS gel. The processed gel may be dried and exposed to film for a selected period of time to reveal the presence of PRO polypeptide. The cultures containing transfected cells may undergo further incubation (in serum free medium) and the medium is tested in selected bioassays.

[0341] In an alternative technique, PRO may be introduced into 293 cells transiently using the dextran sulfate method described by Somparyrac et al., Proc. Natl. Acad. Sci., 12:7575 (1981). 293 cells are grown to maximal density in a spinner flask and 700 μg pRK5-PRO DNA is added. The cells are first concentrated from the spinner flask by centrifugation and washed with PBS. The DNA-dextran precipitate is incubated on the cell pellet for four hours. The cells are treated with 20% glycerol for 90 seconds, washed with tissue culture medium, and re-introduced into the spinner flask containing tissue culture medium, 5 μg/ml bovine insulin and 0.1 μg/ml bovine transferrin. After about four days, the conditioned media is centrifuged and filtered to remove cells and debris. The sample containing expressed PRO can then be concentrated and purified by any selected method, such as dialysis and/or column chromatography.

[0342] In another embodiment, PRO can be expressed in CHO cells. The pRK5-PRO can be transfected into CHO cells using known reagents such as CaPO₄ or DEAE-dextran. As described above, the cell cultures can be incubated, and the medium replaced with culture medium (alone) or medium containing a radiolabel such as ³⁵S-methionine. After determining the presence of PRO polypeptide, the culture medium may be replaced with serum free medium. Preferably, the cultures are incubated for about 6 days, and then the conditioned medium is harvested. The medium containing the expressed PRO can then be concentrated and purified by any selected method.

[0343] Epitope-tagged PRO may also be expressed in host CHO cells. The PRO may be subcloned out of the pRK5 vector. The subclone insert can undergo PCR to fuse in frame with a selected epitope tag such as a poly-his tag into a Baculovirus expression vector. The poly-his tagged PRO insert can then be subcloned into a SV40 promoter/enhancer containing vector containing a selection marker such as DHFR for selection of stable clones. Finally, the CHO cells can be transfected (as described above) with the SV40 promoter/enhancer containing vector. Labeling may be performed, as described above, to verify expression. The culture medium containing the expressed poly-His tagged PRO can then be concentrated and purified by any selected method, such as by Ni²⁺-chelate affinity chromatography.

[0344] PRO may also be expressed in CHO and/or COS cells by a transient expression procedure or in CHO cells by another stable expression procedure.

[0345] Stable expression in CHO cells is performed using the following procedure. The proteins are expressed as an IgG construct (immunoadhesin), in which the coding sequences for the soluble forms (e.g. extracellular domains) of the respective proteins are fused to an IgG1 constant region sequence containing the hinge, CH2 and CH2 domains and/or is a poly-His tagged form.

[0346] Following PCR amplification, the respective DNAs are subcloned in a CHO expression vector using standard techniques as described in Ausubel et al., Current Protocols of Molecular Biology, Unit 3.16, John Wiley and Sons (1997). CHO expression vectors are constructed to have compatible restriction sites 5′ and 3′ of the DNA of interest to allow the convenient shuttling of cDNA's. The vector used expression in CHO cells is as described in Lucas et al., Nucl. Acids Res. 24:9 (1774-1779 (1996), and uses the SV40 early promoter/enhancer to drive expression of the cDNA of interest and dihydrofolate reductase (DHFR). DHFR expression permits selection for stable maintenance of the plasmid following transfection.

[0347] Twelve micrograms of the desired plasmid DNA is introduced into approximately 10 million CHO cells using commercially available transfection reagents Superfect® (Quiagen), Dosper® or Fugene® (Boehringer Mannheim). The cells are grown as described in Lucas et al., supra. Approximately 3×10⁻⁷ cells are frozen in an ampule for further growth and production as described below.

[0348] The ampules containing the plasmid DNA are thawed by placement into water bath and mixed by vortexing. The contents are pipetted into a centrifuge tube containing 10 mL of media and centrifuged at 1000 rpm for 5 minutes. The supernatant is aspirated and the cells are resuspended in 10 mL of selective media (0.2 μm filtered PS20 with 5% 0.2 μm diafiltered fetal bovine serum). The cells are then aliquoted into a 100 mL spinner containing 90 mL of selective media. After 1-2 days, the cells are transferred into a 250 mL spinner filled with 150 mL selective growth medium and incubated at 37° C. After another 2-3 days, 250 mL, 500 mL and 2000 mL spinners are seeded with 3×10⁵ cells/mL. The cell media is exchanged with fresh media by centrifugation and resuspension in production medium. Although any suitable CHO media may be employed, a production medium described in U.S. Pat. No. 5,122,469, issued Jun. 16, 1992 may actually be used. A 3 L production spinner is seeded at 1.2×10⁶ cells/mL. On day 0, pH is determined. On day 1, the spinner is sampled and sparging with filtered air is commenced. On day 2, the spinner is sampled, the temperature shifted to 33° C., and 30 mL of 500 g/L glucose and 0.6 mL of 10% antifoam (e.g., 35% polydimethylsiloxane emulsion, Dow Corning 365 Medical Grade Emulsion) taken. Throughout the production, the pH is adjusted as necessary to keep it at around 7.2. After 10 days, or until the viability dropped below 70%, the cell culture is harvested by centrifugation and filtering through a 0.22 μm filter. The filtrate was either stored at 4° C. or immediately loaded onto columns for purification.

[0349] For the poly-His tagged constructs, the proteins are purified using a Ni-NTA column (Qiagen). Before purification, imidazole is added to the conditioned media to a concentration of 5 mM. The conditioned media is pumped onto a 6 ml Ni-NTA column equilibrated in 20 mM Hepes, pH 7.4, buffer containing 0.3 M NaCl and 5 mM imidazole at a flow rate of 4-5 ml/min. at 4° C. After loading, the column is washed with additional equilibration buffer and the protein eluted with equilibration buffer containing 0.25 M imidazole. The highly purified protein is subsequently desalted into a storage buffer containing 10 mM Hepes, 0.14 M NaCl and 4% mannitol, pH 6.8, with a 25 ml G25 Superfine (Pharmacia) column and stored at −80° C.

[0350] Immunoadhesin (Fc-containing) constructs are purified from the conditioned media as follows. The conditioned medium is pumped onto a 5 ml Protein A column (Pharmacia) which had been equilibrated in 20 mM Na phosphate buffer, pH 6.8. After loading, the column is washed extensively with equilibration buffer before elution with 100 mM citric acid, pH 3.5. The eluted protein is immediately neutralized by collecting 1 ml fractions into tubes containing 275 μl of 1 M Tris buffer, pH 9. The highly purified protein is subsequently desalted into storage buffer as described above for the poly-His tagged proteins. The homogeneity is assessed by SDS polyacrylamide gels and by N-terminal amino acid sequencing by Edman degradation.

[0351] Many of the PRO polypeptides disclosed herein were successfully expressed as described above.

### Example 5

### Expression of PRO in Yeast

[0352] The following method describes recombinant expression of PRO in yeast.

[0353] First, yeast expression vectors are constructed for intracellular production or secretion of PRO from the ADH2/GAPDH promoter. DNA encoding PRO and the promoter is inserted into suitable restriction enzyme sites in the selected plasmid to direct intracellular expression of PRO. For secretion, DNA encoding PRO can be cloned into the selected plasmid, together with DNA encoding the ADH2/GAPDH promoter, a native PRO signal peptide or other mammalian signal peptide, or, for example, a yeast alpha-factor or invertase secretory signal/leader sequence, and linker sequences (if needed) for expression of PRO.

[0354] Yeast cells, such as yeast strain AB110, can then be transformed with the expression plasmids described above and cultured in selected fermentation media. The transformed yeast supernatants can be analyzed by precipitation with 10% trichloroacetic acid and separation by SDS-PAGE, followed by staining of the gels with Coomassie Blue stain.

[0355] Recombinant PRO can subsequently be isolated and purified by removing the yeast cells from the fermentation medium by centrifugation and then concentrating the medium using selected cartridge filters. The concentrate containing PRO may further be purified using selected column chromatography resins.

[0356] Many of the PRO polypeptides disclosed herein were successfully expressed as described above.

### Example 6

### Expression of PRO in Baculovirus-Infected Insect Cells

[0357] The following method describes recombinant expression of PRO in Baculovirus-infected insect cells.

[0358] The sequence coding for PRO is fused upstream of an epitope tag contained within a baculovirus expression vector. Such epitope tags include poly-his tags and immunoglobulin tags (like Fc regions of IgG). A variety of plasmids may be employed, including plasmids derived from commercially available plasmids such as pVL1393 (Novagen). Briefly, the sequence encoding PRO or the desired portion of the coding sequence of PRO such as the sequence encoding the extracellular domain of a transmembrane protein or the sequence encoding the mature protein if the protein is extracellular is amplified by PCR with primers complementary to the 5′ and 3′ regions. The 5′ primer may incorporate flanking (selected) restriction enzyme sites. The product is then digested with those selected restriction enzymes and subcloned into the expression vector.

[0359] Recombinant baculovirus is generated by co-transfecting the above plasmid and BaculoGold™ virus DNA (Pharmingen) into Spodoptera frugiperda (“Sf9”) cells (ATCC CRL 1711) using lipofectin (commercially available from GIBCO-BRL). After 4-5 days of incubation at 28° C., the released viruses are harvested and used for further amplifications. Viral infection and protein expression are performed as described by O'Reilley et al., Baculovirus expression vectors: A Laboratory Manual, Oxford: Oxford University Press (1994).

[0360] Expressed poly-his tagged PRO can then be purified, for example, by Ni²⁺-chelate affinity chromatography as follows. Extracts are prepared from recombinant virus-infected Sf9 cells as described by Rupert et al., Nature, 362:175-179 (1993). Briefly, Sf9 cells are washed, resuspended in sonication buffer (25 mL Hepes, pH 7.9; 12.5 mM MgCl₂; 0.1 mM EDTA; 10% glycerol; 0.1% NP-40; 0.4 M KCl), and sonicated twice for 20 seconds on ice. The sonicates are cleared by centrifugation, and the supernatant is diluted 50-fold in loading buffer (50 mM phosphate, 300 mM NaCl, 10% glycerol, pH 7.8) and filtered through a 0.45 μm filter. A Ni²⁺-NTA agarose column (commercially available from Qiagen) is prepared with a bed volume of 5 mL, washed with 25 mL of water and equilibrated with 25 mL of loading buffer. The filtered cell extract is loaded onto the column at 0.5 mL per minute. The column is washed to baseline A₂₈₀ with loading buffer, at which point fraction collection is started. Next, the column is washed with a secondary wash buffer (50 mM phosphate; 300 mM NaCl, 10% glycerol, pH 6.0), which elutes nonspecifically bound protein. After reaching A₂₈₀ baseline again, the column is developed with a 0 to 500 mM Imidazole gradient in the secondary wash buffer. One mL fractions are collected and analyzed by SDS-PAGE and silver staining or Western blot with Ni²⁺-NTA-conjugated to alkaline phosphatase (Qiagen). Fractions containing the eluted His₁₀-tagged PRO are pooled and dialyzed against loading buffer.

[0361] Alternatively, purification of the IgG tagged (or Fc tagged) PRO can be performed using known chromatography techniques, including for instance, Protein A or protein G column chromatography.

[0362] Many of the PRO polypeptides disclosed herein were successfully expressed as described above.

### Example 7

### Preparation of Antibodies that Bind PRO

[0363] This example illustrates preparation of monoclonal antibodies which can specifically bind PRO.

[0364] Techniques for producing the monoclonal antibodies are known in the art and are described, for instance, in Goding, supra. Immunogens that may be employed include purified PRO, fusion proteins containing PRO, and cells expressing recombinant PRO on the cell surface. Selection of the immunogen can be made by the skilled artisan without undue experimentation.

[0365] Mice, such as Balb/c, are immunized with the PRO immunogen emulsified in complete Freund's adjuvant and injected subcutaneously or intraperitoneally in an amount from 1-100 micrograms. Alternatively, the immunogen is emulsified in MPL-TDM adjuvant (Ribi Immunochemical Research, Hamilton, Mont.) and injected into the animal's hind foot pads. The immunized mice are then boosted 10 to 12 days later with additional immunogen emulsified in the selected adjuvant. Thereafter, for several weeks, the mice may also be boosted with additional immunization injections. Serum samples may be periodically obtained from the mice by retro-orbital bleeding for testing in ELISA assays to detect anti-PRO antibodies.

[0366] After a suitable antibody titer has been detected, the animals “positive” for antibodies can be injected with a final intravenous injection of PRO. Three to four days later, the mice are sacrificed and the spleen cells are harvested. The spleen cells are then fused (using 35% polyethylene glycol) to a selected murine myeloma cell line such as P3X63AgU.1, available from ATCC, No. CRL 1597. The fusions generate hybridoma cells which can then be plated in 96 well tissue culture plates containing HAT (hypoxanthine, aminopterin, and thymidine) medium to inhibit proliferation of non-fused cells, myeloma hybrids, and spleen cell hybrids.

[0367] The hybridoma cells will be screened in an ELISA for reactivity against PRO. Determination of “positive” hybridoma cells secreting the desired monoclonal antibodies against PRO is within the skill in the art.

[0368] The positive hybridoma cells can be injected intraperitoneally into syngeneic Balb/c mice to produce ascites containing the anti-PRO monoclonal antibodies. Alternatively, the hybridoma cells can be grown in tissue culture flasks or roller bottles. Purification of the monoclonal antibodies produced in the ascites can be accomplished using ammonium sulfate precipitation, followed by gel exclusion chromatography. Alternatively, affinity chromatography based upon binding of antibody to protein A or protein G can be employed.

### Example 8

### Purification of PRO Polypeptides Using Specific Antibodies

[0369] Native or recombinant PRO polypeptides may be purified by a variety of standard techniques in the art of protein purification. For example, pro-PRO polypeptide, mature PRO polypeptide, or pre-PRO polypeptide is purified by immunoaffinity chromatography using antibodies specific for the PRO polypeptide of interest. In general, an immunoaffinity column is constructed by covalently coupling the anti-PRO polypeptide antibody to an activated chromatographic resin.

[0370] Polyclonal immunoglobulins are prepared from immune sera either by precipitation with ammonium sulfate or by purification on immobilized Protein A (Pharmacia LKB Biotechnology, Piscataway, N.J.). Likewise, monoclonal antibodies are prepared from mouse ascites fluid by ammonium sulfate precipitation or chromatography on immobilized Protein A. Partially purified immunoglobulin is covalently attached to a chromatographic resin such as CnBr-activated SEPHAROSE™ (Pharmacia LKB Biotechnology). The antibody is coupled to the resin, the resin is blocked, and the derivative resin is washed according to the manufacturer's instructions.

[0371] Such an immunoaffinity column is utilized in the purification of PRO polypeptide by preparing a fraction from cells containing PRO polypeptide in a soluble form. This preparation is derived by solubilization of the whole cell or of a subcellular fraction obtained via differential centrifugation by the addition of detergent or by other methods well known in the art. Alternatively, soluble PRO polypeptide containing a signal sequence may be secreted in useful quantity into the medium in which the cells are grown.

[0372] A soluble PRO polypeptide-containing preparation is passed over the immunoaffinity column, and the column is washed under conditions that allow the preferential absorbance of PRO polypeptide (e.g., high ionic strength buffers in the presence of detergent). Then, the column is eluted under conditions that disrupt antibody/PRO polypeptide binding (e.g., a low pH buffer such as approximately pH 2-3, or a high concentration of a chaotrope such as urea or thiocyanate ion), and PRO polypeptide is collected.

### Example 9

### Drug Screening

[0373] This invention is particularly useful for screening compounds by using PRO polypeptides or binding fragment thereof in any of a variety of drug screening techniques. The PRO polypeptide or fragment employed in such a test may either be free in solution, affixed to a solid support, borne on a cell surface, or located intracellularly. One method of drug screening utilizes eukaryotic or prokaryotic host cells which are stably transformed with recombinant nucleic acids expressing the PRO polypeptide or fragment. Drugs are screened against such transformed cells in competitive binding assays. Such cells, either in viable or fixed form, can be used for standard binding assays. One may measure, for example, the formation of complexes between PRO polypeptide or a fragment and the agent being tested. Alternatively, one can examine the diminution in complex formation between the PRO polypeptide and its target cell or target receptors caused by the agent being tested.

[0374] Thus, the present invention provides methods of screening for drugs or any other agents which can affect a PRO polypeptide-associated disease or disorder. These methods comprise contacting such an agent with an PRO polypeptide or fragment thereof and assaying (I) for the presence of a complex between the agent and the PRO polypeptide or fragment, or (ii) for the presence of a complex between the PRO polypeptide or fragment and the cell, by methods well known in the art. In such competitive binding assays, the PRO polypeptide or fragment is typically labeled. After suitable incubation, free PRO polypeptide or fragment is separated from that present in bound form, and the amount of free or uncomplexed label is a measure of the ability of the particular agent to bind to PRO polypeptide or to interfere with the PRO polypeptide/cell complex.

[0375] Another technique for drug screening provides high throughput screening for compounds having suitable binding affinity to a polypeptide and is described in detail in WO 84/03564, published on Sep. 13, 1984. Briefly stated, large numbers of different small peptide test compounds are synthesized on a solid substrate, such as plastic pins or some other surface. As applied to a PRO polypeptide, the peptide test compounds are reacted with PRO polypeptide and washed. Bound PRO polypeptide is detected by methods well known in the art. Purified PRO polypeptide can also be coated directly onto plates for use in the aforementioned drug screening techniques. In addition, non-neutralizing antibodies can be used to capture the peptide and immobilize it on the solid support.

[0376] This invention also contemplates the use of competitive drug screening assays in which neutralizing antibodies capable of binding PRO polypeptide specifically compete with a test compound for binding to PRO polypeptide or fragments thereof. In this manner, the antibodies can be used to detect the presence of any peptide which shares one or more antigenic determinants with PRO polypeptide.

### Example 10

### Rational Drug Design

[0377] The goal of rational drug design is to produce structural analogs of biologically active polypeptide of interest (i.e., a PRO polypeptide) or of small molecules with which they interact, e.g., agonists, antagonists, or inhibitors. Any of these examples can be used to fashion drugs which are more active or stable forms of the PRO polypeptide or which enhance or interfere with the function of the PRO polypeptide in vivo (c.f., Hodgson, Bio/Technology, 9: 19-21 (1991)).

[0378] In one approach, the three-dimensional structure of the PRO polypeptide, or of a PRO polypeptide-inhibitor complex, is determined by x-ray crystallography, by computer modeling or, most typically, by a combination of the two approaches. Both the shape and charges of the PRO polypeptide must be ascertained to elucidate the structure and to determine active site(s) of the molecule. Less often, useful information regarding the structure of the PRO polypeptide may be gained by modeling based on the structure of homologous proteins. In both cases, relevant structural information is used to design analogous PRO polypeptide-like molecules or to identify efficient inhibitors. Useful examples of rational drug design may include molecules which have improved activity or stability as shown by Braxton and Wells, Biochemistry, 31:7796-7801 (1992) or which act as inhibitors, agonists, or antagonists of native peptides as shown by Athauda et al., J. Biochem., 113:742-746 (1993).

[0379] It is also possible to isolate a target-specific antibody, selected by functional assay, as described above, and then to solve its crystal structure. This approach, in principle, yields a pharmacore upon which subsequent drug design can be based. It is possible to bypass protein crystallography altogether by generating anti-idiotypic antibodies (anti-ids) to a functional, pharmacologically active antibody. As a mirror image of a mirror image, the binding site of the anti-ids would be expected to be an analog of the original receptor. The anti-id could then be used to identify and isolate peptides from banks of chemically or biologically produced peptides. The isolated peptides would then act as the pharmacore.

[0380] By virtue of the present invention, sufficient amounts of the PRO polypeptide may be made available to perform such analytical studies as X-ray crystallography. In addition, knowledge of the PRO polypeptide amino acid sequence provided herein will provide guidance to those employing computer modeling techniques in place of or in addition to x-ray crystallography.

[0381] The foregoing written specification is considered to be sufficient to enable one skilled in the art to practice the invention. The present invention is not to be limited in scope by the construct deposited, since the deposited embodiment is intended as a single illustration of certain aspects of the invention and any constructs that are functionally equivalent are within the scope of this invention. The deposit of material herein does not constitute an admission that the written description herein contained is inadequate to enable the practice of any aspect of the invention, including the best mode thereof, nor is it to be construed as limiting the scope of the claims to the specific illustrations that it represents. Indeed, various modifications of the invention in addition to those shown and described herein will become apparent to those skilled in the art from the foregoing description and fall within the scope of the appended claims.

1-19. (canceled)

20. A method of diagnosing an immune related disease or disorder in a mammal, said method comprising detecting the level of expression of a gene encoding a PRO polypeptide of the invention as described in any one of SEQ ID NOs 1-6464, (a) in a test sample of tissue cells obtained from the mammal, and (b) in a control sample of known normal tissue cells of the same cell type, wherein a differential expression of said gene in the test sample as compared to the control sample is indicative of the presence of an immune related disease or disorder in the mammal from which the test tissue cells were obtained.

21. The method of claim 20 wherein the immune related disease or disorder is a T cell mediated immune disease.

22. The method of claim 20, wherein the immune related disease or disorder is systemic lupus erythematosis, rheumatoid arthritis. osteoarthritis, juvenile chronic arthritis, a spondyloarthropathy, systemic sclerosis, an idiopathic inflammatory myopathy, Sjogren's syndrome, systemic vasculitis, sarcoidosis, autoimmune hemolytic anemia, autoimmune thrombocytopenia. thyroiditis, diabetes mellitus, immune mediated renal disease, a demyelinating disease of the central or peripheral nervous system, idiopathic demyelinating polyneuropathy, Guillain-Barre syndrome, a chronic inflammatory demyelinating polyneuropathy, a hepatobiliary disease, infectious or autoimmune chronic active hepatitis, primary biliary cirrhosis, granulomatous hepatitis, sclerosing; cholangitis, inflammatory bowel disease, gluten-sensitive enteropathy, Whipple's disease, an autoimmune or immune-mediated skin disease, a bullous skin disease, erythema multiforme, contact dermatitis, psoriasis, an allergic disease. asthma. allergic rhinitis, atopic dermatitis, food hypersensitivity, urticaria. an immunologic disease of the lung, eosinophilic pneumonias, idiopathic pulmonary fibrosis, hypersensitivity pneumonitis, a transplantation associated disease, graft rejection or graft-versus-host-disease.

23. The method of claim 20 wherein the nucleic acid levels are determined by hybridization of nucleic acid obtained from the test and normal biological samples to one or more probes specific for the nucleic acid encoding a PRO polypeptide of the invention as described in any one of SEQ ID NOs 1-6464.

24. The method of claim 23 wherein hybridization is performed under stringent conditions.

25. The method of claim 24 wherein said stringent conditions use 50% formamide, 5×SSC, 50 mM sodium phosphate (pH 6.8), 0.1% sodium pyrophosphate, 5×Denhardt's solution, sonicated salmon sperm DNA (50 μg/ml), 0.1% SDS, and 10% dextran sulfate at 42° C., with washes at 42° C. in 0.2×SSC and 50% formamide at 55° C., followed by a wash comprising of 0.1×SSC containing EDTA at 55° C.

26. The method of claim 20 wherein the nucleic acids obtained from the test and normal biological samples are mRNAs.

27. The method of claim 20 wherein the nucleic acids obtained from the test and normal biological samples are placed on microarrays.

28. A method of diagnosing an immune related disease or disorder in a mammal, said method comprising determining the expression level of a PRO polypeptide of the invention as described in any one of SEQ ID NOs 1-6464 in test biological sample relative to a normal biological sample, wherein a differential expression of said polypeptide in the test biological sample is indicative of the presence of an immune related disease or disorder in the mammal from which the test tissue cells were obtained.

29. The method of claim 28 wherein the immune related disease or disorder is a T cell mediated immune disease.

30. The method of claim 28, wherein the immune related disease or disorder is systemic lupus erythematosis, rheumatoid arthritis. osteoarthritis, juvenile chronic arthritis, a spondyloarthropathy, systemic sclerosis, an idiopathic inflammatory myopathy, Sjogren's syndrome, systemic vasculitis, sarcoidosis, autoimmune hemolytic anemia, autoimmune thrombocytopenia. thyroiditis, diabetes mellitus, immune mediated renal disease, a demyelinating disease of the central or peripheral nervous system, idiopathic demyelinating polyneuropathy, Guillain-Barre syndrome, a chronic inflammatory demyelinating polyneuropathy, a hepatobiliary disease, infectious or autoimmune chronic active hepatitis, primary biliary cirrhosis, granulomatous hepatitis, sclerosing; cholangitis, inflammatory bowel disease, gluten-sensitive enteropathy, Whipple's disease, an autoimmune or immune-mediated skin disease, a bullous skin disease, erythema multiforme, contact dermatitis, psoriasis, an allergic disease. asthma. allergic rhinitis, atopic dermatitis, food hypersensitivity, urticaria. an immunologic disease of the lung, eosinophilic pneumonias, idiopathic pulmonary fibrosis, hypersensitivity pneumonitis, a transplantation associated disease, graft rejection or graft-versus-host-disease.

31. The method of claim 28 wherein overexpression is detected with an antibody that specifically binds to a PRO polypeptide of the invention as described in any one of SEQ ID NOs 1-6464.

32. The method of claim 31 wherein said antibody is a monoclonal antibody.

33. The method of claim 31 wherein said antibody is a humanized antibody.

34. The method of claim 31 wherein said antibody is an antibody fragment.

35. The method of claim 31 wherein said antibody is labeled.

36. A method of diagnosing an inflammatory immune response in a mammal, said method comprising detecting the level of expression of a gene encoding a PRO polypeptide of the invention as described in any one of SEQ ID NOs 1-6464, (a) in a test sample of tissue cells obtained from the mammal, and (b) in a control sample of known normal tissue cells of the same cell type, wherein a differential expression of said gene in the test sample as compared to the control sample is indicative of the presence of an inflammatory immune response in the mammal from which the test tissue cells were obtained.

37. The method of claim 36 wherein the inflammatory immune response is a T cell mediated immune response.

38. A method of diagnosing an inflammatory immune response in a mammal, said method comprising determining the expression level of a PRO polypeptide of the invention as described in any one of SEQ ID NOs 1-6464 in test biological sample relative to a normal biological sample, wherein a differential expression of said polypeptide in the test biological sample is indicative of the presence of an inflammatory immune response in the mammal from which the test tissue cells were obtained.

39. The method of claim 38 wherein the inflammatory immune response is a T cell mediated immune response.

40. The method of claim 38 wherein overexpression is detected with an antibody that specifically binds to a PRO polypeptide of the invention as described in any one of SEQ ID NOs 1-6464.

The application's sequence listing, which the Patent Office published only in electronic form, follows.

SEQUENCE LISTING (6464 sequences)

SEQ ID NO: 1 - DNA, 562 bp, Homo sapien
gccggaaccgccatcttccagtaattcgccaaaatgacgaacacaaagggaaagaggagaggcacccgatatatgttctctaggccttttagaaaacatggagttgttcctttggccacatatatgcgaatctataagaaaggtgatattgtagacatcaagggaatgggtactgttcaaaaaggaatgccccacaagtgttaccatggcaaaactggaagagtctacaatgttacccagcatgctgctggcattgttgtaaacgaacaagttaagggcaagattcttgccaagagaattaatgtgcgtattgagcacattaagcactctaagagccgagataacttcctgaaacgtgtgaaggragatgatcaggaaaagraagaagcccaagagaaaggtacctgggttcaactaaagcgccamcctgctccacccagagaagcacactttgtgagaaccaatgggaaggagcctgagctgctggaacctattccctatgaattcatggcataataggtgttaaaaaaaaaataaaggacctctgggctaccaaaaaaaa

SEQ ID NO: 2 - protein, 160 aa, Homo sapien
  unsure 111, 117, 131: unknown amino acid
MTNTKGKRRGTRYMFSRPFRKHGVVPLATYMRIYKKGDIVDIKGMGTVQKGMPHKCYHGKTGRVYNVTQHAAGIVVNEQVKGKILAKRINVRIEHIKHSKSRDNFLKRVKXDDQEKXEAQEKGTWVQLKRXPAPPREAHFVRTNGKEPELLEPIPYEFMA

SEQ ID NO: 3 - DNA, 2714 bp, Homo sapien
ccgacatgttgagtcataagacgcgtcggtgttgcagtctgtgtccttggaggtgaccagggccactgcaggcatggtgctagcagagctgtacgtctctgaccgagagggaagcgatgccacgggagatggaaccaaggagaaaccatttaaaacaggtctaaaggctttgatgacagtagggaaagaaccatttcctaccatttacgtagattcacaaaaagaaaatgagaggtggaatgttatttctaaatcacagttgaagaacattaaaaagatgtggcatagggaacaaatgaagagtgaatcccgggaaaagaaagaggcagaagatagtttacgaagagaaaagaacctggaagaagcaaagaagattaccattaaaaatgatccaagtctcccagagccaaaatgtgtgaagattggtgcgttagaaggatatagaggccaaagagtaaaggtgtttggctgggtccacaggctgcgcaggcaaggaaagaatttaatgtttctggtgttgcgagatggtacaggttatcttcagtgtgtcttggcggatgagttgtgtcagtgctacaatggagttctcttgtccacggagagcagtgttgcagtgtatggaatgctaaatcttaccccaaagggcaagcaggctccaggtggccatgagctgagttgtgacttctgggaactaattgggttggcccctgctggaggagctgacaacctgatcaatgaggagtctgacgttgatgtccagctcaacaacagacacatgatgatccgaggagaaaacatgtccaaaatcctaaaagcacgatccatggtcaccaggtgctttagagatcacttctttgatagggggtactatgaagttactcctccaacattagtgcaaacacaagtagaaggtggtgccacactcttcaagcttgactattttggggaagaggcatttttgactcaatcctctcagttgtacttggagacctgcctcccagccctgggagatgttttttgtattgctcagtcataccgggcagagcagtccagaacacgaaggcacctggctgagtacactcacgtggaagctgagtgtcctttcctgacttttgacgacctcctgaaccggttggaggacttggtttgtgatgtggtagatcgaatattgaagtcacctgcagggagcatagtgcatgagctcaacccgaactttcagccccccaaacggcctttcaaacggatgaactattcagatgctatcgtttggctaaaagaacatgatgtaaagaaagaagatggaactttctatgaatttggagaagatatcccagaagctcctgagagactgatgacagacaccattaatgaaccaatcttgctgtgtcgatttcctgtggagatcaagtccttctacatgcagcgatgtcctgaggattcccgtcttactgaatctgtcgacgtgttgatgcccaatgttggtgagattgtgggaggctcaatgcgtatctttgatagtgaagaaatactggcaggttataaaagggaagggattgaccccactccctattactggtatacggatcagagaaaatacggtacatgtccccatggaggatatggcttgggcttggaacgattcttaacgtggattctgaataggtatcacatccgagacgtgtgcttataccctcgatttgtccagcgttgcacgccataaccattttctccagaagcgtggaggaaagattatgaaaggaacaggctctttaaaaaagaaaacaaaaagccagaatcttccttttttttgtttcattggggtttctctttctgtttttctttctactaccataaaaactatctcaaatcacctgaacatcaagtgatattaaggttgtcatcttaagaaaaaatatccatttttttcttaagttcgggaaacaaagttcggggaaaatacctggcatgaaactgtagttagggatacatttcagcattttactcactttatccaagttattcattttattcaagttatatgtatgtataattcaacaattttagattatggtgtaagatactccagtaacttatctttctgtccttttaagtgtacctggaattctttgatttattttattgcatcaatgaattaaaacaaaaatcttgggggaagaaattggcaatatcgtataaaaatctgctcatattagaacacagtataattcagcagtaaacactagaatcaaatgaatagccttttgtatcagttattaatcttttctaactctgcttagctgctaataatcctgaggcatagaaattgaagaatttgtaaaaatagaattgccttaaaggatttgaagtaagaacataattttggggagagttttttagtgattcacagtatccctcttagcattaatttaaggtaaagaggcagattgattttccctctttcctggtaattcctaagtaattaagaataaataagttccaaaagaaattgtagctggaatcttaataacaattgtgagtggctgtttgagttgcccccaccatgtccttagatctaatctgtgctaccttattaactcacagcaggcttactgaatggcttcatttcagatttagttgatttctccaccaaatgcatgtcatgtattctcaataggctgtattcccagcagtcaataaatgaacacccgtaaaaa

SEQ ID NO: 4 - protein, 548 aa, Homo sapien
MVLAELYVSDREGSDATGDGTKEKPFKTGLKALMTVGKEPFPTIYVDSQKENERWNVISKSQLKNIKKMWHREQMKSESREKKEAEDSLRREKNLEEAKKITIKNDPSLPEPKCVKIGALEGYRGQRVKVFGWVHRLRRQGKNLMFLVLRDGTGYLQCVLADELCQCYNGVLLSTESSVAVYGMLNLTPKGKQAPGGHELSCDFWELIGLAPAGGADNLINEESDVDVQLNNRHMMIRGENMSKILKARSMVTRCFRDHFFDRGYYEVTPPTLVQTQVEGGATLFKLDYFGEEAFLTQSSQLYLETCLPALGDVFCIAQSYRAEQSRTRRHLAEYTHVEAECPFLTFDDLLNRLEDLVCDVVDRILKSPAGSIVHELNPNFQPPKRPFKRMNYSDAIVWLKEHDVKKEDGTFYEFGEDIPEAPERLMTDTINEPILLCRFPVEIKSFYMQRCPEDSRLTESVDVLMPNVGEIVGGSMRIFDSEEILAGYKREGIDPTPYYWYTDQRKYGTCPHGGYGLGLERFLTWILNRYHIRDVCLYPRFVQRCTP

SEQ ID NO: 5 - DNA, 698 bp, Homo sapien
ctttcctttcgctgctgcggccgcagccatgagtatgctcaggcttcagaagaggctcgcctctagtgtcctccgctgtggcaagaagaaggtctggttagaccccaatgagaccaatgaaatcgccaatgccaactcccgtcagcagatccggaagctcatcaaagatgggctgatcatccgcaagcctgtgacggtccattcccgggctcgatgccggaaaaacaccttggcccgccggaagggcaggcacatgggcataggtaagcggaagggtacagccaatgcccgaatgccagagaaggtcacatggatgaggagaatgaggattttgcgccggctgctcagaagataccgtgaatctaagaagatcgatcgccacatgtatcacagcctgtacctgaaggtgaaggggaatgtgttcaaaaacaagcggattctcatggaacacatccacaagctgaaggcagacaaggcccgcaagaagctcctggctgaccaggctgaggcccgcaggtctaagaccaaggaagcacgcaagcgccgtgaagagcgcctccaggccaagaaggaggagatcatcaagactttatccaaggaggaagagaccaagaaataaaacctcccactttgtctgtacatactggcctctgtgattacatagatcagccattaaaataaaacaagccttaatctgc

SEQ ID NO: 6 - protein, 196 aa, Homo sapien [sequence omitted]

SEQ ID NO: 7 - DNA, 1200 bp, Homo sapien
gcccgaccgctttccgggagactggagtcgaaggccgtgaggtatttttctaagtcagccataatggcaggtgaagaaattaatgaagactatccagtagaaattcacgagtatttgtcagcgtttgagaattccattggtgctgtggatgagatgctgaagaccatgatgtctgtttctagaaatgagttgttgcagaagttggatccacttgaacaagcaaaagtggatttggtttctgcatacacattaaattcaatgttttgggtttatttggcaacccaaggagttaatcctaaggaacatccagtaaaacaggaattggaaagaatcagagtatatatgaacagagtcaaggaaataacagacaagaaaaaggctggcaagctggacagaggtgcagcttcaagatttgtaaaaaatgccctctgggaaccaaaatcgaaaaatgcatcaaaagttgccaataaaggaaaaagtaaaagttaactttttggttttgatgtacacatattcaaaaagtacatcttcccccccccccccccccccgcaaaataattctgtggcagggcaaggtttaaatgtgtttcttattaatatgtaaattcacagtaaatatgtaaagctaaatactttcctctccaaagatcattatctttattgattagcactgaggattttaacattgtgatatattatatatttataatttaccatctcttgatgagactcttatttctttatataggtcagtcttgcaagtaccattttataagcagctgtgaaatttaagtgaaatgttctttgtaaacatttgtactattttaaatgaataatgaccttatgaagtatgctatctgtaggctgaaattataggtacatctgttttcactatatgatattaagaaagcgtgaaatgacttaaatgttcatttttttctgtatagatactttatcatgttttcatgattttaggaattactgctttgttgatattcaaagtgtgaaactaaaactttatggttgtactttaattcttggcatgttgcctctatgtcccatttaaaataaaatacattctcattaactttagatgggaaataaggttgtatgttgatggatgaattttggcatgatgactgtactctcaataaaggctgaaaatgttgtataaaaaaaaaaaaaaaaaaaaaaaaaaaa

SEQ ID NO: 8 - protein, 141 aa, Homo sapien
MAGEEINEDYPVEIHEYLSAFENSIGAVDEMLKTMMSVSRNELLQKLDPLEQAKVDLVSAYTLNSMFWVYLATQGVNPKEHPVKQELERIRVYMNRVKEITDKKKAGKLDRGAASRFVKNALWEPKSKNASKVANKGKSKS

SEQ ID NO: 9 - DNA, 2567 bp, Homo sapien
ctccggcgcagtgttgggactgtctgggtatcggaaagcaagcctacgttgctcactattacgtataatccttttcttttcaagatgcctgaggaagtgcaccatggagaggaggaggtggagacttttgcctttcaggcagaaattgcccaactcatgtccctcatcatcaataccttctattccaacaaggagattttccttcgggagttgatctctaatgcttctgatgccttggacaagattcgctatgagagcctgacagacccttcgaagttggacagtggtaaagagctgaaaattgacatcatccccaaccctcaggaacgtaccctgactttggtagacacaggcattggcatgaccaaagctgatctcataaataatttgggaaccattgccaagtctggtactaaagcattcatggaggctcttcaggctggtgcagacatctccatgattgggcagtttggtgttggcttttattctgcctacttggtggcagagaaagtggttgtgatcacaaagcacaacgatgatgaacagtatgcttgggagtcttctgctggaggttccttcactgtgcgtgctgaccatggtgagcccattggcaggggtaccaaagtgatcctccatcttaaagaagatcagacagagtacctagaagagaggcgggtcaaagaagtagtgaagaagcattctcagttcataggctatcccatcaccctttatttggagaaggaacgagagaaggaaattagtgatgatgaggcagaggaagagaaaggtgagaaagaagaggaagataaagatgatgaagaaaaacccaagatcgaagatgtgggttcagatgaggaggatgacagcggtaaggataagaagaagaaaactaagaagatcaaagagaaatacattgatcaggaagaactaaacaagaccaagcctatttggaccagaaaccctgatgacatcacccaagaggagtatggagaattctacaagagcctcactaatgactgggaagaccacttggcagtcaagcacttttctgtagaaggtcagttggaattcagggcattgctatttattcctcgtcgggctccctttgacctttttgagaacaagaagaaaaagaacaacatcaaactctatgtccgccgtgtgttcatcatggacagctgtgatgagttgataccagagtatctcaattttatccgtggtgtggttgactctgaggatctgcccctgaacatctcccgagaaatgctccagcagagcaaaatcttgaaagtcattcgcaaaaacattgttaagaagtgccttgagctcttctctgagctggcagaagacaaggagaattacaagaaattctatgaggcattctctaaaaatctcaagcttggaatccacgaagactccactaaccgccgccgcctgtctgagctgctgcgctatcatacctcccagtctggagatgagatgacatctctgtcagagtatgtttctcgcatgaaggagacacagaagtccatctattacatcactggtgagagcaaagagcaggtggccaactcagcttttgtggagcgagtgcggaaacggggcttcgaggtggtatatatgaccgagcccattgacgagtactgtgtgcagcagctcaaggaatttgatgggaagagcctggtctcagttaccaaggagggtctggagctgcctgaggatgaggaggagaagaagaagatggaagagagcaaggcaaagtttgagaacctctgcaagctcatgaaagaaatcttagataagaaggttgagaaggtgacaatctccaatagacttgtgtcttcaccttgctgcattgtgaccagcacctacggctggacagccaatatggagcggatcatgaaagcccaggcacttcgggacaactccaccatgggctatatgatggccaaaaagcacctggagatcaaccctgaccaccccattgtggagacgctgcggcagaaggctgaggccgacaagaatgataaggcagttaaggacctggtggtgctgctgtttgaaaccgccctgctatcttctggcttttcccttgaggatccccagacccactccaaccgcatctatcgcatgatcaagctaggtctaggtattgatgaagatgaagtggcagcagaggaacccaatgctgcagttcctgatgagatcccccctctcgagggcgatgaggatgcgtctcgcatggaagaagtcgattaggttaggagttcatagttggaaaacttgtgcccttgtatagtgtccccatgggctcccactgcagcctcgagtgcccctgtcccacctggctccccctgctggtgtctagtgtttttttccctctcctgtccttgtgttgaaggcagtaaactaagggtgtcaagccccattccctctctactcttgacagcaggattggatgttgtgtattgtggtttattttattttcttcattttgttctgaaattaaagtatgcaaaataaagaatatgccgttttaaaaaaaaaaaaaaaaaaaaaaaaaaaaa

SEQ ID NO: 10 - protein, 724 aa, Homo sapien
MPEEVHHGEEEVETFAFQAEIAQLMSLIINTFYSNKEIFLRELISNASDALDKIRYESLTDPSKLDSGKELKIDIIPNPQERTLTLVDTGIGMTKADLINNLGTIAKSGTKAFMEALQAGADISMIGQFGVGFYSAYLVAEKVVVITKHNDDEQYAWESSAGGSFTVRADHGEPIGRGTKVILHLKEDQTEYLEERRVKEVVKKHSQFIGYPITLYLEKEREKEISDDEAEEEKGEKEEEDKDDEEKPKIEDVGSDEEDDSGKDKKKKTKKIKEKYIDQEELNKTKPIWTRNPDDITQEEYGEFYKSLTNDWEDHLAVKHFSVEGQLEFRALLFIPRRAPFDLFENKKKKNNIKLYVRRVFIMDSCDELIPEYLNFIRGVVDSEDLPLNISREMLQQSKILKVIRKNIVKKCLELFSELAEDKENYKKFYEAFSKNLKLGIHEDSTNRRRLSELLRYHTSQSGDEMTSLSEYVSRMKETQKSIYYITGESKEQVANSAFVERVRKRGFEVVYMTEPIDEYCVQQLKEFDGKSLVSVTKEGLELPEDEEEKKKMEESKAKFENLCKLMKEILDKKVEKVTISNRLVSSPCCIVTSTYGWTANMERIMKAQALRDNSTMGYMMAKKHLEINPDHPIVETLRQKAEADKNDKAVKDLVVLLFETALLSSGFSLEDPQTHSNRIYRMIKLGLGIDEDEVAAEEPNAAVPDEIPPLEGDEDASRMEEVD

SEQ ID NO: 11 - DNA, 632 bp, Homo sapien
ctctcggctttcggctcggaggaggccaaggtgcaacttccttcggtcgtcccgaatccgggttcatccgacaccagccgcctccaccatgccgccgaagttcgaccccaacgagatcaaagtcgtatacctgaggtgcaccggaggtgaagtcggtgccacttctgccctggcccccaagatcggccccctgggtctgtctccaaaaaaagttggtgatgacattgccaaggcaacgggtgactggaagggcctgaggattacagtgaaactgaccattcagaacagacaggcccagattgaggtggtgccttctgcctctgccctgatcatcaaagccctcaaggaaccaccaagagacagaaagaaacagaaaaacattaaacacagtgggaatatcacttttgatgagattgtcaacattgctcgacagatgcggcaccgatccttagccagagaactctctggaaccattaaagagatcctggggactgcccagtcagtgggctgtaatgttgatggccgccatcctcatgacatcatcgatgacatcaacagtggtgctgtggaatgcccagccagttaagcacaaaggaaaacatttcaataaaggatcatttgacaactggtga

SEQ ID NO: 12 - protein, 165 aa, Homo sapien [sequence omitted]

SEQ ID NO: 13 - DNA, 3301 bp, Homo sapien
aggagccaggaagagagctgtgaccagcagcgtcccttattcgcttggccttggttcctgtttgcactggctacagcagggcactggcccctactgtcaccgccacctacacaaagaccctatctctgagcgctgcagcctactgttcagccccaggtttgaggatggatgccctggacgcttcgaagctactggatgaggagctgtattcaagacagctgtatgtgctgggctcacctgccatgcagaggattcagggagccagggtcctggtgtcaggcctgcagggcctgggggccgaggtggccaagaacttggttctgatgggtgtgggcagcctcactctgcatgatccccaccccacctgctggtccgacctggctgcccagtttctcctctcagagcaggacttggaaaggagcagagccgaggcctctcaagagctcttggctcagctcaacagagctgtccaggtcgtcgtgcacacgggtgacatcactgaggacctgctgttggacttccaggtggtggtgctgactgctgcaaagctggaggagcagctgaaggtgggcaccttgtgtcataagcatggagtttgctttctggcggctgacacccggggcctcgtggggcagttgttctgtgactttggtgaggacttcactgtgcaggaccccacagaggcagaacccctgacagctgccatccagcacatctcccagggctcccctggcattctcactctgaggaaaggggccaatacccactacttccgtgatggagacttggtgactttctcgggaattgagggaatggttgagctcaacgactgtgatccccggtctatccacgtgcgggaggatgggtccctggagattggagacacaacaactttctctcggtacttgcgtggtggggctatcactgaagtcaagagacccaagactgtgagacataagtccctggacacagccctgctccagccccatgtggtggcccagagctcccaggaagttcaccatgcccactgcctgcatcaggccttctgtgcactgcacaagttccagcacctccatggccggccaccccagccctgggatcctgttgatgcagagactgtggtgggcctggcccgggacctggaaccactgaagcggacagaggaagagccactggaagagccactggatgaggccctagtgcggacagtcgccctaagcagtgcaaggtgtcttgagcctatggtggcatgctgggtcagtagctgcccaggaagtgctgaaggcaatctccagaagttcatgcctctggaccagtggctttactttgatgccctcgattgtcttccggaagatggggagctccttcccagtcctgaggactgtgccctgagaggcagccgctatgatgggcaaattgcagtgtttggggctggttttcaggagaaactgagacgccagcactacctcctggtgggcgctggtgccattggttgtgagctgctcaaagtctttgccctagtgggactgggggccgggaacagcgggggcttgactgttgttgacatggaccacatagagcgctccaatctcagccgtcagttcctcttcaggtcccaggacgttggtagacccaaggcagaggtggctgcagcagctgcccggggcctgaacccagacttacaggtgatcccgctcacctacccactggatcccaccacagagcacatctatggggataactttttctcccgtgtggatggtgtggctgctgccctggacagtttccaggcccggcgctatgtggctgctcgttgcacccactatctgaagccactgctggaggcaggcacatcgggcacctggggcagtgctacagtattcatgccacatgtgactgaggcctacagagcccctgcctcagctgcagcttctgaggatgccccctaccctgtctgtaccgtgcggtacttccctagcacagccgagcacaccctgcagtgggcccggcatgagtttgaagaactcttccgactgtctgcagagaccatcaaccaccaccaacaggcacacacctccctggcagacatggatgagccacagacactcaccttactgaagccagtgcttggggtcctgagagtgcgtccacagaactggcaagactgtgtggcgtgggctcttggccactggaaactctgctttcattatggcatcaaacagctgctgaggcacttcccacctaataaagtgcttgaggatggaactcccttctggtcaggtcccaaacagtgtccccagcccttggagtttgacaccaaccaagacacacacctcctctacgtactggcagctgccaacctgtatgcccagatgcatgggctgcctggctcacaggactggactgcactcagggagctgctgaagctgctgccacagcctgacccccaacagatggcccccatctttgctagtaatctagagctggcttcggcttctgctgagtttggccctgagcagcagaaggaactgaacaaagccctggaagtctggagtgtgggccctcccctgaagcctctgatgtttgagaaggatgatgacagcaacttccatgtggactttgtggtagcggcagctagcctgagatgtcagaactacgggattccaccggtcaaccgtgcccagagcaagcgaattgtgggccagattatcccagccattgccaccactacagcagctgtggcaggcctgttgggcctggagctgtataaggtggtgagtgggccacggcctcgtagtgcctttcgccacagctacctacatctggctgaaaactacctcatccgctatatgccttttgccccagccatccagacgttccatcacctgaagtggacctcttgggaccgtctgaaggtaccagctgggcagcctgagaggaccctggagtcgctgctggctcatcttcaggagcagcacgggttgagggtgaggatcctgctgcacggctcagccctgctctatgcggccggatggtcacctgaaaagcaggcccagcacctgcccctcagggtgacagaactggttcagcagctgacaggccaggcacctgctcctgggcagcgggtgttggtgctagagctgagctgtgagggtgacgacgaggacactgccttcccacctctgcactatgagctgtgacaaggcagccaccctgtcacctagctcaatggagccccggatcccaagccctgcattgtaagcccacagtaggcactcaataattgcttgttaaaggaagg

SEQ ID NO: 14 - protein, 1011 aa, Homo sapien
MDALDASKLLDEELYSRQLYVLGSPAMQRIQGARVLVSGLQGLGAEVAKNLVLMGVGSLTLHDPHPTCWSDLAAQFLLSEQDLERSRAEASQELLAQLNRAVQVVVHTGDITEDLLLDFQVVVLTAAKLEEQLKVGTLCHKHGVCFLAADTRGLVGQLFCDFGEDFTVQDPTEAEPLTAAIQHISQGSPGILTLRKGANTHYFRDGDLVTFSGIEGMVELNDCDPRSIHVREDGSLEIGDTTTFSRYLRGGAITEVKRPKTVRHKSLDTALLQPHVVAQSSQEVHHAHCLHQAFCALHKFQHLHGRPPQPWDPVDAETVVGLARDLEPLKRTEEEPLEEPLDEALVRTVALSSARCLEPMVACWVSSCPGSAEGNLQKFMPLDQWLYFDALDCLPEDGELLPSPEDCALRGSRYDGQIAVFGAGFQEKLRRQHYLLVGAGAIGCELLKVFALVGLGAGNSGGLTVVDMDHIERSNLSRQFLFRSQDVGRPKAEVAAAAARGLNPDLQVIPLTYPLDPTTEHIYGDNFFSRVDGVAAALDSFQARRYVAARCTHYLKPLLEAGTSGTWGSATVFMPHVTEAYRAPASAAASEDAPYPVCTVRYFPSTAEHTLQWARHEFEELFRLSAETINHHQQAHTSLADMDEPQTLTLLKPVLGVLRVRPQNWQDCVAWALGHWKLCFHYGIKQLLRHFPPNKVLEDGTPFWSGPKQCPQPLEFDTNQDTHLLYVLAAANLYAQMHGLPGSQDWTALRELLKLLPQPDPQQMAPIFASNLELASASAEFGPEQQKELNKALEVWSVGPPLKPLMFEKDDDSNFHVDFVVAAASLRCQNYGIPPVNRAQSKRIVGQIIPAIATTTAAVAGLLGLELYKVVSGPRPRSAFRHSYLHLAENYLIRYMPFAPAIQTFHHLKWTSWDRLKVPAGQPERTLESLLAHLQEQHGLRVRILLHGSALLYAAGWSPEKQAQHLPLRVTELVQQLTGQAPAPGQRVLVLELSCEGDDEDTAFPPLHYEL

SEQ ID NO: 15 - DNA, 1929 bp, Homo sapien
acccccgcacccagctccgcagaccggcgggcgcgcgcgggctctggaggccacgggcatgatgcttcgggtcctggtgggggctgtcctccctgccatgctactggctgccccaccacccatcaacaagctggcactgttcccagataagagtgcctggtgcgaagccaagaacatcacccagatcgtgggccacagcggctgtgaggccaagtccatccagaacagggcgtgcctaggacagtgcttcagctacagcgtccccaacaccttcccacagtccacagagtccctggttcactgtgactcctgcatgccagcccagtccatgtgggagattgtgacgctggagtgcccgggccacgaggaggtgcccagggtggacaagctggtggagaagatcctgcactgtagctgccaggcctgcggcaaggagcctagtcacgaggggctgagcgtctatgtgcagggcgaggacgggccgggatcccagcccggcacccaccctcacccccatccccacccccatcctggcgggcagacccctgagcccgaggacccccctggggccccccacacagaggaagagggggctgaggactgaggcccccccaactcttcctcccctctcatccccctgtggaatgttgggtctcactctctggggaagtcaggggagaagctgaagcccccctttggcactggatggacttggcttcagactcggacttgaatgctgcccggttgccatggagatctgaaggggcggggttagagccaagctgcacaatttaatatattcaagagtggggggaggaagcagaggtcttcagggctctttttttggggggggggtggtctcttcctgtctggcttctagagatgtgcctgtgggagggggaggaagttggctgagccattgagtgctgggggaggccatccaagatggcatgaatcgggctaaggtccctgggggtgcagatggtactgctgaggtcccgggcttagtgtgagcatcttgccagcctcaggcttgagggagggctgggctagaaagaccactggcagaaacaggaggctccggccccacaggtttccccaaggcctctcaccccacttcccatctccagggaagcgtcgccccagtggcactgaagtggccctccctcagcggaggggtttgggagtcaggcctgggcaggaccctgctgactcgtggcgcgggagctgggagccaggctctccgggcctttctctggcttccttggcttgcctggtgggggaaggggaggaggggaagaaggaaagggaagagtcttccaaggccagagggagggggacaaccccccaagaccatccctgaagacgagcatccccctcctctccctgttagaaatgttagtgccccgcactgtgccccaagttctaggccccccagaaagctgtcagagccggccgccttctcccctctcccagggatgctctttgtaaatatcggatgggtgtgggagtgaggggttacctccctcgccccaaggttccagaggccctaggcgggatgggctcgctgaacctcgaggaactccaggacgaggaggacatgggacttgcgtggacagtcagggttcacttgggctctctctagctccccaattctgcctgcctcctccctcccagctgcactttaaccctagaaggtggggacctggggggagggacagggcaggcgggcccatgaagaaagcccctcgttgcccagcactgtctgcgtctgctcttctgtgcccagggtggctgccagcccactgcctcctgcctggggtggcctggccctcctggctgttgcgacgcgggcttctggagcttgtcaccattggacagtctccctgatggaccctcagtcttctcatgaataaattcttcggaatt

SEQ ID NO: 16 - protein, 180 aa, Homo sapien
MLRVLVGAVLPAMLLAAPPPINKLALFPDKSAWCEAKNITQIVGHSGCEAKSIQNRACLGQCFSYSVPNTFPQSTESLVHCDSCMPAQSMWEIVTLECPGHEEVPRVDKLVEKILHCSCQACGKEPSHEGLSVYVQGEDGPGSQPGTHPHPHPHPHPGGQTPEPEDPPGAPHTEEEGAED

SEQ ID NO: 17 - DNA, 2739 bp, Homo sapien
cgactgcagcctgggttttattcttggcctggccctgaccgggagctggcccctcggctgcttctctggctcgggggggactttctctggctcagatccggacccctgaactggacctggttgtcgtccccccgcttctcagccccctctggggttcctctctcctctccgcccactctttgctcactgccccatgtccctcggtcagtcggcctgtctgttcctctctatagctcggtcaaggagtgtgatgactggcgagcagatggctgccttccatccatcgtccacccccaacccgctggagaggcccatcaagatgggctggctgaagaagcagaggtccatcgtgaagaactggcagcagaggtactttgtgctgagggcgcagcagctctactactacaaggatgaagaggacacgaagccccagggctgcatgtatctaccaggatgtacaatcaaggagatcgccacaaacccagaagaagctgggaagtttgtctttgaaatcattccagcctcatgggaccagaatcgcatgggacaggactcctatgtcctcatggccagctctcaggcggagatggaggagtgggttaaattcctcaggagagttgctggcacaccctgtggagtgtttggccagcgcttggatgagactgtggcctatgaacagaaattcggcccccatctggtgcccatcctggtggagaaatgtgcagagttcatcctggagcacggccggaatgaagagggcatcttccgtctgcctgggcaggacaacctggtgaagcagctgagagacgcttttgatgctggggagcggccctcctttgacagagacacagatgtgcacactgtggcttccctgttaaagctctacctccgagacctcccagagcccgtggttccctggagccagtacgaagggttcctgctctgtgggcagctcacgaatgcggatgaggcaaaggctcagcaggagttgatgaagcagctctccatccttcctcgtgacaactatagtctcctgagctacatctgcaggttcctacatgaaatacagctgaactgtgctgttaacaagatgagtgtggacaacctggctactgtgattggtgtgaatctcatcaggtcgaaggtcgaagaccctgccgtgatcatgagagggactcctcagatccaaagagtgatgactatgatgatcagagaccatgaagtcctcttccccaagtccaaggatatacccctgtcaccccctgcccagaaaaatgaccccaagaaagctccagtggcccgaagctctgtaggctgggatgccactgaagacctccgaatttctaggacagacagcttcagtagcatgacaagcgactctgatacaaccagccccaccggacagcagccgagcgatgcgtttccggaggacagcagcaaagtacccagggaaaagccaggagactggaaaatgcaatctcgtaaaaggactcaaacactccctaaccggaaatgtttcttgacatcagcttttcagggtgccaacagcagcaaaatggagatctttaaaaatgaattctggtcgccttcctcagaggctaaggcaggggaagggcacaggagaacgatgtctcaagacttgcgccaactttctgactcccaacggacttccacctacgataacgtcccttccctgccagggtcccctggggaggaagccagtgcactctcttcccaagcctgtgactccaagggagatactcttgccagtccaaactctgaaactgggcctggaaaaaagaactctggagaagaggaaattgattctttgcagaggatggtccaagagctacgaaaggaaatagaaacacagaagcaaatgtatgaggaacagattaaaaaccttgagaaggaaaattatgacgtttgggctaaagtggtgaggctcaatgaagaactggagaaggaaaagaagaagtctgcagccctagagatcagcctccgcaacatggagcgctcccgggaggatgttgagaagaggaacaaggccttggaagaagaagtcaaggaatttgtcaaatccatgaaggaacccaagaccgaggcttaagggtcccaggagtactgcagggacagccccagagaggcccaactctggcccctttctcagtgctatctgatgacggggaaacaaaattattctctgagagggaaaggacatttgagggaaacatcaaatttccccataaataaatgaatggagtttgcaggaaggtgagggtgagcagagatgtgtgtggacatctctgaccatccatcgctgtattcaaatggattgttctattccattctggtctcaggcatgaccacgtccagtgaagacatttgaggcagcacatctcaggacccaggcaatagactggccccaactcaggctggactaaggtgtgattaattctttgttttttgtgtggaacagctcaccttgtcagacagcctcagggcatctctgagacacaggggcagaaaatgacattcatcttttgagtcctcatccatggagtgctgtgtttggggggctgcatctgctgaagcgagaaccccattctgccaccccaccaggatgcccattctccaggacttctccaacttactattagactaaaccagaacaagcaacaaactgtatttatgcaagcaaaattgatgagaaaattatattcaaataaagcaaaattt

SEQ ID NO: 18 - protein, 638 aa, Homo sapien
MSLGQSACLFLSIARSRSVMTGEQMAAFHPSSTPNPLERPIKMGWLKKQRSIVKNWQQRYFVLRAQQLYYYKDEEDTKPQGCMYLPGCTIKEIATNPEEAGKFVFEIIPASWDQNRMGQDSYVLMASSQAEMEEWVKFLRRVAGTPCGVFGQRLDETVAYEQKFGPHLVPILVEKCAEFILEHGRNEEGIFRLPGQDNLVKQLRDAFDAGERPSFDRDTDVHTVASLLKLYLRDLPEPVVPWSQYEGFLLCGQLTNADEAKAQQELMKQLSILPRDNYSLLSYICRFLHEIQLNCAVNKMSVDNLATVIGVNLIRSKVEDPAVIMRGTPQIQRVMTMMIRDHEVLFPKSKDIPLSPPAQKNDPKKAPVARSSVGWDATEDLRISRTDSFSSMTSDSDTTSPTGQQPSDAFPEDSSKVPREKPGDWKMQSRKRTQTLPNRKCFLTSAFQGANSSKMEIFKNEFWSPSSEAKAGEGHRRTMSQDLRQLSDSQRTSTYDNVPSLPGSPGEEASALSSQACDSKGDTLASPNSETGPGKKNSGEEEIDSLQRMVQELRKEIETQKQMYEEQIKNLEKENYDVWAKVVRLNEELEKEKKKSAALEISLRNMERSREDVEKRNKALEEEVKEFVKSMKEPKTEA

SEQ ID NO: 19 - DNA, 2937 bp, Homo sapien
acgcgtccgcttcggaatgagagactcaaccataatagaaagaatggagaactattaaccaccattcttcagtgggctgtgattttcagaggggaatactaagaaatggttttccatactggaacccaaaggtaaagacactcaaggacagacatttttggcagagcatagatgaaaatggcaagttccctggctttccttctgctcaactttcatgtctccctcttcttggtccagctgctcactccttgctcagctcagttttctgtgcttggaccctctgggcccatcctggccatggtgggtgaagacgctgatctgccctgtcacctgttcccgaccatgagtgcagagaccatggagctgaggtgggtgagttccagcctaaggcaggtggtgaacgtgtatgcagatggaaaggaagtggaagacaggcagagtgcaccatatcgagggagaacttcgattctgcgggatggcatcactgcagggaaggctgctctccgaatacacaacgtcacagcctctgacagtggaaagtacttgtgttatttccaagatggtgacttctacgaaaaagccctggtggagctgaaggttgcagcattgggttctgatcttcacattgaagtgaagggttatgaggatggagggatccatctggagtgcaggtccactggctggtacccccaaccccaaataaagtggagcgacaccaagggagagaacatcccggctgtggaagcacctgtggttgcagatggagtgggcctgtatgcagtagcagcatctgtgatcatgagaggcagctctggtgggggtgtatcctgcatcatcagaaattccctcctcggcctggaaaagacagccagcatatccatcgcagaccccttcttcaggagcgcccagccctggatcgcggccctggcagggaccctgcctatctcgttgctgcttctcgcaggagccagttacttcttgtggagacaacagaaggaaaaaattgctctgtccagggagacagaaagagagcgagagatgaaagaaatgggatacgctgcaacagagcaagaaataagcctaagagagaagctccaggaggaactcaagtggaggaaaatccagtacatggctcgtggagagaagtctttggcctatcatgaatggaaaatggccctcttcaaacctgcggatgtgattctggatccagacacggcaaacgccatcctccttgtttctgaggaccagaggagtgtgcagcgtgctgaagagccgcgggatctgccagacaaccctgagagatttgaatggcgttactgtgtccttggctgtgaaaacttcacatcagggagacattactgggaggtggaagtgggggacagaaaagagtggcatattggggtatgtagtaagaacgtggagaggaaaaaaggttgggtcaaaatgacaccggagaacggatactggactatgggcctgactgatgggaataagtatcgggctctcactgagcccagaaccaacctgaaacttcctgagcctcctaggaaagtggggatcttcctggactatgagactggagagatctcgttctataatgccacagatggatctcatatctacacctttccgcacgcctctttctctgagcctctatatcctgttttcagaattttgaccttggagcccactgccctgaccatttgcccaataccaaaagaagtagagagttcccccgatcctgacctagtgcctgatcattccctggagacaccactgaccccgggcttagctaatgaaagtggggagcctcaggctgaagtaacatctctgcttctccctgcccaccctggagctgaggtctccccttctgcaacaaccaatcagaaccataagctacaggcacgcactgaagcactttactgatattcattccattattccatatgacagttgttttgagtttcgtaccaccttattgtccccttatacagataaggaaactggggtgcagaaaggtgaattaactttacaaagtagacatgacaagtgaacagcagagctgggatctaaacagcaataactaacattaacagagaatttaaaatgttcttagtgctgtgttataagctttggtggatgtcactcctttaatcctcacaacaccctgtcgggtagtcatattttgcaagtatggaagctgaggcagggcaacatgaagtaacttacataattcatacagtaatttgtgcagttgggagatgttcagccttagtccctggctaattgcctgttcttttccagcctgattttttttcccacaggaagagcccacatgtagccctgaggtttccttcccaggacagctgcagggtagagatcattttaagtgcttgtggagttgacatccctattgactctttcccagctgatatcagagacttagacccagcactccttggattagctctgcagagtgtcttggttgagagaataacctcatagtaccaacatgacatgtgacttggaaagagactagaggccacacttgataaatcatggggcacagatatgttcccacccaacaaatgtgataagtgattgtgcagccagagccagccttccttcaatcaaggtttccaggcagagcaaataccctagagattctctgtgatataggaaatttggatcaaggaagctaaaagaattacagggatgtttttaatcccactatggactcagtctcctggaaataggtctgtccactcctggtcattggtggatgttaaacccatattcctttcaactgctgcctgctagggaaaactgctcctcattatcatcactattattgctcaccactgtatcccctctacttggcaagtggttgtcaagttctagttgttcaataaatgtgttaataatgaaaaaaaaaaa

SEQ ID NO: 20 - protein, 584 aa, Homo sapien
MKMASSLAFLLLNFHVSLFLVQLLTPCSAQFSVLGPSGPILAMVGEDADLPCHLFPTMSAETMELRWVSSSLRQVVNVYADGKEVEDRQSAPYRGRTSILRDGITAGKAALRIHNVTASDSGKYLCYFQDGDFYEKALVELKVAALGSDLHIEVKGYEDGGIHLECRSTGWYPQPQIKWSDTKGENIPAVEAPVVADGVGLYAVAASVIMRGSSGGGVSCIIRNSLLGLEKTASISIADPFFRSAQPWIAALAGTLPISLLLLAGASYFLWRQQKEKIALSRETEREREMKEMGYAATEQEISLREKLQEELKWRKIQYMARGEKSLAYHEWKMALFKPADVILDPDTANAILLVSEDQRSVQRAEEPRDLPDNPERFEWRYCVLGCENFTSGRHYWEVEVGDRKEWHIGVCSKNVERKKGWVKMTPENGYWTMGLTDGNKYRALTEPRTNLKLPEPPRKVGIFLDYETGEISFYNATDGSHIYTFPHASFSEPLYPVFRILTLEPTALTICPIPKEVESSPDPDLVPDHSLETPLTPGLANESGEPQAEVTSLLLPAHPGAEVSPSATTNQNHKLQARTEALY

SEQ ID NO: 21 - DNA, 6060 bp, Homo sapien
atctcactgaggaccaacctttcgacattcttcagaaatccttgcaagaggccaatatcactgaacagacattggcagaagaggcatatttggatgccagtataggttcaagccaacagtttgcacaagctcagcttcatccttcttcatcagcatcctttactcaggcttctaatgtttctaattactcaggtcagacgctgcagcctataggggtgacgcatgtgcctgttggagcatcgtttgcaagcaatacagtgggtgtacaacatggctttatgcaacatgtggggatcagtgttcccagccagcatttgtctaatagcagtcagattagtggttctggtcaaatacagttaattgggtcatttggtaatcatccttccatgatgactattaataacctagatggatctcaaatcatattaaagggcagcgggcagcaagccccatcaaatgtgagtggagggctcctggttcatagacagactcctaatggcaactccttgtttgggaactctagttccagtccagtagcacagcctgttaccgttccatttaacagcacaaattttcaaacatctttacctgtgcataacatcatcatacaaaggggtcttgcaccaaattcaaataaagtcccaattaatatacagccaaagcctatccagatgggtcagcaaaatacatacaatgtgaacaatttgggaattcagcagcaccacgtacaacaagggatctcttttgcttctgcaagctcaccccagggctcagtagttggtccacacatgtctgtgaacattgtaaaccaacagaacacaagaaagccagtcacctcacaggcagtgagcagcactgggggcagtattgttattcattcccccatgggccaacctcacgcaccccaaagtcagttccttatacctacaagcctttctgtcagttccaactcggtacaccacgtccagactataaatgggcaacttcttcaaactcaaccctctcagctcatttctggccaagtggcctcagagcatgtcatgttgaacagaaactcttccaacatgctcaggaccaaccaaccatatactggaccgatgcttaacaaccagaatactgctgtccacttagtgtctgggcagacatttgctgcctctggaagtccagtgatagccaatcatgcctctcctcagcttgtgggtggacagatgcccttgcagcaggcatccccaactgtattacacctgtcacctgggcagagcagcgtttcccaaggaagacctggcttcgccaccatgccatcggtgacaagcatgtcaggacctagtcggttccctgctgtcagctcagccagcactgcccatcctagtcttgggtctgcagttcagtctggttcatcaggatcaaactttacaggagatcagctgacccagccaaacaggactccagtaccagtcagtgtgtctcatcgtcttccagtttcttcttccaagtctaccagcaccttcagtaacacacctggaacaggaacccagcaacaattcttctgccaggctcagaaaaaatgtctgaatcagacttcccccatttctgctcccaagaccacagacggcctgaggcaagcacagatccctgggctcttgagcaccacactgccagggcaggattctggaagcaaagttatatccgcatccttaggaaccgcacaaccacagcaggaaaaagtagttggatcatctcctggccatccagctgtgcaggtggagagtcattcgggaggacaaaaaaggcctgctgcgaaacagctaacgaaaggagctttcattctccagcagttgcagagggaccaagcccacactgtgacaccagacaaaagtcacttccgatcactaagtgatgcggtacagagactgctctcctaccacgtgtgccagggctccatgcccactgaagaagacttgagaaaagtggacaatgaatttgagacagttgccactcagctcctaaaaaggacccaagctatgcttaacaaatacagatgcctgctcctagaagatgccatgcgaatcaatccctctgctgagatggtgatgatcgataggatgttcaaccaggaggaaagagcttccctgtcccgagacaagcgtttggcacttgtagaccctgagggttttcaggctgatttctgttgttccttcaaacttgataaagctgctcatgagacacagtttggccggagtgaccagcatggcagtaaagcaagcagctctctgcaaccgccagccaaggcccaaggcagagaccgagccaaaaccggtgtgacggaacccatgaatcatgaccagtttcatctagtgcctaatcacatcgtggtctctgcagaaggaaacatttctaaaaaaacagaatgccttggcagagcactgaaatttgacaaagtgggcttagtgcagtaccagagcacgtctgaagagaaggccagccggagagagcctctgaaggccagtcagtgctctcccggccctgaggggcaccggaaaacctcatccagatcggatcatggtactgagagcaaactgtcaagcatcctagcagattcgcacttggagatgacgtgtaacaattccttccaggacaaaagtctgaggaattctccaaagaatgaagttttacacacagacatcatgaaagggtcaggcgaaccccagccagatctccagctgacaaagagcttggaaaccacatttaagaacatcttggaactcaaaaaggcgggacggcagccccagagtgaccccacggttagcggctctgttgagttagatttccccaacttttctcctatggcttcacaggaaaactgcctggaaaagttcatcccggaccacagtgaaggtgttgtagaaactgactccattttagaagcagctgtaaatagtatcctagagtgttaatagcagcagtcctccccctaccccgccccgagaccccaccccgagaccccaccccggaccagttacattcgttcctggcaaaagcaaatggaaatggtctcctgtctccagcctgcttgatctttcatcacaggttattctttctaatctcaatcctgttctttgtttaagagcaatacttgtcgtgattacagggagatcctttagtaaaattaatccttggcagaaagcagtctgataggccccactcatttcaagtgttatgaaagtgcttataggcattttgtttatttgttttgttttttaaaaacactgtaactcaatgagaccacagtatacttggcccttggtaaaattttgacaatcataagtcatttgaaaagaacagacttactaaaatcaaacgagacggatagaagctactttttaaagaatatcccactgcatctgcaaatttagttttgggtttttttattattattattttgagtttttttgtgtgtgttttgttgttattgttgaggggaagaccacatggttcttccccctcagccatctttgagcagtaaattgctggctgtgctgccagggacccgcagccctggtggaaaagccagtagcacatacgcagggcattgcagggcttccctattgatggttcaagtgcttttctgatgcttccggagcaaaacctcatgcttttaggcatatctatgttgaatttcacctagggaatgttctgttcttagttacagcagcaaaatttgaaataatttcaccaggctaaataaaggaaaatggaaaccagttaagaggcacagtgtacagaggaggccgggatagagccatgagggttataatattaatatgtatatatgtaaaagcatatatatgttaactattgagaaaaaacaagttttgcattttataattggatatagtcaacatataatgtatgtttttgtttgttgctggattttgtttcatttaacctctctttgcaccctctcccacaacaaataccaagcatcaaaagcactttcatttgaaaattattatgttgtaatttttcagtttaaactttaaggagactctggccttgtttatgcttcttgtctgagaacagtagtgacccctggcagcaattcattaccaaaacacagacaaaccaaaggtaaccagctagcccaccactgaaaggaaagatctgagacatgggattcccatttgagagccaaaggatatgccctgtcatggtttctgtttggcctgtgttcatattagtgagcatggcttactgcttttttttttttttttttttgtcagggagtattctccgttttcctttctcgtatacctgccccaggttatcccatttctgttgttacctttattcttaatgtcattgtaaccatcacttatctcctctcattgggaaagctacatgatagtatttttatgcactcttctcccacacatacacacacgtgcatgtatctgagctgctcggatccagaggtcatttttgttacagtgtgtgcacactcactctccttcttagtgtgcatactctctcatttattctgtttatctccctggctctggaggtgcagccactggtcttcactttaatgtgttgccagaatctgcttctggctgtcgccaacatggggatgacccccattgtcatcatgttgggcatttcttttccagattggcctgtgatggaaaggaaggcttctaattagaaaacacagcaacagaagacctataccccggtgcccctgtgtcccactacacacagaaaaccctgtgagatggccagtcttcataatagcaacgtaccttcaccccagccacatgccccagccaatacaaattggaaaatctggcccattttagggttaccattttttccttatttgtgccaatgtccaagttgcagatttcccctttttcctgtattgtaacatattagataagttggtgtcgccagttggtactttctgtttgggtagtcctagggtaacaccctgccctaaactccatgatttcataggcttttcttcccttggggctcatgctcccctaattcctagcaagatgatccttcctaatcaaattcttctcattgcagaactttatccctggaagccttcatgtgggctgctagtgagttacattaattactgcaaatcagtggaattctcaagagacaagataagcttcatgtacatttgtcacctctctttcttccctatcctgccctgctgtcccaatcctagcttttctatataccatcttaaagggtttttaagccctaacacttgtctagcaaatggagagcctaatttaccaaaatgaaacttgtaaatttttgtgtcattgtatgtaagtttactttttatggaggaaggattctagataatgacaaatgaagattatgacatgtatttcactcctgtgattaggttctacgcacatgggtcataactcgcatgtcgagccccctctagtgaagggtaggagagctcagcctcggatggccaacattcagttgttcaggttcattcgtcaaagttaagttttagaactatttgtactcagtaacaaaaatcattttctttttttttttttttttctgttgtggaaaagcgtgaatttgttattaagcatttgattttctgtgtccttaagtacttcctgaagatgaagcaaaattttaatctggcaattatgaaaaagaaatattttagctctgaaggatttagtagattctgttagattagggaggccttacagactgactttacttaaagaggacgcgtcactcgctgtcagtgtggtgtgggctttatttgcttaaataccttcatttgtatagtacgtctcacttgaaattgctttgtatacattttgtaaaaatatttataaaatgttttgtaaaaaaaaaaaaactataacaaattgcagtttattttgttatgttggataaatactgttaaaagaaaccagtcagtaactatattgttaatccatggttaggaaatgtttagttggagattacaaattgaaacaaccattgcaatacagccaaagatttggg

SEQ ID NO: 22 - protein, 983 aa, Homo sapien
LTEDQPFDILQKSLQEANITEQTLAEEAYLDASIGSSQQFAQAQLHPSSSASFTQASNVSNYSGQTLQPIGVTHVPVGASFASNTVGVQHGFMQHVGISVPSQHLSNSSQISGSGQIQLIGSFGNHPSMMTINNLDGSQIILKGSGQQAPSNVSGGLLVHRQTPNGNSLFGNSSSSPVAQPVTVPFNSTNFQTSLPVHNIIIQRGLAPNSNKVPINIQPKPIQMGQQNTYNVNNLGIQQHHVQQGISFASASSPQGSVVGPHMSVNIVNQQNTRKPVTSQAVSSTGGSIVIHSPMGQPHAPQSQFLIPTSLSVSSNSVHHVQTINGQLLQTQPSQLISGQVASEHVMLNRNSSNMLRTNQPYTGPMLNNQNTAVHLVSGQTFAASGSPVIANHASPQLVGGQMPLQQASPTVLHLSPGQSSVSQGRPGFATMPSVTSMSGPSRFPAVSSASTAHPSLGSAVQSGSSGSNFTGDQLTQPNRTPVPVSVSHRLPVSSSKSTSTFSNTPGTGTQQQFFCQAQKKCLNQTSPISAPKTTDGLRQAQIPGLLSTTLPGQDSGSKVISASLGTAQPQQEKVVGSSPGHPAVQVESHSGGQKRPAAKQLTKGAFILQQLQRDQAHTVTPDKSHFRSLSDAVQRLLSYHVCQGSMPTEEDLRKVDNEFETVATQLLKRTQAMLNKYRCLLLEDAMRINPSAEMVMIDRMFNQEERASLSRDKRLALVDPEGFQADFCCSFKLDKAAHETQFGRSDQHGSKASSSLQPPAKAQGRDRAKTGVTEPMNHDQFHLVPNHIVVSAEGNISKKTECLGRALKFDKVGLVQYQSTSEEKASRREPLKASQCSPGPEGHRKTSSRSDHGTESKLSSILADSHLEMTCNNSFQDKSLRNSPKNEVLHTDIMKGSGEPQPDLQLTKSLETTFKNILELKKAGRQPQSDPTVSGSVELDFPNFSPMASQENCLEKFIPDHSEGVVETDSILEAAVNSILEC

SEQ ID NO: 23 - DNA, 1835 bp, Homo sapien
ctcgctgcgccaccgcctcccgccacccctgcccgcccgacagcgccgccgcctgccccgccatgggtcgacagaaggagctggtgtcccgctgcggggagatgctccacatccgctaccggctgctccgacaggcgctggccgagtgcctggggaccctcatcctggtgatgtttggctgtggctccgtggcccaggttgtgctcagccggggcacccacggtggtttcctcaccatcaacctggcctttggctttgctgtcactctgggcatcctcatcgctggccaggtctctggggcccacctgaaccctgccgtgacctttgccatgtgcttcctggctcgtgagccctggatcaagctgcccatctacaccctggcacagacgctgggagccttcttgggtgctggaatagtttttgggctgtattatgatgcaatctggcacttcgccgacaaccagctttttgtttcgggccccaatggcacagccggcatctttgctacctacccctctggacacttggatatgatcaatggcttctttgaccagttcataggcacagcctcccttatcgtgtgtgtgctggccattgttgacccctacaacaaccccgtcccccgaggcctggaggccttcaccgtgggcctggtggtcctggtcattggcacctccatgggcttcaactccggctatgccgtcaaccctgcccgggactttggcccccgcctttttacagcccttgcgggctggggctctgcagtcttcacgaccggccagcattggtggtgggtgcccatcgtgtccccactcctgggctccattgcgggtgtcttcgtgtaccagctgatgatcggctgccacctggagcagcccccaccctccaacgaggaagagaatgtgaagctggcccatgtgaagcacaaggagcagatctgagtgggcaggggccatctccccactccgctgccctggccttgagcatccactgactgtccaagggccactcccaagaagcccccttcacgatccaccctttcaggctaaggagctccctatctaccctcaccccacgagacagccccttcaggatttccactggaccttgcccaaatagcaccttaggccactgcccctaagctggggtggaaccggaatttgggtcaatacatccttttgtctcccaagggaagagaatgggcagcaggtatgtgtgtgtgtgcatgtgtgtgcatgtgtgtgcatgtgtgtgcaggggtgtgtgtgtgtggggggggttcccagatattcagggcaagggaccagtcggaagggattctggctattgggggagcccagagacaggggaaggcagcctgtccatctgtgcataaggagaggaaagttccagggtgtgtatgtttcaggggcttcacatggaggagctgcagatagatatgtgtttctgtgtatgtgtatgtctgcctttttttctaagtgggggcttctacaggcttttgggaagtagggtggatgtgggtagggctgggaggagggggccacagcttaggtttggagctctggatgtacatacataagtaggagcagtgggacgtgtttctgtcataatgcaggcatgaagggtggagtgaagtcaggtcataagtttcatgtttgcttttgttttgttttgtttttaatgtatgtagcagatgttacagtcttagggatccgggatgggagaccccactttagaaagggtcgtcactcctttaatcctctactcaacaatgtactcttttacttttatattaaaaaaaataaaataaatatgtgcctaaaaaaaaaaaaaaa

SEQ ID NO: 24 - protein, 292 aa, Homo sapien
MGRQKELVSRCGEMLHIRYRLLRQALAECLGTLILVMFGCGSVAQVVLSRGTHGGFLTINLAFGFAVTLGILIAGQVSGAHLNPAVTFAMCFLAREPWIKLPIYTLAQTLGAFLGAGIVFGLYYDAIWHFADNQLFVSGPNGTAGIFATYPSGHLDMINGFFDQFIGTASLIVCVLAIVDPYNNPVPRGLEAFTVGLVVLVIGTSMGFNSGYAVNPARDFGPRLFTALAGWGSAVFTTGQHWWWVPIVSPLLGSIAGVFVYQLMIGCHLEQPPPSNEEENVKLAHVKHKEQI

SEQ ID NO: 25 - DNA, 3351 bp, Homo sapien
  Unsure 713, 716: Unknown base
tttaggtaaaaccggatttaacccttgggaaaaaaaaaaaaaaaggagagagaagacagttcctttcctgtagaaattaaaacaaaatacaaattgaggaagctctgctacccaggctgtcatggtagagaacttgaagaagacctgtttggatggacacctggtttcaaaagtcaggtgtggagactgttaaatgggagggcctcatccataaatgatttctggcaacgtcttcttcaggtggagcttgacgtctttttaatgttacttggggagggagtgctcattaagggatgccagggccagctctggtggttcctggggaggctgcgtccttccctgcttctgcatgtcatgaggcagcaggaaggtttcccctgcacctgtctgtcctggctccctctgggtagccccctactgttctgtgcttcagcacagcctggtttgtcaagaggcacatagttggggctgggctgcatggcacaggggcttatgtgcctgctggttatttaattttcagccttaagttttctttaatattttcctgttggctatttaaaggttttggttatcttttattccttatctacaatcaagatgacaatgtaattgaattatcttatttataacacggttcgtgattcatgattcatgattacaagtagaaaatatgtcatgttcctcacctccaaataaatatgtgtgtgtctgtntgngtgtctatatgtatgtgcggagagggagagagtggggaaggagagcagtgttatcatacatagagaggctaaatgtgtcccatccctcactgtcagctttataaaggagtttgactccatccacagaagaatgttttataagactaggaaaacacgttgaaaactaggataaacagcaacaaaaatcaactaaatatgttgttactgttgctaaggattttctccttagaataatttaggatttttaaaaatttctgtttgccaaatgctgtagataaatggccagattcttcctatccctaggattcctttattattttttttcacagattttgagaacaagggggagagatagtatggaagattaagattccattaatcttatagaactgtgttgtcacccaaattcctgcttgtttgaacatggcatcttcatagattcaggattcactaccctctatagctggatcttgaaaattatctggccagataattttgcatctgcttggatgattgtagactgagatgtgagtggaggataaagtattagacttttgctgagtaactgccaaccaagaagtatttatcggacacttactaggtgcctaggattgtatcagagggaatatgaaatgtgtccctgccctacctagttttaacgacagaatatctattaaaggctacttagctgaagggtaagggtgacaggtctaggggaagctttgggaggtggtgtgctgtgacagaaaaagtggcagagtagggacgagagacctgcattctagccctgtttctgtcacttgctctgtacacttagacaacagcttgacctcttgagctttagtttcctcctctgcataatgagagggttagactactgaattgtatgggaaaaaaatacaaattcctgggtcctaggccatgcctgctgaatccgactgttcaggaagaggcctaggaaatctgtgagggaatccccaggggaatctcgtgaccagccaggtgtgaaatctgctaactggaagatctcaaagcttccttcactttttgtgattttgtggtcatgtaacgttactgtattattctacgtaaatgtgggtacttggatgtttatcatactgtttctctgtgtttacatactaatttgtgtaagaaatgcattttagtctgtgtacctcaacctgctgtttgtttcctagaggtgttagtagtctttaaatacaagtaagacttaagaggatatttgatgttatttacctggatattttcttccccttttatttatttagaggaaattgagattctaggagccaaaaaaatgaaaacaaaattctaaggcaaagttaaagaaaaaaattacattatttcttaccatttgctactttataatgaaaatttaaaaattatatgggaagatttttctctgggataacaaatccttgtcataaagtaagaggtctttttaaagtaggtaggctataaggcctgtaatttaaaataatactcctttctctagggtttggtgcaattctccattaatgaagataacatttgaattccccaaagcaggtgaggagtcggggaggagaaagcgatgttaaaatgaaaactcactgcaaaagaggaggcagaggaagaaggaatgtaaaccccttaaagcagatgtgtgtggggccttatgaagaccaggattctgcgggtgtcaggggattgcccctcttgacagagactagggttttagactgaggcttcctgcagggtgttcgcattgcccttctccgttccccttcagacctttctggggagaagaggtgggaggaggggagaaagactgttcatcttattctgaatcctggagcagctgaaggttttctcttgagtcaggatgcagtggtaatgcattaaccagcaagtgtggccaaggataatgaaaaagtgggaaaggaaggtcctcctcctccctgattgtagcatccagcagtctctgtagccaggttactcaagaaccacatttgatttcctggccctttgccttggcagtgatggcatttttatttcactgtgttttaaagtcttcatttatttttataacatgggttagggagaagggccacaaatggagggattgtcctttcaagcaccacagcttcagataaaattagtactttcaaatattgtccactttaacttaaaaaattctagagggattatattggagactcaactgcccttggttttagtttataaaatggcctagtactgtggaattttaattttagaaagtcttagcatcagatcataaacattcattaaaagaactcacatcccatctgaaacttcccaggggagttgggattcttagtagattggtagaaaggggctcattttctactgcatttcccatttttggtatcttgttcagcatgttttatttttatttcttgtctgcagaacatcctatatttatgagaacattctttaagaagaccaccacatagaataccccttcctatcagctcgctctgatttagccttaattttgttaaattttttagagatgaatgaagtgctgctgtggaaagaaatgtacatatactatttctgtatcattaaaattacatttttatggttcaag

SEQ ID NO: 26 - protein, 23 aa, Homo sapien [sequence omitted]

SEQ ID NO: 27 - DNA, 6113 bp, Homo sapien
ccccggtgcaccgtgctagcccccagccagggcgttggggagggcggtggccatggccagtcacgtggacctgctgacggagctgcagctgctggagaaggtgcccacgctggagcggctgcgggctgcccagaagcgccgggcccagcagctgaagaaatgggcacagtacgagcaggacttgcagcaccgcaagcgaaagcatgagcggaagcgcagcacgggcggtcgccgcaagaaagtgtccttcgaggccagcgtggccctgctggaggcctcgctgaggaacgacgccgaggaagtacgctacttcctgaagaataaggtcagccctgatttgtgcaatgaggacggactcacagccctacaccagtgctgcatcgacaactttgaggaaattgtgaagctgctcctctcccatggtgccaatgtgaacgccaaggacaacgagctgtggacacctctccatgctgcagccacctgcggccacatcaacctggtgaagatcctcgttcagtatggggccgacttgcttgctgtcaactcggatgggaacatgccatatgacctctgcgaggatgaacccaccctggatgtcatcgagacctgcatggcataccagggcatcacccaagagaaaatcaacgagatgcgggtggctcctgagcagcagatgattgcggacatccactgcatgatcgcagcgggccaggacctggactggatagatgcccagggtgccacactgctgcacatagctggagccaatggatacctgcgggcagctgagctcctcctggatcatggagtgcgtgtggatgtgaaggactgggatggctgggagcccctgcatgcagctgccttctggggacagatgcagatggcagagctattggtgtcccatggagctagtctcagtgcaaggacatccatggatgagatgccaatagacctgtgcgaggaggaagagttcaaggtcctgctgctggagctaaaacacaagcatgatgtgatcatgaagtcacagctgaggcacaagtcatccttgagccggaggacctccagcgcaggcagccgtgggaaggtggtgcggcgagccagcctgtcggacaggaccaacctgtataggaaggagtatgagggagaggccatcctgtggcagcggagtgcagctgaggatcagcggacctccacctacaacggggacatcagggagaccaggacagaccaagagaataaggaccctaaccccaggctggagaagcccgtgctactctccgaatttcctaccaagatcccacgaggtgaactggacatgcctgttgagaatggcctccgggctccggtcagtgcctaccagtatgcgctggccaacggggatgtctggaaggtgcatgaggtgcctgactacagcatggcctatggcaaccctggcgtggccgacgccaccccgccctggagcagctacaaggaacagagccctcagacgcttctggagctgaagcggcagcgggctgcagccaagctgctcagccaccccttccttagcacacacctgggcagcagcatggccaggacgggcgagagtagcagtgaaggcaaggctcccttgatcggaggcagaacttcaccgtacagcagcaatgggacctcggtatattacacggtcaccagcggagatcccccactcttaaagttcaaggcccccatagaggagatggaggagaaggtgcatggctgttgccgtatctcctagtctccgtgtgatggaggagggagatgcctggggaggggctcctggaatccaggccagcccaacaaccctggctggggaggtgtcagggcagctggggagaggtgggctctgcttttcagaggaactcagaccccagccctcagctggctgcccatagcatcccatgtcccacgtcccgtggttctgcttcctgctgcatcgtctgccatctgacacaaggcctgtcgtggcctcctggttcactctgctgtctgatcttgggagggtgggcttgagatcccagctctattcttggtataaaggcttctccggatcagtacatgcatgtcacattaacacacacacacacacacatatacacacacacacaagctcgatcagtgtgtgtaggaatgacatacctgggctcaggggaagcaagggggcttagaatttgtggggtattcccaaaaggatggaagttaagactcagagtctcattaccactgccaatgtggttttagcaggggaggggacctgctaagctgagacccatagtcctgctcagagttatcccaaagtctgagccaccagccacacctgacaggggtgagaagtcctcgctgtgttcagagggagccaggaatctacatgggtagatgagatagacacagacctgctccccgcagccttgttgagagccacacttctgcccatgccaggagccagctgtgtgaccatccaggggtggagggggaaaaccaggcaatttcgttcctggaatcaaccaaatcatgttttcctcttggatggaagtgtcaaaggcagaagggtgtgggagggggacaaggtcagtatttaccaaagtgtatctgattttaaaaattcctttagtctgtaaaactcctagagggagggaggtaactgaattcacttctttttgtggatcgtatcaaggtcactgggttttactggctggtgctgggaaaatgaagctaagtgaggagcttccattggaatgcttttccagggagagaggccagttaatttaaaaaaaacagtcgctagttaacagcgacagagcccagcaccctggggtctttgtgaatatccagactgtttcagcccagcccatctcagccaaccctccttagactgagctgtcagagcaagcaattaggggccagcctgcctccacctcccacccccttccacctccatcagtcatgtgtgcagagtcagtgctcgggatcccgggcccagcttttgcctttttggggatgcttggtgagacagatttgccagtcagcccttttgagttcccgcctcacccaggggctcccagcctgcacttgcaggagtggtgatgccccaagtctgcgaatccagggtgcacgtggtcaatatcccctcctgcattcaggagagccatggtagggctggagttgggtcttgcccagccctgcagtttcatagtcccagccttcctggtgctggggagggaggactgtgaatggctgttctcccctcactgctgagtctcccaggaccccctttggagatgcccatggcatgggcactgcccacaggctcagccagaacctcttggtgtacccgataagctgcaggttatcccttgctctgtgcgccttttatttgtccttaaactacctccttagagctctgaaggggtctcctagttccagattttaatttggggaacagatctgggttctttttaaccctcttctttctcagtctatgagaaacttgccctgaggggcacctgggctaggggcttgggactggaagaccatccccgccttgtgccacaactttggtcatgggatctgctctttgtcattcttagccccctactgtggcccccatagccccataacccagagagggagctggacttcagggagcctgagtgatgctttcccaggagcagggcagctggctggaccagaaagtagagggcccatgggagtgactgcacccttggtggctgctggaaagggagaggttctcagcatcaggccacctccaccccaatgccaggatagatgtattctagagtaggggtggaggcggcccaggaggctgaagacaggtgcacagatgcttcccacgaccttgccatttggggtgggctcttcaacatctcaggctgtggctggaacaggacaggatgatctaaaacacacgtaccattggctgtaaaacagtatgagcccagactgacgctgaaatccctcatgagccaaccttagctacaaggtagggagttctgagggaagccgcgtgctcctcaggagagagctgtttaggttttccgatctttttgctcaggggccaaacactgaaggcacgtactgcccaacccactgagcgcctgaggccattccctccttttccgcatgcctcctgcctcctgggctattcctctccacccagaaggctgggaatcccagctgattccctgacaggagccgacttcacacacaggtgactctcaggcattggctcatgttttcagccagggataaaccatcccttcttggggctttaagtccctggggagctttccctgtaggtctcctgggtgttgagagacaagttggagaccaacctccaatgaatgagccgcggtcattcattaattcactcacgtaatttactgagtagctgcaacatgccagcctctacgttaggttctgcggataaaggaggaataagacagagtcaggagaactgttccttgtggtttccgtcccttggggaccacaggcatcagcagtcccattcaagtcacctgaggcaaagtgtctgcatcttcgtccagcgaccctttgcttttcggctcctagaatccttagagtctgaattcctttagctgggaacagctgtcatggtcacccctggataacatttgccaccaagtatagatgctggatcttgggttccaggcagacatcatccaggtccatctggaactttcagtgatagctgccttcagccagcatctttgggggactctataatagcagcttgagatcagtgtctagaagactgttctgcaatttgctgccaaatgcatctcaggtttttaaagtcattgtttcttgctcatggtggctcatttattacatagtcccctcaccccactaatggataatgggaggaaaagttgctgcttccttcagcatcaaagcctttccttgggaatctgcctccctccatggcaggggtggattcgggagctgggagtaaccaggcaaagtcaaccagatgcctagctcctgctgagacccaggtcctatggcagctcctcattagattaaaggagaccacttccaaagcaggtgctgcatggctcaccatcatatgccccaaacaactgaaagttggcggttatcaccagactgtgagtttctggcaagtagcttggggaagctgaataaactctaggcccagggctactaaagacttcaggatagaattctccatcaaatatacagcataagtaaaactgctctgcactgtttaatccatttccaaggggcttagaaaagctaacaagggtgtgtcccctgtcctgccccaccggtttgctggctttgtaataacataagaccattgtggttgttggtgtcagataccttcccatcctgagctctctcacctacctgctctctctcctagagcaggatactggggtacttttaagaagggtgctccttttaagatgcccagaaaagctgtatttaactcttgctatttgtaacttggggatggtctcccctgccccagggcacataagagcaaaggctccaatggtcagtggatgactctgcaaaagtgaccccctgtgccagaagctatagccctctccccaacaggtctctcttgttggccagagggcctgcttcccatgggcattgcaagtgccaccgtgcggggcctggctctgcacacccaggaaaagtctgcagacccccagccctccgcaataattcaccagaccagaagccactggtgtacagagaacacttaaaaaaatgtattttatgtgaaaaaaaattaaaactctgtatactgtatcagcagctttgtgtaaaaatggcaatcaagagagtctaatatatttaaaacttttttaaaaaaaatcttcgcggatctttgatatcgtactgaggtaacttccacgtagccccttgccacgcggcaccggtgggccttgggtccaaaactgtggctcagccacatcccaaagggggcacatgtccctggagttgcttccagctgccaaggcctgtgacagaattcgctgttaagagtttttaattaaaattattaaattccttttaataac

SEQ ID NO: 28 - protein, 567 aa, Homo sapien
MASHVDLLTELQLLEKVPTLERLRAAQKRRAQQLKKWAQYEQDLQHRKRKHERKRSTGGRRKKVSFEASVALLEASLRNDAEEVRYFLKNKVSPDLCNEDGLTALHQCCIDNFEEIVKLLLSHGANVNAKDNELWTPLHAAATCGHINLVKILVQYGADLLAVNSDGNMPYDLCEDEPTLDVIETCMAYQGITQEKINEMRVAPEQQMIADIHCMIAAGQDLDWIDAQGATLLHIAGANGYLRAAELLLDHGVRVDVKDWDGWEPLHAAAFWGQMQMAELLVSHGASLSARTSMDEMPIDLCEEEEFKVLLLELKHKHDVIMKSQLRHKSSLSRRTSSAGSRGKVVRRASLSDRTNLYRKEYEGEAILWQRSAAEDQRTSTYNGDIRETRTDQENKDPNPRLEKPVLLSEFPTKIPRGELDMPVENGLRAPVSAYQYALANGDVWKVHEVPDYSMAYGNPGVADATPPWSSYKEQSPQTLLELKRQRAAAKLLSHPFLSTHLGSSMARTGESSSEGKAPLIGGRTSPYSSNGTSVYYTVTSGDPPLLKFKAPIEEMEEKVHGCCRIS

SEQ ID NO: 29 - DNA, 2121 bp, Homo sapien
ggcacgagggcccggcggcaggtcccagcccggggctagagaccgagggccggggtccgggcccggcggcgggacccaggcggttgaggctggtcaggagtcagccagcctgaaagagcaggatggatcttgatgtggttaacatgtttgtgattgcgggcggcacgctggccatcccaatcctggcatttgtggcttcatttcttctgtggccttcagcactgataagaatctattattggtactggcggaggacattgggcatgcaagtccgctatgttcaccatgaagactatcagttctgttattccttccggggcaggcctgggcacaaaccctccatcctcatgctccacggattctctgcccacaaggatatgtggctcagtgtggtcaagttccttccaaagaacctgcacttggtctgcgtggacatgccaggacatgagggcaccacccgctcctccctggatgacctgtccatagatgggcaagttaagaggatacaccagtttgtagaatgcctgaagctgaacaaaaaacctttccacctggtaggcacctccatgggtggccaggtggctggggtgtatgctgcttactacccatcggatgtctccagcctgtgtctcgtgtgtcctgctggcctgcagtactcaactgacaatcaatttgtacaacggctcaaagaactgcagggctctgccgccgtggagaagattcccttgatcccgtctaccccagaagagatgagtgaaatgcttcagctctgctcctatgtccgcttcaaggtgccccagcagatcctgcaaggccttgtcgatgtccgcatccctcataacaacttctaccgaaagttgtttttggaaatcgtcagtgagaagtccagatactctctccatcagaacatggacaagatcaaggttccgacgcagatcatctgggggaaacaagaccaggtgctggatgtgtctggggcagacatgttggccaagtcaattgccaactgccaggtggagcttctggaaaactgtgggcactcagtagtgatggaaagacccaggaagacagccaagctcataatcgactttttagcttctgtgcacaacacagacaacaacaagaagctggactgaggccccgactgcagcctgcattctgcacacagcatctgctcccatcccccaagtctgacgcagccaccactctcagggatcctgccccaaatgcggtcggagcgccagtgaccctgaggaagcccgtcccttatccctggtatccacggttccccagagctttggggaccacgcgaaaacctccaagatatttttcacaaaatagaaactcatatggaacaaaataagaaaccccagccatgaaatctaccatgaagtcttcaagttcatgtcactgagaagcttgtgcaaagcagccaccttggaccataattaaatcaaggacattttctttgagacattccttatagttggagactcaagatatttttgttgcatcaggtgtattcccttgcatgggcagtggcttttataggagcattagtcctcattcgctgaaccctgttgtttaggtctaatttaagttttacatagagacccatgtatgactgcagcccattggctgcaagaccagggaggaaagtggcaagctgtagaaaatgtttacacgcatggaggggcattgctctagccctcagagcgtccggagcagcagggtacatgggtgggaggttcattcagcacccaccagtcaggtatgttctgagtgaacccacagcagtcgcagaatgagcacctggcagggtgggtttcctaggaataatttattatttttaaaaataggcctaataaagcaataatgttctagacatctgtctaagtaatcagactcaggttccacacacaagcaacaactcgtgggcctcttttctatttcaatgtgctactaagaacccttggatgtaacatactagttagttaatgaattctgtgaattctgtgaagagtaatgtgattgaaaataagtctaaacagctgtaaaagtgaccacaatgacatgaaataaatttaataagtctagatcagcaaaaaaaaaaaaaaaaaa

SEQ ID NO: 30 - protein, 337 aa, Homo sapien
MDLDVVNMFVIAGGTLAIPILAFVASFLLWPSALIRIYYWYWRRTLGMQVRYVHHEDYQFCYSFRGRPGHKPSILMLHGFSAHKDMWLSVVKFLPKNLHLVCVDMPGHEGTTRSSLDDLSIDGQVKRIHQFVECLKLNKKPFHLVGTSMGGQVAGVYAAYYPSDVSSLCLVCPAGLQYSTDNQFVQRLKELQGSAAVEKIPLIPSTPEEMSEMLQLCSYVRFKVPQQILQGLVDVRIPHNNFYRKLFLEIVSEKSRYSLHQNMDKIKVPTQIIWGKQDQVLDVSGADMLAKSIANCQVELLENCGHSVVMERPRKTAKLIIDFLASVHNTDNNKKLD

SEQ ID NO: 31 - DNA, 1853 bp, Homo sapien
ctgagcctctccgtgcaatgattaacccggcggggcggccggcgcgggacccgagacggaggcgcggggccggggcgggaccccgcaggaccgctcggcttcctgctctcgccggagtttccgcgtagagggcgcatcgccggcccggggcccttggtgcggcgtggcgcagggcgcggcgtggggcgcgcgtgggcgcggcgcaggcggcccgggtcaccatgaggactctccgcaggttgaagttcatgagttcgcccagcctcagtgacctgggcaagagagagccggccgccgccgcggacgagcggggcacgcagcagcgccgggcctgcgccaacgccacctggaacagcatccacaacggggtgatcgccgtcttccagcgcaaggggctgcccgaccaggagctcttcagcctcaacgagggcgtccggcagctgttgaagacagagctggggtccttcttcacggagtacctgcagaaccagctgctgacaaaaggcatggtgatccttcgggacaagattcgcttctatgagggacagaagctgctggactcactggcagagacctgggacttcttcttcagtgacgtgctgcccatgctgcaggccatcttctacccggtgcagggcaaggagccatcggtgcgccagctggccctgctgcacttccggaatgccatcaccctcagtgtgaagctagaggatgcgctggcccgggcccatgcccgtgtgccccctgccatcgtgcagatgctgctggtgctgcagggggtacatgagtccaggggcgtgactgaggactacctgcgcctggagacgctggtccagaaggtggtgtcgccatacctgggcacctacggcctccactccagcgaggggcccttcacccattcctgcatcctggaaaagcgcctcctccgccgctcccgctcgggggacgtgctggccaagaaccctgtggtgcgctccaagagctacaacacgcctctgctgaaccccgtgcaggagcacgaggcggagggcgcggcggccggcggtaccagcatccgcaggcactctgtgtcggagatgacgtcctgccccgagcctcagggcttctccgacccgcccggccagggccccaccgggaccttcaggtcctccccggcgccccactcagggccctgccccagcagactgtaccccacgacccagccccctgagcagggcttggatcccacccgcagctccctgccccgctccagcccggagaacctggtggaccagatcctggagtccgtggactcggattctgaagggattttcattgactttggccggggccggggctctggcatgtccgacttggagggctctgggggccggcagagtgtcgtgtgaggcctcacagctggccttgagtttttactgacacgtccctgtgtgcgggggtgtccatgtggcgtgtgtgtgagtgagacttttttactgcgtcccgtcccgccagccctatcggcctcgtcactggccttggtcactttgtatttctgtcttggttggaaataccatcagccttccttgctcggcccaggtctgtttcaggcatctgagtcggcgtttacccaggggccgggccagagacgggggtcggccgctcgctcccacgctcctcctgccccagccctctggtgtccacacctgcccacagagaatgtaaacccagtgggctctgcccacgccgggccccaaagtgaccagactccagcacacctgtctcctcctgcctggggtggccatggggatggaagggggtggaataaaacctgtcaccctgggaaaaaaaaaaaaaaaaaaaaaaaaaaaaaa

SEQ ID NO: 32 - protein, 388 aa, Homo sapien
MRTLRRLKFMSSPSLSDLGKREPAAAADERGTQQRRACANATWNSIHNGVIAVFQRKGLPDQELFSLNEGVRQLLKTELGSFFTEYLQNQLLTKGMVILRDKIRFYEGQKLLDSLAETWDFFFSDVLPMLQAIFYPVQGKEPSVRQLALLHFRNAITLSVKLEDALARAHARVPPAIVQMLLVLQGVHESRGVTEDYLRLETLVQKVVSPYLGTYGLHSSEGPFTHSCILEKRLLRRSRSGDVLAKNPVVRSKSYNTPLLNPVQEHEAEGAAAGGTSIRRHSVSEMTSCPEPQGFSDPPGQGPTGTFRSSPAPHSGPCPSRLYPTTQPPEQGLDPTRSSLPRSSPENLVDQILESVDSDSEGIFIDFGRGRGSGMSDLEGSGGRQSVV

SEQ ID NO: 33 - DNA, 5492 bp, Homo sapien
tgagggctttgctatgacctcagtcccctcacggagccacgactgccccttgctgccacagcctttccaagaccctgcccggccctgccccatcctcagccccgagtcaccatgggcagcgtcagtagcctcatctccggccacagcttccacagcaagcactgccgggcttcgcagtacaagctgcgcaagtcctcccacctcaagaagctcaaccggtattccgacgggctgctgaggtttggcttctcccaggactccggtcacggcaagtccagctccaaaatgggcaagagcgaagacttcttctacatcaaggtcagccagaaagcccggggctcccatcacccagattacacggcactgtccagcggggatttagggggccaggctggggtggactttgacccgtccacaccccccaagctcatgcccttctccaatcagctagaaatgggctccgagaagggtgcagtgaggcccacagccttcaagcctgtgctgccacggtcaggagccatcctgcactcctccccggagagtgccagccaccagctgcaccccgcccctccagacaagcccaaggagcaggagctgaagcctggcctgtgctctggggcgctgtcagactccggccggaactccatgtccagcctgcccacacacagcaccagcagcagctaccagctggacccgctggtcacacccgtgggacccacaagccgttttgggggctccgcccacaacatcacccagggcatcgtcctccaggacagcaacatgatgagcctgaaggctctgtccttctccgacggaggtagcaagctgggccactcgaacaaggcagacaagggcccctcgtgtgtccgctcccccatctccacggacgagtgcagcatccaggagctggagcagaagctgttggagagggagggcgccctccagaagctgcagcgcagctttgaggagaaggagcttgcctccagcctggcctacgaggagcggccgcggcgctgcagggacgagctggagggcccggagcccaaaggcggcaacaagctcaagcaggcctcgcagaagagccagcgcgcgcagcaggtcctgcacctgcaggtactgcagcttcagcaggagaagcggcagctccggcaggagctcgagagcctcatgaaggagcaggacctgctggagaccaagctcaggtcctacgagagggagaagaccagcttcggccccgcgctggaggagacccagtgggaggtgtgccagaagtcaggcgagatctccctcctgaagcagcagctgaaggagtcccagacggaggtgaacgccaaggctagcgagatcctgggtctcaaggcacagctgaaggacacgcggggcaagctggagggcctggagctgaggacccaggacctggagggcgccctgcgcaccaagggcctggagctggaggtctgtgagaatgagctgcagcgcaagaagaacgaggcggagctgctgcgggagaaggtgaacctgctggagcaggagctgcaggagctgcgggcccaggccgccctggcccgcgacatggggccgcccaccttccccgaggacgtccctgccctgcagcgggagctggagcggctgcgggccgagctgcgggaggagcggcaaggccatgaccagatgtcctcgggcttccagcatgagcggctcgtgtggaaggaggagaaggagaaggtgattcagtaccagaaacagctgcagcagagctacgtggccatgtaccagcggaaccagcgcctggagaaggccctgcagcagctggcacgtggggacagcgccggggagcccttggaggttgacctggaaggggctgacatcccctacgaggacatcatagccactgagatctgaggggctgcctgggaaggcgagtctggggacctggcactgggaggcagggctctcccgtgcatcccccctgctcagcaattcagacccctctgagagacgccactccctgggacacagacccaggacccccgaggggagggcaggatggcctttccttccctctctgatgtcccagtgctcaccagccctgcagcccaccagacgtcaggccctgactcctctggctttcccaggagatgggtccaggggtctgtctgctttggttaagggctccctaaactttggcctttgttcgaaatagatatcctctccccctcctccagggaaggtggccacagcaagaacagcggctcccctccgcttctcatcccaacctctttttcctcctggacacattggaatgccttggaaatagaaagaagccatatatgaccagaagccttggaaccagccccatcagaacctgagctattttcctctggccgcagaggtgtaggggtggaatgagccgcggggaagctggctttgaaacctcagggctgtcccagccccggcaagccacaggaaggaggggagagacaggcagcccagcagtgtggagaccctgccacagccagaggagggcagagggagaatccaagggttgagagccagtggcgggtgatggccagcccctggggcccagcccctgtttactggttcttgcaaatgggagctgagcagcctctggacagccagtgacctttgacctcggtgaccactcttctttaagccatagaccctgaggccctgggctgggtgctgggaagggagggttgaaaccaccgtgaaccagagggtgtggctttccaggcaccctcagggagcctccccatctgtccagctggggccagaggctgggagtccctacctgcttcacgttggccggcggctactctggaatgtttttccctccccagaatcaagcttttgcttgatccagaagagcccatatcactaagatggcatatatgtgatctgggcattttcctcctctgcctacagccaggtttagcggcaaacctttcccccttagcaccttcagggctgagttctgggtttctagaggtcaggacggctcctcagagcgccaggaagccagagccccaagcaggacgaaaaagaggcatacacacagcagtgtgaatagcctggccaccagccatcctccctccacctcaagacccccatttgtcccagactaaaggatccagagagcagctccctttctcaggagcttgggcagtgccccagggagtccagggtttctctgcagatgtgcggagcgggaggcggtggtagagagagataaaaggtggagtttctctgttgtttggttcagggattttatttttaattttatgagacagggtcttgctctgtcccccaggctggagtgcagtggcatgatcatagctcactgcagcctcatactcctgggctcaagcaatcctcctgcctcagccttccaactagctgggactacaggtgcgcgccaccgtgcctggctaacttttcattttttttgtagggacggggtctcgttttgttgccaaagctggtctcaaacttgtggcctcaagcaatccacctgccttggcctcccaaagtgctgagattgcagatgtgagccaccgtgcctggccagatttttcttttattcttctttctttttcttttttgctttcttgtcttttcagaagcaagccagacctagcaggctgttccatgttctatttttgactgtagccacagctgctgttctcaggacagcatcccttcccacatgcctgcgcctgctgcctgctgagatgaggaggggagcgtctgggaacttgcgagtccaaggccagtccccatttctgcctcgctcaccgctggcccttagagaccccgaggtaggggtggggagatgcttctctccttgccccccgccctcatgggtcctagcccttccctgagtgcgggctgaggccagagtcaccttttctgtggctggctctaccttcctgtccctgaggttaaacggtgcccatcctgccatcctcaaacgacagaggagcttttctggaatttcaaaccattgctcttagtcccaagctaggcttaaacctggaatctacaagccaaaagtccctccctgcctgagggcagtaccctccattgggcacagtccagacccaagtcaaagatgccccattccttgcgcctcagccctcagttccttcatttccaccaggccgtgccttgtttgagtttttcctcccagtgagactgccccacggagacagaggaaagggctggctccccctccccaggctggagaccccccccaactccaggaaagagcagtcagagtccagtgctctgcctcagacgttgcctgagaagaagtggctgccacacccaggggaaggccctgaggcggaggctgtgctccgccatggtgtcccggtaccttccatacacagaggagtgcagccttctccatatctccatggccctgtcccaggccggcccagatgtgtcccccccaggccttgtcctacgtccaaggtggcagatgtcttccctgggctgccaccagcccccgccccagagtggcccaccgtggcactagaatgcaagtatcctgcgaccttgcaacctcaccttcctgtgggtgttctttcctgccctgtccaaaagcgccctcactattcttggaccatgccagattctgcctctctggaaagaggctctggacagcagaagcctccaagcacagagcctggccccaggccccagacagggtgggcttcctgcccttccctctgggcacgcctgctggccgacccactgacccactcggatggaccaacctgctctgtccccaaaggacgcctgcaggagagagcagcactccgcatcacctcaccaaggatcggactctgcccctggacctgggaacgactggactgtcacggggttccctcctagctctcccagtgaactcctgccaggcacacacagcccctatagcactgagctcacatgggactgggatatgggggcatctcttccccagagaggcactcagtgagcctcctgtgcctggccccagtctgggccatctcttaggtgagacagttgcccgaaactaagccaggcctggctggaggagcagcagcttggggagagggatttccctgcagacctcaagccatcatgcggtgggtgctgccatgacagaggctgcacccctgggccagcggggctgctcacccacctcttgtgcaaggtggcctttgtgctgcgcctgcaggcagagctggagcccccagcagaggcaggctgggacggaccagcatctggaagatgtacatagttatttttctctttgtggtttcttgtttggtttggtttgcttttgacagcttcattttatttttgacgtcactttttggccatgtaaactatttgtggcaattttatgtttttatttatgaataaagaatgccatttctcacgccctctaaaaaaaaaaaaaaaaaaaaaaaaaaaaaaaaaaa

SEQ ID NO: 34 - protein, 596 aa, Homo sapien
MGSVSSLISGHSFHSKHCRASQYKLRKSSHLKKLNRYSDGLLRFGFSQDSGHGKSSSKMGKSEDFFYIKVSQKARGSHHPDYTALSSGDLGGQAGVDFDPSTPPKLMPFSNQLEMGSEKGAVRPTAFKPVLPRSGAILHSSPESASHQLHPAPPDKPKEQELKPGLCSGALSDSGRNSMSSLPTHSTSSSYQLDPLVTPVGPTSRFGGSAHNITQGIVLQDSNMMSLKALSFSDGGSKLGHSNKADKGPSCVRSPISTDECSIQELEQKLLEREGALQKLQRSFEEKELASSLAYEERPRRCRDELEGPEPKGGNKLKQASQKSQRAQQVLHLQVLQLQQEKRQLRQELESLMKEQDLLETKLRSYEREKTSFGPALEETQWEVCQKSGEISLLKQQLKESQTEVNAKASEILGLKAQLKDTRGKLEGLELRTQDLEGALRTKGLELEVCENELQRKKNEAELLREKVNLLEQELQELRAQAALARDMGPPTFPEDVPALQRELERLRAELREERQGHDQMSSGFQHERLVWKEEKEKVIQYQKQLQQSYVAMYQRNQRLEKALQQLARGDSAGEPLEVDLEGADIPYEDIIATEI

SEQ ID NO: 35 - DNA, 2446 bp, Homo sapien
ggccgggcgggcatgggccttcccggcccggagctgggagtcgaaggggcgggaggcgtgatggtgaactcgcaagaagtttgagggacgcgcgggccccgcgcccactccccctccaccggacacggctggggccggcgatgcctgagagggggtcggaggacgcagtgaacatatatgcatgtacagtgtggatcctcatctgagaggagggagatgaaaacacacccacctcacaggctgttgtgaggactaagggtgcggcagtgcctggtacatgggagccagcgccggcagccaccatggcgtcacgcatagggttgcgcatgcagctcatgcgggagcaggcgcagcaggaggagcagcgggagcgcatgcagcaacaggctgtcatgcattacatgcagcagcagcagcagcagcaacagcagcagctcggagggccgcccaccccggccatcaatacccccgtccacttccagtcgccaccacctgtgcctggggaggtgttgaaggtgcagtcctacctggagaatcccacatcctaccatctgcagcagtcgcagcatcagaaggtgcgggagtacctgtccgagacctatgggaacaagtttgctgcccacatcagcccagcccagggctctccgaaacccccaccagccgcctccccaggggtgcgagctggacacgtgctgtcctcctccgctggcaacagtgctcccaatagccccatggccatgctgcacattggctccaaccctgagagggagttggatgatgtcattgacaacattatgcgtctggacgatgtccttggctacatcaatcctgaaatgcagatgcccaacacgctacccctgtccagcagccacctgaatgtgtacagcagcgacccccaggtcacagcctccctggtgggcgtcaccagcagctcctgccctgcggacctgacccagaagcgagagctcacagatgctgagagcagggccctggccaaggagcggcagaagaaagacaatcacaacttaattgaaaggagacgaaggttcaacatcaatgaccgcatcaaggagttgggaatgctgatccccaaggccaatgacctggacgtgcgctggaacaagggcaccatcctcaaggcctctgtggattacatccggaggatgcagaaggacctgcaaaagtccagggagctggagaaccactctcgccgcctggagatgaccaacaagcagctctggctccgtatccaggagctggagatgcaggctcgagtgcacggcctccctaccacctccccgtccggcatgaacatggctgagctggcccagcaggtggtgaagcaggagctgcctagcgaagagggcccaggggaggccctgatgctgggggctgaggtccctgaccctgagccactgccagctctgcccccgcaagccccgctgcccctgcccacccagccaccatccccattccatcacctggacttcagccacagcctgagctttgggggcagggaggacgagggtcccccgggctaccccgaacccctggcgccggggcatggctccccattccccagcctgtccaagaaggatctggacctcatgctcctggacgactcactgctaccgctggcctctgatccacttctgtccaccatgtcccccgaggcctccaaggccagcagccgccggagcagcttcagcatggaggagggcgatgtgctgtgaccctggctgcccctgtgccagggaacaggggccggcctgggggctgggagggccaggggcacctccctcccacccttcaggctgcactgtgtgtgaagtagccacctgccctgcctccctcctccccgttggcccctgtttggacttagtgcctgtctggcagcctgtggggtcaggagaagcacccccagggcagccctcttgactggcgcagtgggaagaggccttcagcccctctcccggagatggaatcgcggggcagggaggggcagggtgttctagaggtgagaagagggcctggtggagattccctgtcttctgagcccgagcccctcattaccagtgaaggacatgcttgaggggttcgggaagctcctcatctgaggcaactggtcctgggggtgctcaggcctgcctttttgggactcagatggcaggaggtccaccccgcagcctggtcctcggctctcccacaggtgggcaccccccactttggtgctaatagctctccaccaggtggtgtgagcgcgggggctgccagaagcgggaggggtcactgccggaagagcagctgccctccgacccctcactttgtgcctttagtaaacactgtgctttgtaaaaaaaaaaaaaaaaaaaaaaaaaaaaaaaaaaaaaaaaaaaaaaaaaaaaaaaaaaaaaaaaaaaaaaaaaaaaaaaaaaaaaaaaaaaaa

SEQ ID NO: 36 - protein, 476 aa, Homo sapien
MASRIGLRMQLMREQAQQEEQRERMQQQAVMHYMQQQQQQQQQQLGGPPTPAINTPVHFQSPPPVPGEVLKVQSYLENPTSYHLQQSQHQKVREYLSETYGNKFAAHISPAQGSPKPPPAASPGVRAGHVLSSSAGNSAPNSPMAMLHIGSNPERELDDVIDNIMRLDDVLGYINPEMQMPNTLPLSSSHLNVYSSDPQVTASLVGVTSSSCPADLTQKRELTDAESRALAKERQKKDNHNLIERRRRFNINDRIKELGMLIPKANDLDVRWNKGTILKASVDYIRRMQKDLQKSRELENHSRRLEMTNKQLWLRIQELEMQARVHGLPTTSPSGMNMAELAQQVVKQELPSEEGPGEALMLGAEVPDPEPLPALPPQAPLPLPTQPPSPFHHLDFSHSLSFGGREDEGPPGYPEPLAPGHGSPFPSLSKKDLDLMLLDDSLLPLASDPLLSTMSPEASKASSRRSSFSMEEGDVL

SEQ ID NO: 37 - DNA, 3900 bp, Homo sapien
cgatggccctgcccagtcccagacagaacctactacgtgcggcggcagctggggcgggaaggcgggcgctgggggcgctgcggccgctgcagcgcagggtccacctggtcggctgcacctgtggaggaggaggtggatttcaggcttcccgtagactggaagaatcggctcaaaaccgcttgcctcgcaggggctgagctggaggcagcgaggccgcccgacgcaggcttccggcgagacatggcagggcaaggatggcagcccggcggcagggcccggcgaggagcgcgaacccgcggccgcagttcccaggcgtctgcgggcgcgagcacgccgcgaccctgcgtgcgccggggcgggggggcggggcctcgcctgcacaaatagggacgagggggcggggcggccacaatttcgcgccaaacttgaccgcgcgttctgctgtaacgagcgggctcggaggtcctcccgctgctgtcatggttggttcgctaaactgcatcgtcgctgtgtcccagaacatgggcatcggcaagaacggggacctgccctggccaccgctcaggaatgaattcagatatttccagagaatgaccacaacctcttcagtagaaggtaaacagaatctggtgattatgggtaagaagacctggttctccattcctgagaagaatcgacctttaaagggtagaattaatttagttctcagcagagaactcaaggaacctccacaaggagctcattttctttccagaagtctagatgatgccttaaaacttactgaacaaccagaattagcaaataaagtagacatggtctggatagttggtggcagttctgtttataaggaagccatgaatcacccaggccatcttaaactatttgtgacaaggatcatgcaagactttgaaagtgacacgttttttccagaaattgatttggagaaatataaacttctgccagaatacccaggtgttctctctgatgtccaggaggagaaaggcattaagtacaaatttgaagtatatgagaagaatgattaatatgaaggtgttttctagtttaagttgttccccctccctctgaaaaaagtatgtatttttacattagaaaaggttttttgttgactttagatctataattatttctaagcaacttgtttttattccccactactcttctctctatcagataccatttatgagacattcttgctataactaagtgcttctccaagaccccaactgagtccccagcacctgctacagtgagctgccattccacacccatcacatgtggcactcttgccagtccttgacattgtcgggcttttcacatgttggtaatatttattaaagatgaagatccacatacccttcaactgagcagtttcactagtggaaataccaaaagcttcctacgtgtatatccagaggtttgtagataaatgttgccaccttgtttgtaacagtgaaaaattgaaaacaacctggaagtccagtgatgggaaaatgagtatgtttctgtcttagattggggaacccaaagcagattgcaagactgaaatttcagtgaaagcagtgtatttgctaggtcataccagaaatcatcaattgaggtacggagaaactgaactgagaaggtaagaaaagcaatttaaagtcagcgagcaggttctcattgataacaagctccatactgctgagatacagggaaatggaggggggaaagctggagtattgatcccgcccccctccttggttgtcagctccctgtcctgtgtgtgggcggaacatagtccagctgctctatagcaagtctcaggtgtttgcagtaagaagctgctggcatgcacgggaacagtgaatgccaaacacttaaagcaattcgatgtttaagtatgtaagttcttttttttttagacagcgtttcgctcttgttgcccaggctagcatgcaatggtgtgacctcggcttactgcaacctccgccttcccagattcaagcgattctcctgcctcaggctcccaagtagctaggaccaggtgcgcgccaccacgcccggctaatttttgtattttgtatttttagtagagatggggtttcaccatgttggtcaggctagtctcgaactcgtgaccgcaagcgattcacccacctcagcctcccaaagtgctgggattaccggcttgagccaccacacccggcacatcttcattctttttatgtagtaaaaagtataaggccacacatggtttatttgaagtattttataatttaaaaaaatacagaagcaggaaaaccaattataagttcaagtgagggatgatggttgcttgaaccaaagggttgcatgtagtaagaaattgtgatttaagatatattttaaagttataagtagcaggatattctgatggagtttgactttggttttgggcccagggagtttcagatgcctttgagaaatgaatgaagtagagagaaaataaaagaaaaaccagccaggcacagtggctcacacctgtaatcccagcgctttgggaggctaaggcaggcagatcacttgagaccagcttgggcaacatggcaaagccccatctctacaaaaaacacaaaaattagctgggcattgtggcgcacacctgtattcccatctagtcaggaagctgagatggaagaattaattgagcccacgagttcaaggctgcagtgagtcgtgattgtgccactgcactccagccggggtgacagaagagaccttgtctcgaaaacgaatctgaaaacaatggaaccatgccttcataattctagaaagttattttcaactgataaatctatattcacccaaataatcaagggtgaaggtaaaataatacatttttagacaagcaaagactcaggggttacctccatgtgccctttttagggaagctgttggagaaaatactccagcaaaatgaaggagtacacaaaccagagaatgacatgaatccagcaaataggatccaacacaggcaatattccagctatggagctagctttaaaaaggaacagtaaaaatattaatcggttagctgggtggaatggcccatgcctgtagtcccagctactcaggaggctcagcagcaggacgacttgagcccaagagttccagaccagcctggccaccttagtgagatcccttctcttaaaaataataacttattgccagatttggggcatttggaaagaagttcattgaagataaagcaaaagtaaaaaaaaaaaaaaaaaaaacaaggggaaagggttggttaggcaatcattctagggcagaaagaagtacaggataggaagagcataatacactgtttttctcaacaaggagcagtatgtacacagtcataatgatgtgactgcttagcccctaaatatggtaactactctgggacaatatgggaggaaaagtgaagattgtgatggtgtaagagctaatcctcatctgtcatatccagaaatcactatataatatataataatgaaatgactaagttatgtgaggaaaaaaacagaagacattgctaaaagagttaaaagtcattgctctggagaattaggagggatggggcaggggactgttaggatgcattataaactgaaaagcctttttaaaattttatgtattaatatatgcattcacttgaaaaactaaaaaaaaacaataatttggaaaaacccatgaaggtaactaacggaaggaaaaactaagagaatgaaaagtatttgcctctggaaagaacaactggcaggactgttgttttcattgtaagacttttggagccatttaattgtacttaaccattttcatctatttctttaataagaacaattccatcttaataaagagttacacttgttaata

SEQ ID NO: 38 - protein, 187 aa, Homo sapien
MVGSLNCIVAVSQNMGIGKNGDLPWPPLRNEFRYFQRMTTTSSVEGKQNLVIMGKKTWFSIPEKNRPLKGRINLVLSRELKEPPQGAHFLSRSLDDALKLTEQPELANKVDMVWIVGGSSVYKEAMNHPGHLKLFVTRIMQDFESDTFFPEIDLEKYKLLPEYPGVLSDVQEEKGIKYKFEVYEKND

SEQ ID NO: 39 - DNA, 6322 bp, Homo sapien
ctgagagcgacatgtccccggcggctcaggcggagcggcccgtggcgctgtttttctgagtccggggtggcctggcagccggccgaggacgagggtcggcgggggctgcccccgtggtggtggccgccatgctgggagcctgggcggttgagggaaccgctgtggcgctcctgcgactgctgctgctgctgctgccgccggcgatccggggacccgggctcggcgtggccggcgtggccggcgcggcgggggccgggctgcccgagagcgtcatttgggcggtcaacgcgggtggagaggcgcatgtggacgtgcacgggatccacttccgcaaggaccctttggaaggccgggtgggccgagcctcagactatggcatgaaactgccaatcctgcgttccaaccctgaggaccagatcctgtatcaaactgagcggtacaatgaggagacctttggctacgaagtgcccatcaaagaggagggggactacgtgctggtcttgaaatttgcagaggtctactttgcacagtcccagcaaaaggtatttgatgtacgattgaatggccacgtcgtggtgaaggacttggatatctttgatcgtgttgggcatagcacagctcacgatgaaattatacctatgagcatcagaaaggggaagctgagtgtccagggggaggtgtccaccttcacagggaaactctacattgagtttgtcaaggggtactatgacaatcccaaggtctgtgcactctacatcatggctgggacagtggatgatgtaccaaagcttcagcctcatccgggattggagaagaaagaagaggaagaagaagaagaagaatatgatgaagggtctaatctcaaaaaacagaccaataagaaccgggtgcagtcaggcccccgcacacccaacccctatgcctcggacaacagcagcctcatgtttcccatcctggtggccttcggagtcttcattccaaccctcttctgcctctgccggttgtgagaacaaatgactatcctgaacagggtggaggggtgtgggaaagaaaccagccatattggttttggtttctgtatttttcacaatgattaatgaacaaaaacaaagagaaaaaaaacacacatcaattaaaggagacaaaaagaggcagagcgagtagagagcagccctcattcaccacctggtcccagacgtgcttcagtcctcgtcctctctttgtggctggctcccagccttctctttcctcttgaggatacttagggtaaactggatccttcctgctcaaggatcctcatttgtatacctagtggaaaggactctgaactcagaggagtcactgttcctttttttaggttagaaattaacagcagggaaatgccatcttattacctgagacgaccagcactgggagttaggtacggtctgaagttatgtctagataagacttcagacgtcctgggattgaaagaatgtgtgtgaaggggtagaatttgtgcggtaaagacttaaaaaaaaaagtagggagattaaaaaaaaagaaagaaaatgcttccttatctggaagcctttctggattaatccagtgatggtcccacctttagtgtttgagctttgtcattgcttgtctccctggcatgtgccagttatagactgtccagcatccaagacgtttcggttatgtcgggtcctcagatcgcctctgacttgttaccacaacaaatcattttgatttcagtgcctgttggggacttgatttcttctcaggttttgtttgtttgtttgtttccttaatctggctcatttgaaatttcttctccctctcaaccatcccactaagttatagccaagaagggaaggagacacggggatttggggttctctgcttgaatgtcttctcctttaccacctcaccttgttggtacctccctccctggatctctgagccagcagccaggaggacctgacccagcagttctttactggcccctttgtagggccttgctgccagggggcagggatgctttccagcctgcagcaacagaacacttgaccttaaaagtctcttctggtctttggattagaaaaggcttatgttagcatagcttaagagcaacctcagagacttgagccctactaagtgactgaccactgtttagagtgtctggtatctgatgttcatttattcccatgttcttgtgtgtcacagttcagccagttttggtttatgcctagagctacttcaaggaactagactaattagctatataggcccagcgatgcttcttattgatcttaatagtatgcccttccttcccctgtcctttcatttctctatccaagtagcagtcaggttcttggtgtgatgggactgaaagaattccagtcagccagagccttggcagctctgaagctaaccttagcatctaagtgtcgatcttgaattccctgaaaaaatttctataggaaatgaagcttccctggtcccctcctttctggccattgtcatccatttcccagttagggcaacaatgaaggaggacccagccaagctagaaggaattttgtggatgggagacagcaggattagcttcagcttgggctggagcagtcaatataggatctcaggccaggcccgcttttctagaatgtgtttaattttgagtttgctttattagatatgttttttaagagctctgtatatttgaactgctccttatgtgacaaaataggtagctcttgggctcatgtcctgggttttggctctttaatgattactccaggccagcatttagtcgtttgagaattgtagcctgttgttttcgctgtgacttgggtctcagtgctagggtattgagtcaggcagctggagggttgtggcccgaggctgcagtcagaggtatacttcccatagtgcttcacacagctcccctgcttctaaaggataaggtactgtagccttggtcctggggaccacctgcctggggcagtggacatcctaactaaacaggcttctggcagtagctttggttcctatcccatcgaaattccccaaagccctgggccactgccattgggttagtcaagatgaaggaggaggactggctgcctccattttgccttgtttgttagtttgcctgggtctgtctgaggaaggagggggtcccgccttccacctcaacacatcccttcagtgactcagagtctcagaaggaaaccctgactcctggggccatttcctaatggtactgtaagccaagcagctttgcttctgcctctgtttccaagcccacccttttcccctgagctcagggttagggatgggcgctttcctctctggttgtgaacgaaaggaaggaacatctttctatggctaacaaaaactaaaggggaagtgaggaaacaggaagaagtatggtgggggctggggtagactcccctggagccaagcctatccagctaacaagagctccctggggctggtcacagctggctcatgatgctgaacttgaaagtttttttgtttttgtttttgttttgtggctcctccaagatataggtacatgaagtttaggttaaaggggtgggattctttatttttatttttgtattgtatgtgtcaagaattactctgttgttcaccttttgctttttgcactgtttgttctcttatctgtattttgagcttagtgctaggactgagaggctgcaccatagggaatgtatgggagatggtgaggggtgccagtgaggggtgcgtggaggagaggcctgggctcctctactggatctacactctgtcccaggtttttagatcccactgagcccagctgactgaaaacaaggacagtcagggtgaaacttcttttgccagaagtgtggcctgagttgaatttctgggaggatgacgcagatgtctgctgcagagctgggctgagagttctgcagtctagctctgacttaggtcaggggcctgttggtctctcattggacgtttttgggtctcactcatgcttactgaaacattgtgccaagaaactctgtgggatttgtgtcccttaaaccagactcacttttctgaaaaatctccattgttgaggagaggctgctcaatcgacaccccgagttctcatgactgggaagatagttttcttcaggtgtcaatggcgttagactcccaggaagactagccctgcccacagggccacctgttggtttgagagcgtgttcgtgttctcttgccctccctgcctaagagctactgggatcacgttagcgggcatttaggctttgatgagagggcacagtttgagttaggtttacctccccctttctgtgcctgggaactgtttggtccagctttagaactgtggttttgacttccttatctcttgggagaagcttctgttttaaggaatttctcttccttcttctcctgcctctagcctctcctggaaaggcctggatatggtttctaaaatctcagctgagaacttcagaaaacagcagcagtattttccttttcctagtgctaaaatccctttccctagaaattggctcaccttgggaaacccagggaaagaatcagcaggttctctgccctccctaggggttggggaaggacccaccccggtcagcacagtgccttttcctctcctgctctgagccagggtggggcattccctctagattcaggtttgggcaggggtcctatagtccctgccatggggctgcttccctgtcccttccctcccctttgctggcctactctggcataattcaagtgtcttcttgccttggggatccttagtggcatcaaatggcaacatggaatattgtcctccatgcccctccagaaggacctaggagagtaggtgagctttccaaagtgagagacgaatctttctttctttttttttttaaagggcaggatgggtatgctttgggctttctccttctgtggccccggaggaaggagagactgaggcaaggcaaagtgatagtacactgaagcagaaccggaaacacccaggaactgttcagaaatctcagaagaaatctgcttctcttcgatggaaagatataattaacgatcaaagagctctaagaaaattgcaaagaagccttaatgttcaagctttagaaagatcagagcaatttttctctttcagtccaaactaagactctctgtatttaaatctctctggggcaagagggctagatttcctcattttgttatgagactagattggtaccagtagatcagctgcctagcgagggcaggtttcttctttgcatctgtgtggcttgcttccagtctggcctgtcctttccagctgccttttgtctagcctgctatggggggccagattatcttgataagagcaggtgatttggggactagctgggttggtaggaaaagagcaggatggatctcttgggacaggttcccccaggagtataaacacaaggagccaggattgtcctggcagccaaggaaacagtagtgcctgtttgagttggcagagagggccttggcacctcttgcatccaggcagtcttgtgagatgggggcacatagcactggggaaagcagaactccattctcacctctattttgagcttcagtgctttatttcagtatgaggaaaaacaacaacaaactgaagtgcgctttccgtcctttcaaaggacaactgtcgggaagggagagccgagttgcgaggtaggaggggagcactggcagggagagacattcttgactcctctcttccctggtgtgttgtgatccagggaatgaaaagaaatttgaccctggattggttctctccttggacttaaggaatcttaccttttccttccacaaagttctcccaggcaaggaccagctgcccattctgagcccagggcagcctcttcaaccattattggtctaacctggcttgtcaggaaaccaagcccacccttccacattgggcctggctgctctattctgtaccaagtactggagaaaaagcatcaagttcttagcccttgtagcttctaccctagtttcccatcctctctctgtggaggccaaaccaactctttgccagcagccacaacatgcattgacagcggcacagtgagatataactgatgggctttgaacctggttggccggggaagctgtaggggtggatagagctggctttccttctgggctgtctccatctgaccctaccccttccatgtcccaccccactcccaccaaaaagtacaaaatcaggatgtttttcactgtccattgctttgtgttttaataaacaatttgcagtgac

SEQ ID NO: 40 - protein, 292 aa, Homo sapien
MLGAWAVEGTAVALLRLLLLLLPPAIRGPGLGVAGVAGAAGAGLPESVIWAVNAGGEAHVDVHGIHFRKDPLEGRVGRASDYGMKLPILRSNPEDQILYQTERYNEETFGYEVPIKEEGDYVLVLKFAEVYFAQSQQKVFDVRLNGHVVVKDLDIFDRVGHSTAHDEIIPMSIRKGKLSVQGEVSTFTGKLYIEFVKGYYDNPKVCALYIMAGTVDDVPKLQPHPGLEKKEEEEEEEEYDEGSNLKKQTNKNRVQSGPRTPNPYASDNSSLMFPILVAFGVFIPTLFCLCRL

SEQ ID NO: 41 - DNA, 2693 bp, Homo sapien
cgaaaaaagaggggaagagtattaaagaccatttctggctgggcagggcactctcagcagctcaactgcccagcgtgaccagtggccacctctgcagtgtcttccacaacctggtcttgactcgtctgctgaacaaatcctctgacctcaggccggctgtgaacgtagttcctgagagatagcaaacatgcccaacagtgagcccgcatctctgctggagctgttcaacagcatcgccacacaaggggagctcgtaaggtccctcaaagcgggaaatgcgtcaaaggatgaaattgattctgcagtaaagatgttggtgtcattaaaaatgagctacaaagctgccgcgggggaggattacaaggctgactgtcctccagggaacccagcacctaccagtaatcatggcccagatgccacagaagctgaagaggattttgtggacccatggacagtacagacaagcagtgcaaaaggcatagactacgataagctcattgttcggtttggaagtagtaaaattgacaaagagctaataaaccgaatagagagagccaccggccaaagaccacaccacttcctgcgcagaggcatcttcttctcacacagagatatgaatcaggttcttgatgcctatgaaaataagaagccattttatctgtacacgggccggggcccctcttctgaagcaatgcatgtaggtcacctcattccatttattttcacaaagtggctccaggatgtatttaacgtgcccttggtcatccagatgacggatgacgagaagtatctgtggaaggacctgaccctggaccaggcctatggcgatgctgttgagaatgccaaggacatcatcgcctgtggctttgacatcaacaagactttcatattctctgacctggactacatggggatgagctcaggtttctacaaaaatgtggtgaagattcaaaagcatgttaccttcaaccaagtgaaaggcattttcggcttcactgacagcgactgcattgggaagatcagttttcctgccatccaggctgctccctccttcagcaactcattcccacagatcttccgagacaggacggatatccagtgccttatcccatgtgccattgaccaggatccttactttagaatgacaagggacgtcgcccccaggatcggctatcctaaaccagccctgttgcactccaccttcttcccagccctgcagggcgcccagaccaaaatgagtgccagcgacccaaactcctccatcttcctcaccgacacggccaagcagatcaaaaccaaggtcaataagcatgcgttttctggagggagagacaccatcgaggagcacaggcagtttgggggcaactgtgatgtggacgtgtctttcatgtacctgaccttcttcctcgaggacgacgacaagctcgagcagatcaggaaggattacaccagcggagccatgctcaccggtgagctcaagaaggcactcatagaggttctgcagcccttgatcgcagagcaccaggcccggcgcaaggaggtcacggatgagatagtgaaagagttcatgactccccggaagctgtccttcgactttcagtagcactcgttttacatatgcttataaaagaagtgatgtatcagtaatgtatcaataatcccagcccagtcaaagcaccgccacctgtaggcttctgtctcatggtaattactgggcctggcctctgtaagcctgtgtatgttatcaatactgtttcttcctgtgagttccattatttctatctcttatgggcaaagcattgtgggtaattggtgctggctaacattgcatggtcggatagagaagtccagctgtgagtctctccccaaagcagccccacagtggagccttcggctggaagtccatgggccaccctgttcttgtccatggaggacttccgagggttccaagtatactcttaagacccactctgtttaaaaatatatattctatgtatgcgtatatggaattgaaatgtcattattgtaacctagaaagtgctttgaaatattgatgtggggaggtttattgagcacaagatgtatttcagcccatgccccctcccaaaaagaaattgataagtaaaagcttcgttatacatttgactaagaaatcacccagctttaaagctgcttttaacaatgaagattgaacagagttcagcaattttgattaaattaagacttgggggtgaaactttccagtttactgaactccagaccatgcatgtagtccactccagaaatcatgctcgcttcccttggcacaccagtgttctcctgccaaatgaccctagaccctctgtcctgcagagtcagggtggcttttcccctgactgtgtccgatgccaaggagtcctggcctccgcagatgcttcattttgacccttggctgcagtggaagtcagcacagagcagtgccctggctgtgtcctggacgggtggacttagctagggagaaagtcgaggcagcagccctcgaggccctcacagatgtctaggcaggcctcatttcatcacgcagcatgtgcaggcctggaagagcaaagccaaatctcagggaagtccttggttgatgtatctgggtctcctctggagcactctgccctcctgtcacccagtagagtaaataaacttccttggctcctaaaaaa

SEQ ID NO: 42 - protein, 471 aa, Homo sapien
MPNSEPASLLELFNSIATQGELVRSLKAGNASKDEIDSAVKMLVSLKMSYKAAAGEDYKADCPPGNPAPTSNHGPDATEAEEDFVDPWTVQTSSAKGIDYDKLIVRFGSSKIDKELINRIERATGQRPHHFLRRGIFFSHRDMNQVLDAYENKKPFYLYTGRGPSSEAMHVGHLIPFIFTKWLQDVFNVPLVIQMTDDEKYLWKDLTLDQAYGDAVENAKDIIACGFDINKTFIFSDLDYMGMSSGFYKNVVKIQKHVTFNQVKGIFGFTDSDCIGKISFPAIQAAPSFSNSFPQIFRDRTDIQCLIPCAIDQDPYFRMTRDVAPRIGYPKPALLHSTFFPALQGAQTKMSASDPNSSIFLTDTAKQIKTKVNKHAFSGGRDTIEEHRQFGGNCDVDVSFMYLTFFLEDDDKLEQIRKDYTSGAMLTGELKKALIEVLQPLIAEHQARRKEVTDEIVKEFMTPRKLSFDFQ

SEQ ID NO: 43 - DNA, 2693 bp, Homo sapien; identical to SEQ ID NO: 41

SEQ ID NO: 44 - protein, 471 aa, Homo sapien; identical to SEQ ID NO: 42

SEQ ID NO: 45 - DNA, 3137 bp, Homo sapien
gcggagcgtgtgagcagtactgcggcctcctctcctctcctaacctcgctctcgcggcctacctttacccgcccgcctgctcggcgaccagcggggatcctcccccagccgcaagtccacgaagaaagcaacgaatgaaaattatgaagacaacgagaagtcagactcctccgggtcgcgctccagctgcttcggcttcgtcgcctactctgtgaactccggggagagatctcgagtcaagattaagaccttaacccaccaacctgcctgttcggacaccccccgggccggccgctgtctgtccccttctccatcgccctctcccagaaagctccggtgcttggaccagctagagtctgagaaagaggagaggcgcgaacgccactccaaaaagagaagggttaaagagggcaaccctaacgatacgcttgactttctgtggctgggaacaccttccaccatgaccacctcagcaagttcccacttaaataaaggcatcaagcaggtgtacatgtccctgcctcagggtgagaaagtccaggccatgtatatctggatcgatggtactggagaaggactgcgctgcaagacccggaccctggacagtgagcccaagtgtgtggaagagttgcctgagtggaatttcgatggctccagtactttacagtctgagggttccaacagtgacatgtatctcgtgcctgctgccatgtttcgggaccccttccgtaaggaccctaacaagctggtgttatgtgaagttttcaagtacaatcgaaggcctgcagagaccaatttgaggcacacctgtaaacggataatggacatggtgagcaaccagcacccctggtttggcatggagcaggagtataccctcatggggacagatgggcacccctttggttggccttccaacggcttcccagggccccagggtccatattactgtggtgtgggagcagacagagcctatggcagggacatcgtggaggcccattaccgggcctgcttgtatgctggagtcaagattgcggggactaatgccgaggtcatgcctgcccagtgggaatttcagattggaccttgtgaaggaatcagcatgggagatcatctctgggtggcccgtttcatcttgcatcgtgtgtgtgaagactttggagtgatagcaacctttgatcctaagcccattcctgggaactggaatggtgcaggctgccataccaacttcagcaccaaggccatgcgggaggagaatggtctgaagtacatcgaggaggccattgagaaactaagcaagcggcaccagtaccacatccgtgcctatgatcccaagggaggcctggacaatgcccgacgtctaactggattccatgaaacctccaacatcaacgacttttctgctggtgtagccaatcgtagcgccagcatacgcattccccggactgttggccaggagaagaagggttactttgaagatcgtcgcccctctgccaactgcgaccccttttcggtgacagaagccctcatccgcacgtgtcttctcaatgaaaccggcgatgagcccttccagtacaaaaattaagtggactagacctccagctgttgagcccctcctagttcttcatcccactccaactcttccccctctcccagttgtcccgattgtaactcaaagggtggaatatcaaggtcgtttttttcattccatgtgcccagttaatcttgctttctttgtttggctgggatagaggggtcaagttattaatttcttcacacctaccctcctttttttccctatcactgaagctttttagtgcattagtggggaggagggtggggagacataaccactgcttccatttaatggggtgcacctgtccaataggcgtagctatccggacagagcacgtttgcagaagggggactcttcttccaggtagctgaaaggggaagacctgacgtactctggttaggttaggacttgccctcgtggtggaaacttttcttaaaaagttataaccaacttttctattaaaagtgggaattaggagagaaggtaggggttgggaatcagagagaatggctttggtctcttgcttgtgggactagcctggcttgggactaaatgccctgctctgaacacgaagcttagtataaactgatggatatccctaccttgaaagaagaaaaggttcttactgcttggtccttgatttatcacacaaagcagaatagtatttttatatttaaatgtaaagacaaaaaactatatgtatggttttgtggattatgtgtgttttgctaaaggaaaaaaccatccaggtcacggggcaccaaatttgagacaaatagtcggattagaaataaagcatctcattttgagtagagagcaagggaagtggttcttagatggtgatctgggattaggccctcaagacccttttgggtttctgccctgcccaccctctggagaaggtgggcactggattagttaacagacgacacgttactagcagtcacttgatctccgtggctttggtttaaaagacacacttgtccacataggtttagagataagagttggctgttcaacttgagcatgttactgacagagggggtattggggttattttctggtaggaatagcatgtcactaaagcaggccttttgatattaaattttttaaaaagcaaaattatagaagtttagattttaatcaaatttgtagggtttctaggtaatttttacagaattgcttgtttgcttcaactgtctcctacctctgctcttggaggagatggggacagggctggagtcaaaacacttgtaattttgtatcttgatgtctttgttaagactgctgaagaattattttttttcttttataataaggaataaaccccacctttattccttcatttcatctaccattttctggttcttgtgttggctgtggcaggccagctgtggttttcttttgccatgacaacttctaattgccatgtacagtatgttcaaagtcaaataactcctcattgtaaacaaactgtgtaactgcccaaagcagcacttataaatcagcctaacataaaaaaaaaaaaaaaaaaaaaaaaaaaaaaaaaaaaaaaaaaaaaaaa

SEQ ID NO: 46 - protein, 373 aa, Homo sapien
MTTSASSHLNKGIKQVYMSLPQGEKVQAMYIWIDGTGEGLRCKTRTLDSEPKCVEELPEWNFDGSSTLQSEGSNSDMYLVPAAMFRDPFRKDPNKLVLCEVFKYNRRPAETNLRHTCKRIMDMVSNQHPWFGMEQEYTLMGTDGHPFGWPSNGFPGPQGPYYCGVGADRAYGRDIVEAHYRACLYAGVKIAGTNAEVMPAQWEFQIGPCEGISMGDHLWVARFILHRVCEDFGVIATFDPKPIPGNWNGAGCHTNFSTKAMREENGLKYIEEAIEKLSKRHQYHIRAYDPKGGLDNARRLTGFHETSNINDFSAGVANRSASIRIPRTVGQEKKGYFEDRRPSANCDPFSVTEALIRTCLLNETGDEPFQYKN

SEQ ID NO: 47 - DNA, 1956 bp, Homo sapien
  Unsure 63: Unknown base
ccgagcgccccgcctgctccgtgtccgacatgctgcgccgcgctctgctgtgcctgccgtggnccgccctggtgcgcgccgacgcccccgaggaggaggaccacgtcttggtgctgcggaaaagcaacttcgcggaggcgctggcggcccacaagtacccgccggtggagttccatgccccctggtgtggccactgcaaggctctggcccctgagtatgccaaagccgctgggaagctgaaggcagaaggttccgagatcaggttggccaaggtggacgccacggaggagtctgacctagcccagcagtacggcgtgcgcggctatcccaccatcaagttcttcaggaatggagacacggcttcccccaaggaatatacagctggcagagaggctgatgacatcgtgaactggctgaagaagcgcacgggcccggctgccaccaccctgcctgacggcgcagctgcagagtccttggtggagtccagcgaggtggccgtcatcggcttcttcaaggacgtggagtcggactctgccaagcagtttttgcaggcagcagaggccatcgatgacataccatttgggatcacttccaacagtgacgtgttctccaaataccagctcgacaaagatggggttgtcctctttaagaagtttgatgaaggccggaacaactttgaaggggaggtcaccaaggagaacctgctggactttatcaaacacaaccagctgccccttgtcatcgagttcaccgagcagacagccccgaagatttttggaggtgaaatcaagactcacatcctgctgttcttgcccaagagtgtgtctgactatgacggcaaactgagcaacttcaaaacagcagccgagagcttcaagggcaagatcctgttcatcttcatcgacagcgaccacaccgacaaccagcgcatcctcgagttctttggcctgaagaaggaagagtgcccggccgtgcgcctcatcaccttggaggaggagatgaccaagtacaagcccgaatcggaggagctgacggcagagaggatcacagagttctgccaccgcttcctggagggcaaaatcaagccccacctgatgagccaggagctgccggaggactgggacaagcagcctgtcaaggtgcttgttgggaagaactttgaagacgtggcttttgatgagaaaaaaaacgtctttgtggagttctatgccccatggtgtggtcactgcaaacagttggctcccatttgggataaactgggagagacgtacaaggaccatgagaacatcgtcatcgccaagatggactcgactgccaacgaggtggaggccgtcaaagtgcacggcttccccacactcgggttctttcctgccagtgccgacaggacggtcattgattacaacggggaacgcacgctggatggttttaagaaattcctagagagcggtggccaagatggggcaggggatgttgacgacctcgaggacctcgaagaagcagaggagccagacatggaggaagacgatgaccagaaagctgtgaaagatgaactgtaatacgcaaagccggacccgggcgctgccgagacccctcgggggctgcacacccagcagcagcgcacgcctccgaagcctgcggcctcgcttgaaggagggcgtcgccggaaacccaaggaacctctctgaagtgacacctcacccctacacaccgtccgttcacccccgtctcttccttctgcttttcggtttttggaaaacccggatcctactctaggcagcccaccttggtgggcttgtttcctgaaaccatgatgtactttttcatacatgagtctgtccagagtgcttgctaccgtgttcggagtctcgctgcctccctcccgcgggaggttctcctctttttgaaaattccgtccgtgggatttttagacatttttacgacatcagggtatttgtt

SEQ ID NO: 48 - protein, 508 aa, Homo sapien
  unsure 12: unknown amino acid
  Unsure 63: Unknown amino acid
MLRRALLCLPWXALVRADAPEEEDHVLVLRKSNFAEALAAHKYPPVEFHAPWCGHCKALAPEYAKAAGKLKAEGSEIRLAKVDATEESDLAQQYGVRGYPTIKFFRNGDTASPKEYTAGREADDIVNWLKKRTGPAATTLPDGAAAESLVESSEVAVIGFFKDVESDSAKQFLQAAEAIDDIPFGITSNSDVFSKYQLDKDGVVLFKKFDEGRNNFEGEVTKENLLDFIKHNQLPLVIEFTEQTAPKIFGGEIKTHILLFLPKSVSDYDGKLSNFKTAAESFKGKILFIFIDSDHTDNQRILEFFGLKKEECPAVRLITLEEEMTKYKPESEELTAERITEFCHRFLEGKIKPHLMSQELPEDWDKQPVKVLVGKNFEDVAFDEKKNVFVEFYAPWCGHCKQLAPIWDKLGETYKDHENIVIAKMDSTANEVEAVKVHGFPTLGFFPASADRTVIDYNGERTLDGFKKFLESGGQDGAGDVDDLEDLEEAEEPDMEEDDDQKAVKDEL

SEQ ID NO: 49 - DNA, 595 bp, Homo sapien
gggcaaggctgggccgggaagggcgtgggttgaggagaggctccagacccgcacgccgcgcgcacagagctctcagcgccgctcccagccacagcctcccgcgcctcgctcagctccaacatggcaaaaatctccagccctacagagactgagcggtgcatcgagtccctgattgctgtcttccagaagtatgctggaaaggatggttataactacactctctccaagacagagttcctaagcttcatgaatacagaactagctgccttcacaaagaaccagaaggaccctggtgtccttgaccgcatgatgaagaaactggacaccaacagtgatggtcagctagatttctcagaatttcttaatctgattggtggcctagctatggcttgccatgactccttcctcaaggctgtcccttcccagaagcggacctgaggaccccttggccctggccttcaaacccaccccctttccttccagcctttctgtcatcatctccacagcccacccatcccctgagcacactaaccacctcatgcaggccccacctgccaatagtaataaagcaatgtcacttttttaaaacatgaaa

SEQ ID NO: 50 - protein, 105 aa, Homo sapien
MAKISSPTETERCIESLIAVFQKYAGKDGYNYTLSKTEFLSFMNTELAAFTKNQKDPGVLDRMMKKLDTNSDGQLDFSEFLNLIGGLAMACHDSFLKAVPSQKRT

SEQ ID NO: 51 - DNA, 521 bp, Homo sapien
tcttcctcggcgctgcctacggaggtggcagccatctccttctcggcatcatggccgccctcagaccccttgtgaagcccaagatcgtcaaaaagagaaccaagaagttcatccggcaccagtcagaccgatatgtcaaaattaagcgtaactggcggaaacccagaggcattgacaacagggttcgtagaagattcaagggccagatcttgatgcccaacattggttatggaagcaacaaaaaaacaaagcacatgctgcccagtggcttccggaagttcctggtccacaacgtcaaggagctggaagtgctgctgatgtgcaacaaatcttactgtgccgagatcgctcacaatgtttcctccaagaaccgcaaagccatcgtggaaagagctgcccaactggccatcagagtcaccaaccccaatgccaggctgcgcagtgaagaaaatgagtaggcagctcatgtgcacgttttctgtttaaataaatgtaaaaactgccatctggcatcttccttc

SEQ ID NO: 52 - protein, 135 aa, Homo sapien [sequence omitted]

SEQ ID NO: 53 - DNA, 1207 bp, Homo sapien
gagacagcgccggggcaagtgagagccggacgggcactgggcgactctgtgcctcgctgaggaaaaataactaaacatgggcaaaggagatcctaagaagccgagaggcaaaatgtcatcatatgcattttttgtgcaaacttgtcgggaggagcataagaagaagcacccagatgcttcagtcaacttctcagagttttctaagaagtgctcagagaggtggaagaccatgtctgctaaagagaaaggaaaatttgaagatatggcaaaggcggacaaggcccgttatgaaagagaaatgaaaacctatatccctcccaaaggggagacaaaaaagaagttcaaggatcccaatgcacccaagaggcctccttcggccttcttcctcttctgctctgagtatcgcccaaaaatcaaaggagaacatcctggcctgtccattggtgatgttgcgaagaaactgggagagatgtggaataacactgctgcagatgacaagcagccttatgaaaagaaggctgcgaagctgaaggaaaaatacgaaaaggatattgctgcatatcgagctaaaggaaagcctgatgcagcaaaaaagggagttgtcaaggctgaaaaaagcaagaaaaagaaggaagaggaggaagatgaggaagatgaagaggatgaggaggaggaggaagatgaagaagatgaagatgaagaagaagatgatgatgatgaataagttggttctagcgcagtttttttttcttgtctataaagcatttaacccccctgtacacaactcactccttttaaagaaaaaaattgaaatgtaaggctgtgtaagatttgtttttaaactgtacagtgtctttttttgtatagttaacacactaccgaatgtgtctttagatagccctgtcctggtggtattttcaatagccactaaccttgcctggtacagtatgggggttgtaaattggcatggaaatttaaagcaggttcttgttggtgcacagcacaaattagttatatatggggatggtagttttttcatcttcagttgtctctgatgcagcttatacgaaataattgttgttctgttaactgaataccactctgtaattgcaaaaaaaaaaaaagttgcagctgttttgttgacattctgaatgcttctaagtaaatacaattttttttattaaaaaaaaaaaaaaaaaaaaaaaaa

SEQ ID NO: 54 - protein, 215 aa, Homo sapien
MGKGDPKKPRGKMSSYAFFVQTCREEHKKKHPDASVNFSEFSKKCSERWKTMSAKEKGKFEDMAKADKARYEREMKTYIPPKGETKKKFKDPNAPKRPPSAFFLFCSEYRPKIKGEHPGLSIGDVAKKLGEMWNNTAADDKQPYEKKAAKLKEKYEKDIAAYRAKGKPDAAKKGVVKAEKSKKKKEEEEDEEDEEDEEEEEDEEDEDEEEDDDDE

SEQ ID NO: 55 - DNA, 4674 bp, Homo sapien
  Unsure 220-221, 256-257: Unknown base
cgaggaccggggctgtccgagatacggccttcatatccctcttcctcccctggactctttctgagctcagagccgccgcagccgggacaggagggcaggctttctccaaccatcatgctgcggagcatattacctgtacgccctggctccgggagcggcagtcgagtatcctctggtcaggcggcgcgggcggcgcctcagcggaagagcgggcctctgnnggccgcatgtgaccaacccccggccccctcacccnncacgtggttggaggtttccagaagcgctgccgccaccgcatcgcgcagctctttgccgtcggagcgcttgtttgctgcctcgtactcctccatttatccgccatgataagtgccagccgagctgcagcagcccgtctcgtgggcgccgcagcctcccggggccctacggccgcccgccaccaggatagctggaatggccttagtcatgaggcttttagacttgtttcaaggcgggattatgcatcagaagcaatcaagggagcagttgttggtattgatttgggtactaccaactcctgcgtggcagttatggaaggtaaacaagcaaaggtgctggagaatgccgaaggtgccagaaccaccccttcagttgtggcctttacagcagatggtgagcgacttgttggaatgccggccaagcgacaggctgtcaccaacccaaacaatacattttatgctaccaagcgtctcattggccggcgatatgatgatcctgaagtacagaaagacattaaaaatgttccctttaaaattgtccgtgcctccaatggtgatgcctgggttgaggctcatgggaaattgtattctccgagtcagattggagcatttgtgttgatgaagatgaaagagactgcagaaaattacttggggcacacagcaaaaaatgctgtgatcacagtcccagcttatttcaatgactcgcagagacaggccactaaagatgctggccagatatctgggactgaatgtgcttcgggtgattaatgagcccacagctgctgctcttgcctatggtctagacaaatcagaagacaaagtcattgctgtatatgatttaggtggtggaacttttgatatttctatcctggaaattcagaaaggagtatttgaggtgaaatccacaaatggggataccttcttaggtggggaagactttgaccaggccttgctacggcacattgtgaaggagttcaagagagagacaggggttgatttgactaaagacaacatggcacttcagagggtacgggaagctgctgaaaaggctaaatgtgaactctcctcatctgtgcagactgacatcaatttgccctatcttacaatggattcttctggacccaagcatttgaatatgaagttgacccgtgctcaatttgaagggattgtcactgatctaatcagaaggactatcgctccatgccaaaaagctatgcaagatgcagaagtcagcaagagtgacataggagaagtgattcttgtgggtggcatgactaggatgcccaaggttcagcagactgtacaggatctttttggcagagccccaagtaaagctgtcaatcctgatgaggctgtggccattggagctgccattcagggaggtgtgttggccggcgatgtcacggatgtgctgctccttgatgtcactcccctgtctctgggtattgaaactctaggaggtgtctttaccaaacttattaataggaataccactattccaaccaagaagagccaggtattctctactgccgctgatggtcaaacgcaagtggaaattaaagtgtgtcagggtgaaagagagatggctggagacaacaaactccttggacagtttactttgattggaattccaccagcccctcgtggagttcctcagattgaagttacatttgacattgatgccaatgggatagtacatgtttctgctaaagataaaggcacaggacgtgagcagcagattgtaatccagtcttctggtggattaagcaaagatgatattgaaaatatggttaaaaatgcagagaaatatgctgaagaagaccggcgaaagaaggaacgagttgaagcagttaatatggctgaaggaatcattcacgacacagaaaccaagatggaagaattcaaggaccaattacctgctgatgagtgcaacaagctgaaagaagagatttccaaaatgagggagctcctggctagaaaagacagcgaaacaggagaaaatattagacaggcagcatcctctcttcagcaggcatcattgaagctgttcgaaatggcatacaaaaagatggcatctgagcgagaaggctctggaagttctggcactggggaacaaaaggaagatcaaaaggaggaaaaacagtaataatagcagaaattttgaagccagaaggacaacatatgaagcttaggagtgaagagacttcctgagcagaaatgggcgaacttcagtctttttactgtgtttttgcagtattctatatataatttccttaatttgtaaatttagtgaccattagctagtgatcatttaatggacagtgattctaacagtataaagttcacaatattctatgtccctagcctgtcatttttcagctgcatgtaaaaggaggtaggatgaattgatcattataaagatttaactattttatgctgaagtgaccatattttcaaggggtgaaaccatctcgcacacagcaatgaaggtagtcatccatagacttgaaatgagaccacatatggggatgagatccttctagttagcctagtactgctgtactggcctgtatgtacatggggtccttcaactgaggccttgcaagtcaagctggctgtgccatgtttgtagatggggcagaggaatctagaacaatgggaaacttagctatttatattaggtacagctattaaaacaaggtaggaatgaggctagacctttaacttccctaaggcatacttttctagctaccttctgccctgtgtctggcacctacatccttgatgattgttctcttacccattctggaatttttttttttttaaataaatacagaaagcatcttgatctcttgtttgtgaggggtgatgccctgagatttagcttcaagaatatgccatggctcatgcttcccatatttcccaaagagggaaatacaggatttgctaacactggttaaaaatgcaaattcaagatttggaagggctgttataatgaaataatgagcagtatcagcatgtgcaaatcttgtttgaaggattttattttctccccttagacctttggtacatttagaatcttgaaagtttctagatctctaacatgaaagtttctagatctctaacatgaaagtttttagatctctaacatgaaaaccaaggtggctattttcaggttgctttcagctccaagtagaaataaccagaattggcttacattaaagaaactgcatctagaaataagtcctaagatactatttctatggctcaaaaataaaaggaacccagatttctttccctatttctgcttttctgtcctcagtgtactggcttgtcccaaattctctgatgtagttctaataattatcatgtgctgacaacctgagcagaaaggcaactacatctttattcaatgttaagatttcccaaaagtcttccagcacatttcccttatgtttcatggatgaatgtcatatgccatgttcaaaagagtctgttatcaagatgggcttagaatatcagacacaatggctccttttataatgttttgtaatatgtagaaatgagattactgtatttccaaaaatcagtataagaaatcaatttaatttgcaagtatgaaggaagtgatttagacaacatttttggaagattcagtgcttgttaacacccatgtaaaagattcttgggattcgtgaaaaattctaggctcaggtttccaaccacatgaacactcaatgggaacattgtaggattatgaaggattgttatatggtgtgttggaaaataacttttagcatttttggttggcccttgcccactgcctctactgtctcctaaagataactttaaaagccctccaggatttccaaagtactccagttgagaactactggcttaatgctagtcaagattcatccttgggatcagagagaggagccaaatgcccaagcaaaatatatatttgagttctattaggagggagaagttgcttgggtatgggtggacacagtatttcagtcacctatcagtaaagctaatagcataaatagcaagaaggtatatggagattccctacagccaataggatatatatctagaataagatttactgtaagaaagaaactggctcacaattatggaaccgaggtcccacccacagtccactgctgggaaagctgttggggtaaaatttcagtgaccaggaacacagtggtgtcctagtccgaggttagaagaatatggatgtcttagctctggcagttctatataggcccttaactgattagatgatgtccactcacctcaaagcagagcaatctccaattcaatactaatctcttctggagagagacaaatgtttaacccgttaaatggcatcaatggctaaactgacacataaaattaactatcacaaaag

SEQ ID NO: 56 - protein, 799 aa, Homo sapien
  unsure 74, 86: unknown amino acid
  Unsure 220-221, 256-257: Unknown amino acid
RGPGLSEIRPSYPSSSPGLFLSSEPPQPGQEGRLSPTIMLRSILPVRPGSGSGSRVSSGQAARAAPQRKSGPLXAACDQPPAPSPXTWLEVSRSAAATASRSSLPSERLFAASYSSIYPPISASRAAAARLVGAAASRGPTAARHQDSWNGLSHEAFRLVSRRDYASEAIKGAVVGIDLGTTNSCVAVMEGKQAKVLENAEGARTTPSVVAFTADGERLVGMPAKRQAVTNPNNTFYATKRLIGRRYDDPEVQKDIKNVPFKIVRASNGDAWVEAHGKLYSPSQIGAFVLMKMKETAENYLGHTAKNAVITVPAYFNDSQRQAPLKMLARYLGLNVLRVINEPTAAALAYGLDKSEDKVIAVYDLGGGTFDISILEIQKGVFEVKSTNGDTFLGGEDFDQALLRHIVKEFKRETGVDLTKDNMALQRVREAAEKAKCELSSSVQTDINLPYLTMDSSGPKHLNMKLTRAQFEGIVTDLIRRTIAPCQKAMQDAEVSKSDIGEVILVGGMTRMPKVQQTVQDLFGRAPSKAVNPDEAVAIGAAIQGGVLAGDVTDVLLLDVTPLSLGIETLGGVFTKLINRNTTIPTKKSQVFSTAADGQTQVEIKVCQGEREMAGDNKLLGQFTLIGIPPAPRGVPQIEVTFDIDANGIVHVSAKDKGTGREQQIVIQSSGGLSKDDIENMVKNAEKYAEEDRRKKERVEAVNMAEGIIHDTETKMEEFKDQLPADECNKLKEEISKMRELLARKDSETGENIRQAASSLQQASLKLFEMAYKKMASEREGSGSSGTGEQKEDQKEEKQ

SEQ ID NO: 57 - DNA, 2852 bp, Homo sapien
ggaggtttccagaagcgctgccgccaccgcatcgcgcagctctttgccgtcggagcgcttgtttgctgcctcgtactcctccatttatccgccatgataagtgccagccgagctgcagcagcccgtctcgtgggcgccgcagcctcccggggccctacggccgcccgccaccaggatagctggaatggccttagtcatgaggcttttagacttgtttcaaggcgggattatgcatcagaagcaatcaagggagcagttgttggtattgatttgggtactaccaactcctgcgtggcagttatggaaggtaaacaagcaaaggtgctggagaatgccgaaggtgccagaaccaccccttcagttgtggcctttacagcagatggtgagcgacttgttggaatgccggccaagcgacaggctgtcaccaacccaaacaatacattttatgctaccaagcgtctcattggccggcgatatgatgatcctgaagtacagaaagacattaaaaatgttccctttaaaattgtccgtgcctccaatggtgatgcctgggttgaggctcatgggaaattgtattctccgagtcagattggagcatttgtgttgatgaagatgaaagagactgcagaaaattacttggggcacacagcaaaaaatgctgtgatcacagtcccagcttatttcaatgactcgcagagacaggccactaaagatgctggccagatatctggactgaatgtgcttcgggtgattaatgagcccacagctgctgctcttgcctatggtctagacaaatcagaagacaaagtcattgctgtatatgatttaggtggtggaacttttgatatttctatcctggaaattcagaaaggagtatttgaggtgaaatccacaaatggggataccttcttaggtggggaagactttgaccaggccttgctacggcacattgtgaaggagttcaagagagagacaggggttgatttgactaaagacaacatggcacttcagagggtacgggaagctgctgaaaaggctaaatgtgaactctcctcatctgtgcagactgacatcaatttgccctatcttacaatggattcttctggacccaagcatttgaatatgaagttgacccgtgctcaatttgaagggattgtcactgatctaatcagaaggactatcgctccatgccaaaaagctatgcaagatgcagaagtcagcaagagtgacataggagaagtgattcttgtgggtggcatgactaggatgcccaaggttcagcagactgtacaggatctttttggcagagccccaagtaaagctgtcaatcctgatgaggctgtggccattggagctgccattcagggaggtgtgttggccggcgatgtcacggatgtgctgctccttgatgtcactcccctgtctctgggtattgaaactctaggaggtgtctttaccaaacttattaataggaataccactattccaaccaagaagagccaggtattctctactgccgctgatggtcaaacgcaagtggaaattaaagtgtgtcagggtgaaagagagatggctggagacaacaaactccttggacagtttactttgattggaattccaccagcccctcgtggagttcctcagattgaagttacatttgacattgatgccaatgggatagtacatgtttctgctaaagataaaggcacaggacgtgagcagcagattgtaatccagtcttctggtggattaagcaaagatgatattgaaaatatggttaaaaatgcagagaaatatgctgaagaagaccggcgaaagaaggaacgagttgaagcagttaatatggctgaaggaatcattcacgacacagaaaccaagatggaagaattcaaggaccaattacctgctgatgagtgcaacaagctgaaagaagagatttccaaaatgagggagctcctggctagaaaagacagcgaaacaggagaaaatattagacaggcagcatcctctcttcagcaggcatcactgaagctgttcgaaatggcatacaaaaagatggcatctgagcgagaaggctctggaagttctggcactggggaacaaaaggaagatcaaaaggaggaaaaacagtaataatagcagaaattttgaagccagaaggacaacatatgaagcttaggagtgaagagacttcctgagcagaaatgggcgaacttcagtctttttactgtgtttttgcagtattctatatataatttccttaatttgtaaatttagtgaccattagctagtgatcatttaatggacagtgattctaacagtataaagttcacaatattctatgtccctagcctgtcatttttcagctgcatgtaaaaggaggtaggatgaattgatcattataaagatttaactattttatgctgaagtgaccatattttcaaggggtgaaaccatctcgcacacagcaatgaaggtagtcatccatagacttgaaatgagaccacatatggggatgagatccttctagttagcctagtactgctgtactggcctgtatgtacatggggtccttcaactgaggccttgcaagtcaagctggctgtgccatgtttgtagatggggcagaggaatctagaacaatgggaaacttagctatttatattaggtacagctattaaaacaaggtaggaatgaggctagacctttaacttccctaaggcatacttttctagctaccttctgccctgtgtctggcacctacatccttgatgattgttctcttacccattctggaatttttttttttttaaataaatacagaaagcatcttgaaaaaaaaaaaaaaaaaa

SEQ ID NO: 58 - protein, 679 aa, Homo sapien
MISASRAAAARLVGAAASRGPTAARHQDSWNGLSHEAFRLVSRRDYASEAIKGAVVGIDLGTTNSCVAVMEGKQAKVLENAEGARTTPSVVAFTADGERLVGMPAKRQAVTNPNNTFYATKRLIGRRYDDPEVQKDIKNVPFKIVRASNGDAWVEAHGKLYSPSQIGAFVLMKMKETAENYLGHTAKNAVITVPAYFNDSQRQATKDAGQISGLNVLRVINEPTAAALAYGLDKSEDKVIAVYDLGGGTFDISILEIQKGVFEVKSTNGDTFLGGEDFDQALLRHIVKEFKRETGVDLTKDNMALQRVREAAEKAKCELSSSVQTDINLPYLTMDSSGPKHLNMKLTRAQFEGIVTDLIRRTIAPCQKAMQDAEVSKSDIGEVILVGGMTRMPKVQQTVQDLFGRAPSKAVNPDEAVAIGAAIQGGVLAGDVTDVLLLDVTPLSLGIETLGGVFTKLINRNTTIPTKKSQVFSTAADGQTQVEIKVCQGEREMAGDNKLLGQFTLIGIPPAPRGVPQIEVTFDIDANGIVHVSAKDKGTGREQQIVIQSSGGLSKDDIENMVKNAEKYAEEDRRKKERVEAVNMAEGIIHDTETKMEEFKDQLPADECNKLKEEISKMRELLARKDSETGENIRQAASSLQQASLKLFEMAYKKMASEREGSGSSGTGEQKEDQKEEKQ

SEQ ID NO: 59 - DNA, 2852 bp, Homo sapien; identical to SEQ ID NO: 57

SEQ ID NO: 60 - protein, 679 aa, Homo sapien; identical to SEQ ID NO: 58

SEQ ID NO: 61 - DNA, 1153 bp, Homo sapien
gccgccgccgccatgaacattttccggctgactggggacctgtcccacctggcggccatcgtcatcctgctgctgaagatctggaagacgcgctcctgcgccggtatttctgggaaaagccagcttctgtttgcactggtcttcacaactcgttacctggatctttttacttcatttatttcattgtataacacatctatgaaggttatctaccttgcctgctcctatgccacagtgtacctgatctacctgaaatttaaggcaacctacgatggaaatcatgataccttccgagtggagtttctggtggtccctgtgggaggcctctcatttttagttaatcacgatttctctcctcttgagatcctctggaccttctccatctacctggagtccgtggctatccttccgcagctgtttatgatcagcaagactggggaggccgagaccatcaccacccactacctgttcttcctgggcctctatcgtgctttgtatcttgtcaactggatctggcgcttctactttgagggcttctttgacctcattgctgtggtggccggcgtagtccagaccatcctatactgtgacttcttctacttgtacattacaaaagtactcaagggaaagaagctcagtttgccagcataagtgccaaagaccatcaccagcatctgtccttcagggtgctcggacagaattcttaccacagcaaaggcataagatgcttgatacggaaaatcagaaacttaactcttttgttgcagatagtcatcagtggctctgtaaaaacgcagaggaaaagagccagaaggtttctgtttaatgcatcttgccttatctttttttattactgtgtacaaagatttttttacacaaagaaacttaatgctgtattaataaattcagtgtgtagcttcaattgggatagttccaaaagtgaagattttgtgaggaataagtgcaaattttttttttattttaaaaaattctttgaaactcttaagtctttgtgtctgcaatgaaattgtactccttgacagttgatagattatgtattcttccatccctcaaacttgcattccactatatttattttttggcaaaagatgagctgtatttgtttgaaatctgagacactatgttcaattgg

SEQ ID NO: 62 - protein, 212 aa, Homo sapien
MNIFRLTGDLSHLAAIVILLLKIWKTRSCAGISGKSQLLFALVFTTRYLDLFTSFISLYNTSMKVIYLACSYATVYLIYLKFKATYDGNHDTFRVEFLVVPVGGLSFLVNHDFSPLEILWTFSIYLESVAILPQLFMISKTGEAETITTHYLFFLGLYRALYLVNWIWRFYFEGFFDLIAVVAGVVQTILYCDFFYLYITKVLKGKKLSLPA

SEQ ID NO: 63 - DNA, 2339 bp, Homo sapien
ggtccaccatggccctgctgcactccggccgcgtcctccccgggatcgccgccgccttccacccgggcctcgccgccgcggcctctgccagagccagctcctggtggacccatgtggaaatgggacctccagatcccattctgggagtcactgaagcctttaagagggacaccaatagcaaaaagatgaatctgggagttggtgcctaccgggatgataatggaaagccttacgttctgcctagcgtccgcaaggcagaggcccagattgccgcaaaaaatttggacaaggaatacctgcccattgggggactggctgaattttgcaaggcatctgcagaactagccctgggtgagaacagcgaagtcttgaagagtggccggtttgtcactgtgcagaccatttctggaactggagccttaaggatcggagccagttttctgcaaagattttttaagttcagccgagatgtctttctgcccaaaccaacctggggaaaccacacacccatcttcagggatgctggcatgcagctacaaggttatcggtattatgaccccaagacttgcggttttgacttcacaggcgctgtggaggatatttcaaaaataccagagcagagtgttcttcttctgcatgcctgcgcccacaatcccacgggagtggacccgcgtccggaacagtggaaggaaatagcaacagtggtgaagaaaaggaatctctttgcgttctttgacatggcctaccaaggctttgccagtggtgatggtgataaggatgcctgggctgtgcgccacttcatcgaacagggcattaatgtttgcctctgccaatcatatgccaagaacatgggcttatatggtgagcgtgtaggagccttcactatggtctgcaaagatgcggatgaagccaaaagggtagagtcacagttgaagatcttgatccgtcccatgtattccaaccctcccctcaatggggcccggattgctgctgccattctgaacaccccagatttgcgaaaacaatggctgcaagaagtgaaaggcatggctgaccgcatcattggcatgcggactcaactggtctccaacctcaagaaggagggttccacccacaattggcaacacatcaccgaccaaattggcatgttctgtttcacagggctaaagcctgaacaggtggagcggctgatcaaggagttctccatctacatgacaaaagatggccgcatctctgtggcaggggtcacctccagcaacgtgggctaccttgcccatgccattcaccaggtcaccaagtaatgtccctgggtcgaggaaacagagacaacctttctgtcttcagcctctgctattgagagcttcacacagacaatgagagagggtggatggtggtgagtggatcatttctttcagccacagtgtgtaacactcagcatttgaatgtttctcagaaaagaacatgtagtgacacagggcagaggcatccatggctggcgtctggaatattaaaccaaactctccccggtccttttttctccaacttttctcaaagagtttacatgtgcaagaaagtcatcgcaccaaaaaacctgtcaattatgccattgcaatatttcagaagctttaactgaagtgtcaggttcctcgtgagaaacaagcacaccttagaggctttgagagaaggccagctagttctgtcatgagtagtcggcctcgtgtctgtcctcccatcttggaacaaccttatcaacaggccgcactgcagaaatgatgttttatgaaaaccatgagctgctgccactccagcaagggaaataatgcagtttcctgtcttatttaagaaaaagagaaggctctcttttctcccttgtcattgccgttcttttccttacacgcaaaacatttttaactattgcagtttcatcccattctactgcttgattgaccatcaactccatcctatcgagattatttaagaatgaagaacataatttttctgctgatgccgtaccctcacccttttcagcaaagaatagtggagagtaggaaactgtactttatctcggcatcctcttgaatgatagtgcaagtttctccagttgggatgttgtctctgcccggttggacctcctccctttgttgaatgtggtgtgcagcctctcatctcacactgtgagtccagcggcgcagggtggtaccaggaaagaggatattctaggcttgcgtgctgctagctgggttcaggcttcacccactggaaagaaccaccatctgctctaaccatgtagacttattgcggcctggttttctctgttacaataaaattactgtagaccc

SEQ ID NO: 64 - protein, 430 aa, Homo sapien
MALLHSGRVLPGIAAAFHPGLAAAASARASSWWTHVEMGPPDPILGVTEAFKRDTNSKKMNLGVGAYRDDNGKPYVLPSVRKAEAQIAAKNLDKEYLPIGGLAEFCKASAELALGENSEVLKSGRFVTVQTISGTGALRIGASFLQRFFKFSRDVFLPKPTWGNHTPIFRDAGMQLQGYRYYDPKTCGFDFTGAVEDISKIPEQSVLLLHACAHNPTGVDPRPEQWKEIATVVKKRNLFAFFDMAYQGFASGDGDKDAWAVRHFIEQGINVCLCQSYAKNMGLYGERVGAFTMVCKDADEAKRVESQLKILIRPMYSNPPLNGARIAAAILNTPDLRKQWLQEVKGMADRIIGMRTQLVSNLKKEGSTHNWQHITDQIGMFCFTGLKPEQVERLIKEFSIYMTKDGRISVAGVTSSNVGYLAHAIHQVTK

SEQ ID NO: 65 - DNA, 2188 bp, Homo sapien
ctctttcccttcggtgtgccactgaagatcctggtgtcgccatgggccgccgccccgcccgttgttaccggtattgtaagaacaagccgtacccaaagtctcgcttctgccgaggtgtccctgatgccaagattcgcatttttgacctggggcggaaaaaggcaaaagtggatgagtttccgctttgtggccacatggtgtcagatgaatatgagcagctgtcctctgaagccctggaggctgcccgaatttgtgccaataagtacatggtaaaaagttgtggcaaagatggcttccatatccgggtgcggctccaccccttccacgtcatccgcatcaacaagatgttgtcctgtgctggggctgacaggctccaaacaggcatgcgaggtgcctttggaaagccccagggcactgtggccagggttcacattggccaagttatcatgtccatccgcaccaagctgcagaacaaggagcatgtgattgaggccctgcgcagggccaagttcaagtttcctggccgccagaagatccacatctcaaagaagtggggcttcaccaagttcaatgctgatgaatttgaagacatggtggctgaaaagcggctcatcccagatggctgtggggtcaagtacatccccagtcgtggccctctggacaagtggcgggccctgcactcatgagggcttccaatgtgctgcccccctcttaatactcaccaataaattctacttcctgtccacctatgtctttgtatctacattcttgacggggaaggaacttcctctgggaacctttgggtcattgccctttcacttcagaaacaggttgacaactcagccctgctcatgaggcagcaaaccctgcaaagggctgggactggtggccttatgtcagttgtctactctggagcttgacttggacctccccaggtcctaggcagtaggttgaaaaacactgaagtgcttttcatgaagcacagctgcagcaaagccttgcaatcccaggctggggtcagcctacagttgtgttgcttattacaacacatgcggaccaagaggggcttgtgggctagaggctgaccagcagcgtttatttagcaagggtaggtgtgcatcacattgggcttgttctcacccatctggtttggccattcctccttggtgggaatcatccaggtactgctgaggtcacctgcgatttgccccatttcctatctctagcaacctcctgggccccatgcccccaccccttctagaacctgcattcccagggccttcaccacctgaccaaaggtctaggctaacctttggtcatttgtaacaagacctcggaacagacacgtgtgtggcatggtttggcctggggatcttagatgtctgacctgaactattgtagaacagcgctggcttttgggggagcagcaaaaatgagaggagtgctaggtgggtggcctgagcatctgtatccagggacaggactccaaaggcttttggtcccagagctggggtatgttggccccagcccccagcctgtggctcccaaaaggcctctggttttttgtaatctcagtttacagccatttcttaggtttttaattacctttattttattttgccaaacatacctgggaataccttttattttttttttaccttggggtgatggttccaaaccataaatgtgattatagttaacacatgacccttctagcgtcccagccagtgtttttcctgacctctcttctttggagaggaggatggaagggaggggtccggcatgctgctggcattttgctgtgtcctgcagcccctttccgggacacctgggttcacacagctttttagcttacataactggtgcagattttctgtgtggagatgttgccttgaccagccttggctggactttaccaggcatgcagaagcctgtaccaacacagactacagcacccaggaggtgcgagtgtggctgctcagcggttataacaggcctgactgcattgttcaccggattataatgagccaaaatgtttcccggtgtttgctggtttcagggaaggagtttgatatagcagattaaccaccctccttgtagctattggggcttaatggtttcctggtgattcttaccaatccacaataaacatggcccattggcatatctgcaaaaaaaaaaaaaaaaa

SEQ ID NO: 66 - protein, 214 aa, Homo sapien
MGRRPARCYRYCKNKPYPKSRFCRGVPDAKIRIFDLGRKKAKVDEFPLCGHMVSDEYEQLSSEALEAARICANKYMVKSCGKDGFHIRVRLHPFHVIRINKMLSCAGADRLQTGMRGAFGKPQGTVARVHIGQVIMSIRTKLQNKEHVIEALRRAKFKFPGRQKIHISKKWGFTKFNADEFEDMVAEKRLIPDGCGVKYIPSRGPLDKWRALHS

SEQ ID NO: 67 - DNA, 344 bp, Homo sapien
cctttccggcggtgacgacctacgcacacgagaacatgcctctcgcaaaggatctccttcatccctctccagaagaggagaagaggaaacacaagaagaaacgcctggtgcagagccccaattcctacttcatggatgtgaaatgcccaggatgctataaaatcaccacggtctttagccatgcacaaacggtagttttgtgtgttggctgctccactgtcctctgccagcctacaggaggaaaagcaaggcttacagaaggatgttccttcaggaggaagcagcactaaaagcactctgagtcaagatgagtgggaaaccatctcaataaacacattttggat

SEQ ID NO: 68 - protein, 84 aa, Homo sapien
MPLAKDLLHPSPEEEKRKHKKKRLVQSPNSYFMDVKCPGCYKITTVFSHAQTVVLCVGCSTVLCQPTGGKARLTEGCSFRRKQH

SEQ ID NO: 69 - DNA, 3502 bp, Homo sapien
acatgacagcagatccgcggaagggcagaatgggactccaagcctgcctcctagggctctttgccctcatcctctctggcaaatgcagttacagcccggagcccgaccagcggaggacgctgcccccaggctgggtgtccctgggccgtgcggaccctgaggaagagctgagtctcacctttgccctgagacagcagaatgtggaaagactctcggagctggtgcaggctgtgtcggatcccagctctcctcaatacggaaaatacctgaccctagagaatgtggctgatctggtgaggccatccccactgaccctccacacggtgcaaaaatggctcttggcagccggagcccagaagtgccattctgtgatcacacaggactttctgacttgctggctgagcatccgacaagcagagctgctgctccctggggctgagtttcatcactatgtgggaggacctacggaaacccatgttgtaaggtccccacatccctaccagcttccacaggccttggccccccatgtggactttgtggggggactgcaccgttttcccccaacatcatccctgaggcaacgtcctgagccgcaggtgacagggactgtaggcctgcatctgggggtaaccccctctgtgatccgtaagcgatacaacttgacctcacaagacgtgggctctggcaccagcaataacagccaagcctgtgcccagttcctggagcagtatttccatgactcagacctggctcagttcatgcgcctcttcggtggcaactttgcacatcaggcatcagtagcccgtgtggttggacaacagggccggggccgggccgggattgaggccagtctagatgtgcagtacctgatgagtgctggtgccaacatctccacctgggtctacagtagccctggccggcatgagggacaggagcccttcctgcagtggctcatgctgctcagtaatgagtcagccctgccacatgtgcatactgtgagctatggagatgatgaggactccctcagcagcgcctacatccagcgggtcaacactgagctcatgaaggctgccgctcggggtctcaccctgctcttcgcctcaggtgacagtggggccgggtgttggtctgtctctggaagacaccagttccgccctaccttccctgcctccagcccctatgtcaccacagtgggaggcacatccttccaggaacctttcctcatcacaaatgaaattgttgactatatcagtggtggtggcttcagcaatgtgttcccacggccttcataccaggaggaagctgtaacgaagttcctgagctctagcccccacctgccaccatccagttacttcaatgccagtggccgtgcctacccagatgtggctgcactttctgatggctactgggtggtcagcaacagagtgcccattccatgggtgtccggaacctcggcctctactccagtgtttggggggatcctatccttgatcaatgagcacaggatccttagtggccgcccccctcttggctttctcaacccaaggctctaccagcagcatggggcaggactctttgatgtaacccgtggctgccatgagtcctgtctggatgaagaggtagagggccagggtttctgctctggtcctggctgggatcctgtaacaggctggggaacacccaacttcccagctttgctgaagactctactcaacccctgaccctttcctatcaggagagatggcttgtcccctgccctgaagctggcagttcagtcccttattctgccctgttggaagccctgctgaaccctcaactattgactgctgcagacagcttatctccctaaccctgaaatgcggtgagcttgacttgactcccaaccctaccatgctccatcatactcaggtctccctactcctgccttagattcctcaataagatgctgtaactagcattttttgaatgcctctccctccgcatctcatctttctcttttcaatcaggcttttccaaagggttgtatacagactctgtgcactatttcacttgatattcattccccaattcactgcaaggagacctctactgtcaccgtttactctttcctaccctgacatccagaaacaatggcctccagtgcatacttctcaatctttgctttatggcctttccatcatagttgcccactccctctccttacttagcttccaggtcttaacttctctgactactcttgtcttcctctctcatcaatttctgcttcttcatggaatgctgaccttcattgctccatttgtagatttttgctcttctcagtttactcattgtcccctggaacaaatcactgacatctacaaccattaccatctcactaaataagactttctatccaataatgattgatacctcaaatgtaagatgcgtgatactcaacatttcatcgtccaccttcccaaccccaaacaattccatctcgtttcttcttggtaaatgatgctatgctttttccaaccaagccagaaacctgtgtcatcttttcaccccaccttcaatcaacaagtcctcaatcaacaagtcctactgactgcacatcttaaatatatctttatcagtccacaagtccttccaattatatttcccaagtatatctagaacttatccacttatatccccactgctactaccttagtttagggctatattctcttgaaaaaaagtgtccttacttcctgccaatccccaagtcatcttccagagtaaaatgcaaatcccatcaggccacttggatgaaaacccttcaaggattactggatagaattcaggctttcccctccagcccccaatcatagctcacaaaccttccttgctatttgttcttaagtaaaaaatcatttttcctcctccctccccaaaccccaaggaactctcactcttgctcaagctgttccgtccccttaccacccctgatacaactgccaggttaatttccagaattcttgcaagactcagttcagaagtcaccttctttcgtgaatgttttgattccctgaggctactttattttggtatggctgaaaaatcctagattttctaaacaaaacctgtttgaatcttggttctgatatggactaggagagagactgggtcaagtaagcttatctccctgaggctgtttcctcgtctgttaagtgtgaatatcaatacctgcctttcataatcaccagggaataaagtggaataatgttgataacagtgcttggcacctggaagtaggtggcagatgttaacgcccttcctcccttgcactgcgccccctgtgcctacctctagcattgtaacgaccacatagtattgaaatggccagtttacttgtctgccttcctttccaagaccgttggtgcctagaggactagaatcgtgtcctatttaactttgtgttcccaggtcctagctcaggagttggcaaataagaattaaatgtctgctacaccgaaacaaa

SEQ ID NO: 70 - protein, 563 aa, Homo sapien
MGLQACLLGLFALILSGKCSYSPEPDQRRTLPPGWVSLGRADPEEELSLTFALRQQNVERLSELVQAVSDPSSPQYGKYLTLENVADLVRPSPLTLHTVQKWLLAAGAQKCHSVITQDFLTCWLSIRQAELLLPGAEFHHYVGGPTETHVVRSPHPYQLPQALAPHVDFVGGLHRFPPTSSLRQRPEPQVTGTVGLHLGVTPSVIRKRYNLTSQDVGSGTSNNSQACAQFLEQYFHDSDLAQFMRLFGGNFAHQASVARVVGQQGRGRAGIEASLDVQYLMSAGANISTWVYSSPGRHEGQEPFLQWLMLLSNESALPHVHTVSYGDDEDSLSSAYIQRVNTELMKAAARGLTLLFASGDSGAGCWSVSGRHQFRPTFPASSPYVTTVGGTSFQEPFLITNEIVDYISGGGFSNVFPRPSYQEEAVTKFLSSSPHLPPSSYFNASGRAYPDVAALSDGYWVVSNRVPIPWVSGTSASTPVFGGILSLINEHRILSGRPPLGFLNPRLYQQHGAGLFDVTRGCHESCLDEEVEGQGFCSGPGWDPVTGWGTPNFPALLKTLLNP

SEQ ID NO: 71 - DNA, 801 bp, Homo sapien
caccgcaccctcggactgccccaaggcccccgccgccgctccagcgccgcgcagccaccgccgccgccgccgcctctccttagtcgccgccatgacgaccgcgtccacctcgcaggtgcgccagaactaccaccaggactcagaggccgccatcaaccgccagatcaacctggagctctacgcctcctacgtttacctgtccatgtcttactactttgaccgcgatgatgtggctttgaagaactttgccaaatactttcttcaccaatctcatgaggagagggaacatgctgagaaactgatgaagctgcagaaccaacgaggtggccgaatcttccttcaggatatcaagaaaccagactgtgatgactgggagagcgggctgaatgcaatggagtgtgcattacatttggaaaaaaatgtgaatcagtcactactggaactgcacaaactggccactgacaaaaatgacccccatttgtgtgacttcattgagacacattacctgaatgagcaggtgaaagccatcaaagaattgggtgaccacgtgaccaacttgcgcaagatgggagcgcccgaatctggcttggcggaatatctctttgacaagcacacctgggagacagtgataatgaaagctaagcctcgggctaatttcccatagccgtggggtgacttcctggtcaccaaggcagtgcatgcatgttggggtttcctttaccttttctataagttgtaccaaaacatccacttaagttctttgatttgtaccattccttcaaataaagaaatttggtaccc

SEQ ID NO: 72 - protein, 190 aa, Homo sapien
MTTASTSQVRQNYHQDSEAAINRQINLELYASYVYLSMSYYFDRDDVALKNFAKYFLHQSHEEREHAEKLMKLQNQRGGRIFLQDIKKPDCDDWESGLNAMECALHLEKNVNQSLLELHKLATDKNDPHLCDFIETHYLNEQVKAIKELGDHVTNLRKMGAPESGLAEYLFDKHTWETVIMKAKPRANFP

SEQ ID NO: 73 - DNA, 2826 bp, Homo sapien
gggcggctgagtaggtgggtggtgcgggcccggccgggccggggcaggagacgggcgtggggtcggcgctagcccccgagaacccccgtttcatcctccgctctcatccccgtcccggtcccagtcccgttcccatccctacacctccgtccgccgttccccgggccccgccgccccggatgccgagcccgcccgccgtcttcccgctcccaggcctggccgccatggcgccgcgggcgggaggcctttgtggggcgggcacgtggggcgctgggggcgcgggagcggggccgccatgggctgcggggccgcgcgagcgctcgcctccgtcctctgcctccgcaggaacgccgcgatggctgcgcagggagagccccaggtccagttcaaacttgtattggttggtgatggtggtactggaaaaacgaccttcgtgaaacgtcatttgactggtgaatttgagaagaagtatgtagccaccttgggtgttgaggttcatcccctagtgttccacaccaacagaggacctattaagttcaatgtatgggacacagccggccaggagaaattcggtggactgagagatggctattatatccaagcccagtgtgccatcataatgtttgatgtaacatcgagagttacttacaagaatgtgcctaactggcatagagatctggtacgagtgtgtgaaaacatccccattgtgttgtgtggcaacaaagtggatattaaggacaggaaagtgaaggcgaaatccattgtcttccaccgaaagaagaatcttcagtactacgacatttctgccaaaagtaactacaactttgaaaagcccttcctctggcttgctaggaagctcattggagaccctaacttggaatttgttgccatgcctgctctcgccccaccagaagttgtcatggacccagctttggcagcacagtatgagcacgacttagaggttgctcagacaactgctctcccggatgaggatgatgacctgtgagaatgaagctggagcccagcgtcagaagtctagttttataggcagctgtcctgtgatgtcagcggtgcagcgtgtgtgccacctcattattatctagctaagcggaacatgtgcttcatctgtgggatgctgaaggagatgagtgggcttcggagtgaatgtggcagtttaaaaaataacttcattgtttggacctgcatatttagctgttttggaacgcagttgattccttgagtttcatatataagactgctgcagtcacatcacaatattcagtggtgaaatcttgtttgttactgtcattcccattccttttcgtttagaatcagaataaagttgtatttcaaatatctaagcaagtgaactcatcccttgtttataaatagcatttggaaaccactaaagtagggaagttttatgccatgttaatatttgaattgccttgcttttatcacttaatttgaaatctattgggttaatttctccctatgtttatttttgtacatttgagccatgtcacacaaactgatgatgacaggtcagcagtattctatttggttagaagggttacatggtgtaaatattagtgcagttaagctaaagcagtgtttgctccaccttcatattggctaggtagggtcacctagggaagcacttgctcaaaatctgtgacctgtcagaataaaaatgtggtttgtacatatcaaatagatattttaagggtaatattttcttttatggcaaaagtaatcatgttttaatgtagaacctcaaacaggatggaacatcagtggatggcaggaggttgggaattcttgctgttaaaaataattacaaattttgcacttttttgtttgaatgttagatgcttagtgtgaagttgatacgcaaggaaaatggtccatgtttacccacagttttcaggtactcctagactttaaagatgtcttgaacatttaagttcttcagcagttcacactacaccgtttttttgtttttttttcccccccgggagggtttttttgtagggcagcacagcagagcaggacatggatgaaatactaggaatatgcacagtggggcagtgtgggggcttctcagtaatggagaacagttggtgaaacttttttttttttttaactaagcatttaatttatcttgcatattttccacatttaaaaatgaattaggtctattaggataattaggagtttgatcccatcaacactattcttgtagcagttaggaatcttgagctatttttttctcatacgattactatagtccagtttaccaaagttttctttagatgtctgataatcttgagatgattgcttaccttaaaaggtatagaaaggatcacttaaatatatggaaaaatgaaataagggtgaagctgaataaagttctacttactgtattaactggcaacagttgagtttcttaagatctgaattgctgtgtatgttacgctgtattcagaaccagtttctaaccagcctgtgagatgggaagttttttccccataattgggatgaaacctttcattcaggtattttgaattgaaggtgtatgtgttgtttgtaaccttgtggagattgcaagtggtgttgacattctggatcttctatgtaacagttgaaatttggaagtgacgtcacttacctgtctaacgtggtgtgggagagaatttacaagtcctttattgaaagaataattgttgcaaaatatattgcttctactttgcctggaaaaaaatctatgtcgggtgcggagaaagaggtaatgaaatggcaggaattcatatcagctatcatacc

SEQ ID NO: 74 - protein, 334 aa, Homo sapien [sequence omitted]

SEQ ID NO: 75 - DNA, 1656 bp, Mus musculus
cgcccctgctctcgcgccggcgtcggctgcgtctccggcgtttgaattgcgcttccgccatctttccagcctcagtcggacgggcgcggaggcgcttctggaaggaacgccgcgatggctgcgcagggagagccccaggtccagttcaaacttgtattggttggtgatggtggtactggaaaaacgaccttcgtgaaacgtcatttgactggtgaatttgagaagaagtatgtagccaccttgggtgttgaggttcatcccctagtgttccacaccaacagaggacctattaagttcaatgtatgggacacagccggccaggagaaattcggtggactgagagatggctattatatccaagcccagtgtgccatcataatgtttgatgtaacatcgagagttacttacaagaatgtgcctaactggcatagagatctggtacgagtgtgtgaaaacatccccattgtgttgtgtggcaacaaagtggatattaaggacaggaaagtgaaggcgaaatccattgtcttccaccgaaagaagaatcttcagtactacgacatttctgccaaaagtaactacaactttgaaaagcccttcctctggcttgctaggaagctcattggagaccctaacttggaatttgttgccatgcctgctctcgccccaccagaagttgtcatggacccagctttggcagcacagtatgagcacgacttagaggttgctcagacaactgctctcccggatgaggatgatgacctgtgagaatgaagctggagcccagcgtcagaagtctagttttataggcagctgtcctgtgatgtcagcggtgcagcgtgtgtgccacctcattattatctagctaagcggaacatgtgctttatctgtgggatgctgaaggagatgagtgggcttcggagtgaatgtggcagtttaaaaaataacttcattgtttggacctgcatatttagctgtttggacgcagttgattccttgagtttcatatataagactgctgcagtcacatcacaatattcagtggtgaaatcttgtttgttactgtcattcccattccttttctttagaatcagaataaagttgtatttcaaatatctaagcaagtgaactcatcccttgtttataaatagcatttggaaaccactaaagtagggaagttttatgccatgttaatatttgaattgccttgcttttatcacttaatttgaaatctattgggttaatttctccctatgtttatttttgtacatttgagccatgtcacacaaactgatgatgacaggtcagcagtattctatttggttagaagggttacatggtgtaaatattagtgcagttaagctaaagcagtgtttgctccaccttcatattggctaggtagggtcacctagggaagcacttgctcaaaatctgtgacctgtcagaataaaaatgtggtttgtacatatcaaatagatattttaagggtaatattttcttttatggcaaaagtaatcatgttttaatgtagaacctcaaacaggatggaacatcagtggatggcaggaggttgggaattcttgctgttaaaaataattacaaattttgcactttttgtttgaatgttagatgcttagtgtgaagttgatacgcaagccg

SEQ ID NO: 76 - protein, 216 aa, Mus musculus
MAAQGEPQVQFKLVLVGDGGTGKTTFVKRHLTGEFEKKYVATLGVEVHPLVFHTNRGPIKFNVWDTAGQEKFGGLRDGYYIQAQCAIIMFDVTSRVTYKNVPNWHRDLVRVCENIPIVLCGNKVDIKDRKVKAKSIVFHRKKNLQYYDISAKSNYNFEKPFLWLARKLIGDPNLEFVAMPALAPPEVVMDPALAAQYEHDLEVAQTTALPDEDDDL

SEQ ID NO: 77 - DNA, 4459 bp, Homo sapien
gtttctctctctccttctctctctctctctctctctcttttttttccgccctagctggggctgtgttggaggagaggaagaaagagagacagaggattgcattcatccgttacgttcttgaaatttcctaatagcaagaccagcgaagcggttgcacccttttcaatcttgcaaaggaaaaaaacaaaacaaaacaaaaaaaacccaagtccccttcccggcagtttttgccttaaagctgccctcttgaaattaattttttcccaggagagagatgtcttatcaggggaagaaaaatattccacgcatcacgagcgatcgtcttctgatcaaaggaggtaaaattgttaatgatgaccagtcgttctatgcagacatatacatggaagatgggttgatcaagcaaataggagaaaatctgattgtgccaggaggagtgaagaccatcgaggcccactcccggatggtgatccccggaggaattgacgtccacactcgtttccagatgcctgatcagggaatgacgtctgctgatgatttcttccaaggaaccaaggcggccctggctgggggaaccactatgatcattgaccacgttgttcctgagcctgggacaagcctgctcgctgcctttgaccagtggagggaatgggccgacagcaagtcctgctgtgactactctctgcatgtggacatcagcgagtggcataagggcatccaggaggagatggaagcgcttgtgaaggatcacggggtaaattccttcctcgtgtacatggctttcaaagatcgcttccagctaacggattgccagatttatgaagtactgagtgtgatccgggatattggcgccatagcccaagtccacgcagaaaatggcgacatcattgcagaggagcagcagaggatcctggatctgggcatcacgggccccgagggacatgtgctgagccgacctgaggaggtcgaggccgaagccgtgaatcgtgccatcaccatcgccaaccagaccaactgcccgctgtatatcaccaaggtgatgagcaaaagctctgctgaggtcatcgcccaggcacggaagaagggaactgtggtgtatggcgagcccatcactgccagcttgggaacggacggctcccattactggagcaagaactgggccaaggctgctgcctttgtcacctccccacccttgagccctgatccaaccactccagactttctcaactccttgctgtcctgtggagacctccaggtcacgggcagtgcccattgcacgtttaacactgcccagaaggctgtaggaaaggacaacttcaccctgattccggagggcaccaatggcactgaggagcggatgtccgtcatctgggacaaggctgtggtcactgggaagatggatgagaaccagtttgtggctgtgaccagcaccaatgcagccaaagtcttcaacctttacccccggaaaggccgcattgctgtgggatccgatgccgacctggtcatctgggaccccgacagcgttaaaaccatctctgccaagacacacaacagctctctcgagtacaacatctttgaaggcatggagtgccgcggctccccactggtggtcatcagccaggggaagattgtcctggaggacggcaccctgcatgtcaccgaaggctctggacgctacattccccggaagcccttccctgattttgtttacaagcgtatcaaggcaaggagcaggctggctgagctgagaggggttcctcgtggcctgtatgacggacctgtgtgtgaagtgtctgtgacgcccaagacagtcactccagcctcctcggccaagacgtctcctgccaagcagcaggccccacctgtccggaacctgcaccagtctggattcagtttgtctggtgctcagattgatgacaacattccccgccgcaccacccagcgtatcgtggcgccccccggtggccgtgccaacatcaccagcctgggctagagctcctgggctgtgcgtccactggggactggggatgggacacctgaggacattctgagacttctttcttccttcctttttttttttttgtttttttttttaagagcctgtgatagttactgtggagcagccagttcatggggtcccccttggggccccacaccccgtctctcaccaagagttactgattttgctcatccacttccctacacatctatgggtatcacacccaagactacccaccaagctcatacagggaaccacacccaacacttagacatgcgaacaagcagcccccagcgagggtctccttcgccttcaacctcctagtgtctgttagcatcttccttttcatggggggagggaagataaagtgaattgcccagagctgcctttttcttttctttttaaaaattttaagaagttttccttgtggggctggggaggggccggggtcagggagagtctttttttttttttttttaaatactaaattggaacatttaattccatattaatacaaggggtttgaactggacatcctaatgatgcaattacgtcatcacccagctgattccgggtggttggcaaactcatcgtgtctgtcctgagaggctccacaatgcccacccgcatcgccattctgtagtcttcagggtcagctgttgataaaggggcaggcttgcgttattggcctagattttgctgcagattaaatcctttgaggattctcttctcttttaccatttttctgcgtgctctcactctctctttctctctctagctttttaattcatgaatattttcgtgtctgtctctctctctctctgtgtttcctccagcccttgtctcggagacggtgttttcctcccttgccccattatcttttcacctcccaggtctaccatttcatggtggtcgttgggtccgcctaaaggatttgagcgtttgccattgcaagcatagtgctgtgtcatcctggtccatgtaggactggtgctaaccacctgccatcatgaggatgtgtgctagagtgtgggaccctggccaagtgcaggaatgggccatgccgtctcacccacagtatcacacgtggaaccgcagacagggcccagaagctttagaggtatgaggctgcagaaccggagagattttcctctgtgcagtgctctctggctaaagtcacggtcaaacctaaacaccgagcctcattaacccaagtgaaccaaccaaagtcaccagttcagaagtgctaagctaataggagtctgacccgagggcctgctgcttcctggttaagtatcttttgagattctagaacacatgggagctttttattttcggggaaaaaccgtatttttttcttgtccaattatttctaaagacacactacatagaaagaggccctataaactcaaaaagtcattgggaaacttaaagtctattctactttgcaagaggagaaatgtgttttatgaacgatagatcacatcagaactcctgtggggaggaaaccttataaattaaacacatggcccccttagagaccacaggtgatgtctgtctccatccttccctctccttttctgtcacctttccccctagctggctcctttggacctacccctgtccttgctgacttgtgttgcattgtattccaaacgtgtttacaggttctcttaagcaatgttgtatttgcaggcttttctgaataccaaatctgctttttgtaaagcgtaaaaacatcacaaagtaggtcattccatcaccacccttgtctctctacacattttgcctttggggatctggttggggttttgggttttttgttgttgttgtttatttgttattttaaaggtaaattgcacttttaaaaaaataattggttgacttaatatatttgctttttttctcacctgcacttagaggaaatttgaacaagttggaaaaaaacaatttttgtttcaattctaagaaacacttgcagctctagtattcacttgagtcttcctgtttttcctgtaccgggtcatggtaatttttggttgttttggttgttttcttaaaaaacaagttaaaacctgacgatttctgcaggctgtgtaagcatgtttacctgttggcttgctttgtgtgtctgttaaatgaatgtcatatgtaaatgctaaaataaatcgacagtgtctcagaactgaataactgcagtgacttgatgctctaaaacagtgtaggatttaagaatagatggtttttaatcctggaaattgtgattgtgacccatgagtggaggaactttcagttctaaagctgataaagtgtgtagccagaagagtacttttttttttgtaaccactgtcttgatggcaaaataattatggtaaaaaacaagtctcgtgtttattattccttaagaactctgtgttatattaccatggaacgcctaataaagcaaaatgtggttgtttc

SEQ ID NO: 78 - protein, 572 aa, Homo sapien
MSYQGKKNIPRITSDRLLIKGGKIVNDDQSFYADIYMEDGLIKQIGENLIVPGGVKTIEAHSRMVIPGGIDVHTRFQMPDQGMTSADDFFQGTKAALAGGTTMIIDHVVPEPGTSLLAAFDQWREWADSKSCCDYSLHVDISEWHKGIQEEMEALVKDHGVNSFLVYMAFKDRFQLTDCQIYEVLSVIRDIGAIAQVHAENGDIIAEEQQRILDLGITGPEGHVLSRPEEVEAEAVNRAITIANQTNCPLYITKVMSKSSAEVIAQARKKGTVVYGEPITASLGTDGSHYWSKNWAKAAAFVTSPPLSPDPTTPDFLNSLLSCGDLQVTGSAHCTFNTAQKAVGKDNFTLIPEGTNGTEERMSVIWDKAVVTGKMDENQFVAVTSTNAAKVFNLYPRKGRIAVGSDADLVIWDPDSVKTISAKTHNSSLEYNIFEGMECRGSPLVVISQGKIVLEDGTLHVTEGSGRYIPRKPFPDFVYKRIKARSRLAELRGVPRGLYDGPVCEVSVTPKTVTPASSAKTSPAKQQAPPVRNLHQSGFSLSGAQIDDNIPRRTTQRIVAPPGGRANITSLG

SEQ ID NO: 79 - DNA, 1630 bp, Homo sapien
agggccggggtggggcgctggcgtttccgttgcttggatcagtctaggtgcagctgcggatccttcagcgtctgcatctcggcgtcgccccgcgtaccgtcgcccggctctccgccgctctcccgggggttcggggcacttgggtcccacagtctggtcctgcttcaccttcccctgacctgagtagtcgccatggcacaggttctcagaggcactgtgactgacttccctggatttgatgagcgggctgatgcagaaactcttcggaaggctatgaaaggcttgggcacagatgaggagagcatcctgactctgttgacatcccgaagtaatgctcagcgccaggaaatctctgcagcttttaagactctgtttggcagggatcttctggatgacctgaaatcagaactaactggaaaatttgaaaaattaattgtggctctgatgaaaccctctcggctttatgatgcttatgaactgaaacatgccttgaagggagctggaacaaatgaaaaagtactgacagaaattattgcttcaaggacacctgaagaactgagagccatcaaacaagtttatgaagaagaatatggctcaagcctggaagatgacgtggtgggggacacttcagggtactaccagcggatgttggtggttctccttcaggctaacagagaccctgatgctggaattgatgaagctcaagttgaacaagatgctcaggctttatttcaggctggagaacttaaatgggggacagatgaagaaaagtttatcaccatctttggaacacgaagtgtgtctcatttgagaaaggtgtttgacaagtacatgactatatcaggatttcaaattgaggaaaccattgaccgcgagacttctggcaatttagagcaactactccttgctgttgtgaaatctattcgaagtatacctgcctaccttgcagagaccctctattatgctatgaagggagctgggacagatgatcataccctcatcagagtcatggtttccaggagtgagattgatctgtttaacatcaggaaggagtttaggaagaattttgccacctctctttattccatgattaagggagatacatctggggactataagaaagctcttctgctgctctgtggagaagatgactaacgtgtcacggggaagagctccctgctgtgtgcctgcaccaccccactgccttccttcagcacctttagctgcatttgtatgccagtgcttaacacattgccttattcatactagcatgctcatgaccaacacatacacgtcatagaagaaaatagtggtgcttctttctgatctctagtggagatctctttgactgctgtagtactaaagtgtacttaatgttactaagtttaatgcctggccattttccatttatatatattttttaagaggctagagtgcttttagccttttttaaaaactccatttatattacatttgtaaccatgatactttaattagaagcttagccttgaaattgtgaactcttggaaatgttattagtgaagttcgcaactaaactaaacctgtaaaattatgatgattgtattcaaaagattaatgaaaaataaacatttctgtccccctgaattat

SEQ ID NO: 80 - protein, 320 aa, Homo sapien
MAQVLRGTVTDFPGFDERADAETLRKAMKGLGTDEESILTLLTSRSNAQRQEISAAFKTLFGRDLLDDLKSELTGKFEKLIVALMKPSRLYDAYELKHALKGAGTNEKVLTEIIASRTPEELRAIKQVYEEEYGSSLEDDVVGDTSGYYQRMLVVLLQANRDPDAGIDEAQVEQDAQALFQAGELKWGTDEEKFITIFGTRSVSHLRKVFDKYMTISGFQIEETIDRETSGNLEQLLLAVVKSIRSIPAYLAETLYYAMKGAGTDDHTLIRVMVSRSEIDLFNIRKEFRKNFATSLYSMIKGDTSGDYKKALLLLCGEDD

SEQ ID NO: 81 - DNA, 1436 bp, Homo sapien
agtgtggtcaggcggctcggactgagcaggactttccttatcccagttgattgtgcagaatacactgcctatcgcttgtcttctattcaccatggcttcttctgatatccaggtgaaagaactggagaagcgtgcctcaggccaggcttttgagctgattctcagccctcggtcaaaagaatctgttccagaattccccctttcccctccaaagaagaaggatctttccctggaggaaattcagaagaaattagaagctgcagaagaaagacgcaagtcccatgaagctgaggtcttgaagcagctggctgagaaacgagagcacgagaaagaagtgcttcagaaggcaatagaagagaacaacaacttcagtaaaatggcagaagagaaactgacccacaaaatggaagctaataaagagaaccgagaggcacaaatggctgccaaactggaacgtttgcgagagaaggataagcacattgaagaagtgcggaagaacaaagaatccaaagaccctgctgacgagactgaagctgactaatttgttctgagaactgactttctccccatccccttcctaaatatccaaagactgtactggccagtgtcattttattttttccctcctgacaaatattttagaagctaatgtaggactgtataggtagatccagatccagactgtaagatgttgttttaggggctaaaggggagaaactgaaagtgttttactctttttctaaagtgttggtctttctaatgtagctatttttcttgttgcatcttttctacttcagtacacttggtgtactgggttaatggctagtactgtattggctctgtgaaaacatatttgtgaaaagagtatgtagtggcttcttttgaactgttagatgctgaatatctgttcacttttcaatcccaattctgtcccaatcttaccagatgctactggacttgaatggttaataaaactgcacagtgctgttggtggcagtgacttcttttgagttaggttaataaatcaagccatagagcccctcctggttgatacttgttccagatggggcctttggggctggtagaaatacccaacgcacaaatgaccgcacgttctctgccccgtttcttgccccagtgtggtttgcattgtctccttccacaatgactgctttgtttggatgcctcagcccaggtcagctgttactttctttcagatgtttatttgcaaacaaccattttttgttctgtgtcccttttaaaaggcagattaaaagcacaagcgtgtttctagagaacagttgagagagaatctcaagattctacttggtggtttgcttgctctacgttacaggtggggcatgtcctcatcctttcctgccataaaagctatgacacgagaatcagaatattaataaaactttatgtactgctgt

SEQ ID NO: 82 - protein, 149 aa, Homo sapien
MASSDIQVKELEKRASGQAFELILSPRSKESVPEFPLSPPKKKDLSLEEIQKKLEAAEERRKSHEAEVLKQLAEKREHEKEVLQKAIEENNNFSKMAEEKLTHKMEANKENREAQMAAKLERLREKDKHIEEVRKNKESKDPADETEAD

SEQ ID NO: 83 - DNA, 2062 bp, Homo sapien
gtcagtccctcctgtagccgccgccgccgccgcccgccgcccctctgccagcagctccggcgccacctcgggccggcgtctccggcgggcgggagccaggcgctgacgggcgcggcgggggcggccgagcgctcctgcggctgcgactcaggctccggcgtctgcgcttccccatggggctggcctgcggcgcctgggcgctctgagattgtcactgctgttccaagggcacacgcagagggatttggaattcctggagagttgcctttgtgagaagctggaaatatttctttcaattccatctcttagttttccataggaacatcaagaaatcatgaacaactttggtaatgaagagtttgactgccacttcctcgatgaaggttttactgccaaggacattctggaccagaaaattaatgaagtttcttcttctgatgataaggatgccttctatgtggcagacctgggagacattctaaagaaacatctgaggtggttaaaagctctccctcgtgtcacccccttttatgcagtcaaatgtaatgatagcaaagccatcgtgaagacccttgctgctaccgggacaggatttgactgtgctagcaagactgaaatacagttggtgcagagtctgggggtgcctccagagaggattatctatgcaaatccttgtaaacaagtatctcaaattaagtatgctgctaataatggagtccagatgatgacttttgatagtgaagttgagttgatgaaagttgccagagcacatcccaaagcaaagttggttttgcggattgccactgatgattccaaagcagtctgtcgtctcagtgtgaaattcggtgccacgctcagaaccagcaggctccttttggaacgggcgaaagagctaaatatcgatgttgttggtgtcagcttccatgtaggaagcggctgtaccgatcctgagaccttcgtgcaggcaatctctgatgcccgctgtgtttttgacatgggggctgaggttggtttcagcatgtatctgcttgatattggcggtggctttcctggatctgaggatgtgaaacttaaatttgaagagatcaccggcgtaatcaacccagcgttggacaaatactttccgtcagactctggagtgagaatcatagctgagcccggcagatactatgttgcatcagctttcacgcttgcagttaatatcattgccaagaaaattgtattaaaggaacagacgggctctgatgacgaagatgagtcgagtgagcagacctttatgtattatgtgaatgatggcgtctatggatcatttaattgcatactctatgaccacgcacatgtaaagccccttctgcaaaagagacctaaaccagatgagaagtattattcatccagcatatggggaccaacatgtgatggcctcgatcggattgttgagcgctgtgacctgcctgaaatgcatgtgggtgattggatgctctttgaaaacatgggcgcttacactgttgctgctgcctctacgttcaatggcttccagaggccgacgatctactatgtgatgtcagggcctgcgtggcaactcatgcagcaattccagaaccccgacttcccacccgaagtagaggaacaggatgccagcaccctgcctgtgtcttgtgcctgggagagtgggatgaaacgccacagagcagcctgtgcttcggctagtattaatgtgtagatagcactctggtagctgttaactgcaagtttagcttgaattaagggatttggggggaccatgtaacttaattactgctagttttgaaatgtctttgtaagagtagggtcgccatgatgcagccatatggaagactaggatatgggtcacacttatctgtgttcctatggaaactatttgaatatttgttttatatggatttttattcactcttcagacacgctactcaagagtgcccctcagctgctgaacaagcatttgtagcttgtacaatggcagaatgggccaaaagcttagtgttgtgacctgtttttaaaataaagtatcttgaaataattaggc

SEQ ID NO: 84 - protein, 461 aa, Homo sapien
MNNFGNEEFDCHFLDEGFTAKDILDQKINEVSSSDDKDAFYVADLGDILKKHLRWLKALPRVTPFYAVKCNDSKAIVKTLAATGTGFDCASKTEIQLVQSLGVPPERIIYANPCKQVSQIKYAANNGVQMMTFDSEVELMKVARAHPKAKLVLRIATDDSKAVCRLSVKFGATLRTSRLLLERAKELNIDVVGVSFHVGSGCTDPETFVQAISDARCVFDMGAEVGFSMYLLDIGGGFPGSEDVKLKFEEITGVINPALDKYFPSDSGVRIIAEPGRYYVASAFTLAVNIIAKKIVLKEQTGSDDEDESSEQTFMYYVNDGVYGSFNCILYDHAHVKPLLQKRPKPDEKYYSSSIWGPTCDGLDRIVERCDLPEMHVGDWMLFENMGAYTVAAASTFNGFQRPTIYYVMSGPAWQLMQQFQNPDFPPEVEEQDASTLPVSCAWESGMKRHRAACASASINV

SEQ ID NO: 85 - DNA, 2202 bp, Homo sapien
cacgcttgccgccgccccgcagaaatgcttcggttacccacagtctttcgccagatgagaccggtgtccagggtactggctcctcatctcactcgggcttatgccaaagatgtaaaatttggtgcagatgcccgagccttaatgcttcaaggtgtagaccttttagccgatgctgtggccgttacaatggggccaaagggaagaacagtgattattgagcagggttggggaagtcccaaagtaacaaaagatggtgtgactgttgcaaagtcaattgacttaaaagataaatacaagaacattggagctaaacttgttcaagatgttgccaataacacaaatgaagaagctggggatggcactaccactgctactgtactggcacgctctatagccaaggaaggcttcgagaagattagcaaaggtgctaatccagtggaaatcaggagaggtgtgatgttagctgttgatgctgtaattgctgaacttaaaaagcagtctaaacctgtgaccacccctgaagaaattgcacaggttgctacgatttctgcaaacggagacaaagaaattggcaatatcatctctgatgcaatgaaaaaagttggaagaaagggtgtcatcacagtaaaggatggaaaaacactgaatgatgaattagaaattattgaaggcatgaagtttgatcgaggctatatttctccatactttattaatacatcaaaaggtcagaaatgtgaattccaggatgcctatgttctgttgagtgaaaagaaaatttctagtatccagtccattgtacctgctcttgaaattgccaatgctcaccgtaagcctttggtcataatcgctgaagatgttgatggagaagctctaagtacactcgtcttgaataggctaaaggttggtcttcaggttgtggcagtcaaggctccagggtttggtgacaatagaaagaaccagcttaaagatatggctattgctactggtggtgcagtgtttggagaagagggattgaccctgaatcttgaagacgttcagcctcatgacttaggaaaagttggagaggtcattgtgaccaaagacgatgccatgctcttaaaaggaaaaggtgacaaggctcaaattgaaaaacgtattcaagaaatcattgagcagttagatgtcacaactagtgaatatgaaaaggaaaaactgaatgaacggcttgcaaaactttcagatggagtggctgtgctgaaggttggtgggacaagtgatgttgaagtgaatgaaaagaaagacagagttacagatgcccttaatgctacaagagctgctgttgaagaaggcattgttttgggagggggttgtgccctccttcgatgcattccagccttggactcattgactccagctaatgaagatcaaaaaattggtatagaaattattaaaagaacactcaaaattccagcaatgaccattgctaagaatgcaggtgttgaaggatctttgatagttgagaaaattatgcaaagttcctcagaagttggttatgatgctatggctggagattttgtgaatatggtggaaaaaggaatcattgacccaacaaaggttgtgagaactgctttattggatgctgctggtgtggcctctctgttaactacagcagaagttgtagtcacagaaattcctaaagaagagaaggaccctggaatgggtgcaatgggtggaatgggaggtggtatgggaggtggcatgttctaactcctagactagtgctttacctttattaatgaactgtgacaggaagcccaaggcagtgttcctcaccaataacttcagagaagtcagttggagaaaatgaagaaaaaggctggctgaaaatcactataaccatcagttactggtttcagttgacaaaatatataatggtttactgctgtcattgtccatgcctacagataatttattttgtatttttgaataaaaaacatttgtacattcctgatactgggtacaagagccatgtaccagtgtactgctttcaacttaaatcactgaggcatttttactactattctgttaaaatcaggattttagtgcttgccaccaccagatgagaagttaagcagcctttctgtggagagtgagaataattgtgtacaaagtagagaagtatccaattatgtgacaacctttgtgtaataaaaatttgtttaa

SEQ ID NO: 86 - protein, 573 aa, Homo sapien
MLRLPTVFRQMRPVSRVLAPHLTRAYAKDVKFGADARALMLQGVDLLADAVAVTMGPKGRTVIIEQGWGSPKVTKDGVTVAKSIDLKDKYKNIGAKLVQDVANNTNEEAGDGTTTATVLARSIAKEGFEKISKGANPVEIRRGVMLAVDAVIAELKKQSKPVTTPEEIAQVATISANGDKEIGNIISDAMKKVGRKGVITVKDGKTLNDELEIIEGMKFDRGYISPYFINTSKGQKCEFQDAYVLLSEKKISSIQSIVPALEIANAHRKPLVIIAEDVDGEALSTLVLNRLKVGLQVVAVKAPGFGDNRKNQLKDMAIATGGAVFGEEGLTLNLEDVQPHDLGKVGEVIVTKDDAMLLKGKGDKAQIEKRIQEIIEQLDVTTSEYEKEKLNERLAKLSDGVAVLKVGGTSDVEVNEKKDRVTDALNATRAAVEEGIVLGGGCALLRCIPALDSLTPANEDQKIGIEIIKRTLKIPAMTIAKNAGVEGSLIVEKIMQSSSEVGYDAMAGDFVNMVEKGIIDPTKVVRTALLDAAGVASLLTTAEVVVTEIPKEEKDPGMGAMGGMGGGMGGGMF

SEQ ID NO: 87 - DNA, 2202 bp, Homo sapien; identical to SEQ ID NO: 85

SEQ ID NO: 88 - protein, 573 aa, Homo sapien; identical to SEQ ID NO: 86

SEQ ID NO: 89 - DNA, 632 bp, Homo sapien; identical to SEQ ID NO: 11

SEQ ID NO: 90 - protein, 165 aa, Homo sapien [sequence omitted]

SEQ ID NO: 91 - DNA, 1322 bp, Homo sapien
tagcttggcacgaggctcgggtcgttgtggtgcgctgtcttcccgcttgcgtcagggacctgcccgactcagtggccgccatggcatcagatgaaggcaaactttttgttggagggctgagttttgacaccaatgagcagtcgctggagcaggtcttctcaaagtacggacagatctctgaagtggtggttgtgaaagacagggagacccagagatctcggggatttgggtttgtcacctttgagaacattgacgacgctaaggatgccatgatggccatgaatgggaagtctgtagatggacggcagatccgagtagaccaggcaggcaagtcgtcagacaaccgatcccgtgggtaccgtggtggctctgccgggggccggggcttcttccgtgggggccgaggacggggccgtgggttctctagaggaggaggggaccgaggctatggggggaaccggttcgagtccaggagtgggggctacggaggctccagagactactatagcagccggagtcagagtggtggctacagtgaccggagctcgggcgggtcctacagagacagttacgacagttacgctacacacaacgagtaaaaacccttcctgctcaagatcgtccttccaatggctgtgtgtttaaagattgtgggagcttcgctgaacgttaatgtgtagtaaatgcacctccttgtattcccactttcgtagtcatttcggttctgatcttgtcaaacccagcctgaccgcttctgacgccgggatggcctcgttactagacttttctttttaaggaagtgctgtttttttttgagggttttcaaaacattttgaaaagcatttacttttttgaccacgagccatgagttttcaaaaaaatcgggggttgtgtgggtttttggtttttgttttagtttttggttgcgttgccttttttttttagtggggttggccccatgaagtgggtgccccactcacttctctgagatcgaacggactgtgaatccgctctttgtcggaagctgagcaagctgtggcttttttccaactccgtgtgacgtttctgagtgtagtgtggtaggacccggcgggtgtgcagcaactgccctggagccccagcccctgcgtccatctgtgctgtgcgccccacagtagacgtgcagacgtccctgagaggttcttgaagatgtttatttatattgtccttttttactggaagacgtacgcatactccatcgatgttgtatttgcagtggctgaggaattcttgtacgcagttttctttggctttacgagccgattaaaagaccgtgtgaaatg

SEQ ID NO: 92 - protein, 172 aa, Homo sapien
MASDEGKLFVGGLSFDTNEQSLEQVFSKYGQISEVVVVKDRETQRSRGFGFVTFENIDDAKDAMMAMNGKSVDGRQIRVDQAGKSSDNRSRGYRGGSAGGRGFFRGGRGRGRGFSRGGGDRGYGGNRFESRSGGYGGSRDYYSSRSQSGGYSDRSSGGSYRDSYDSYATHNE

SEQ ID NO: 93 - DNA, 1322 bp, Homo sapien; identical to SEQ ID NO: 91

SEQ ID NO: 94 - protein, 172 aa, Homo sapien; identical to SEQ ID NO: 92

SEQ ID NO: 95 - DNA, 1863 bp, Homo sapien
gttccaaggtttgcggcccggtctcggagaagaggggagagtggagggccgctgaataagcttccaaaatgatgcccacaccagttatcctattgaaagaggggactgatagctcccaaggcatcccccagcttgtgagtaacatcagtgcctgccaggtgattgctgaggctgtaagaactaccctgggtccccgtggcatggacaagcttattgtagatggcagaggcaaagcaacaatttctaatgatggggccacaattctgaaacttcttgatgttgtccatcctgcagcaaagactttggtagacattgccaaatcccaagatgctgaggtgggtgatggcaccacctcagtgaccttgctggctgcagagtttctgaagcaggtgaaaccctatgtggaggaaggtttacacccccagatcatcattcgagctttccgcacagccacccagctggcagttaacaagatcaaagagattgctgtgaccgtgaagaaggcagataaagtggagcagaggaagctgctggaaaagtgtgccatgaccgctctgagctccaagctgatctcccagcagaaagctttctttgctaagatggtggtggatgcagtgatgatgctcgatgatttgctgcagcttaaaatgattggaatcaagaaggtacagggtggagccctcgaggattctcagctggtagctggtgttgcattcaagaagactttctcttacgctgggtttgaaatgcaacccaaaaagtaccacaatcccaagattgcccttttgaatgtcgagctcgagttgaaagctgagaaagacaatgctgagataagagtccacacagttgaggattatcaggcaattgttgatgctgagtggaacattctctatgacaagttagagaagatccatcattctggagccaaagttgtcttgtccaaactccccattggggatgtggccacccagtactttgctgacagggacatgttctgtgctggccgagtacctgaggaggatctgaagaggacaatgatggcctgtggaggctcaatccagaccagtgtgaatgctctgtcagcagatgtgctgggtcgatgccaggtgtttgaagagacccagattggaggcgagaggtacaatttttttactggctgccccaaggccaagacatgcaccttcattctccgtggcggcgccgagcagtttatggaggagacagagcggtccctgcatgatgccatcatgatcgtcaggagggccatcaagaatgattcagtggtggctggtggcggggccattgagatggaactctccaagtacctgcgggattactcaaggactattccaggaaaacagcagctgttgattggggcttatgccaaggccttggagattatcccacgccagctgtgtgacaatgctggctttgatgccacaaacattctcaacaagctgcgggctcggcatgcccaggggggtacatggtatggagtagacatcaacaacgaggacattgctgacaactttgaagctttcgtgtgggagccagctatggtgcggatcaatgcgctgacagcagcctctgaggctgcgtgcctgatcgtgtctgtagatgaaaccatcaagaacccccgctcgactgtggatgctcccacagcagcaggccggggccgtggtcgtggccgcccccactgagaggcaccccacccatcacatggctggctggctgctgggtgcacttaccctccttggcttggttacttcattttacaaggaaggggtagtaattggcccactctcttcttactggaggctatttaaataaaatgtaagacttcaaaaaaaaaaaaaaaaaaaa

SEQ ID NO: 96 - protein, 543 aa, Homo sapien
MMPTPVILLKEGTDSSQGIPQLVSNISACQVIAEAVRTTLGPRGMDKLIVDGRGKATISNDGATILKLLDVVHPAAKTLVDIAKSQDAEVGDGTTSVTLLAAEFLKQVKPYVEEGLHPQIIIRAFRTATQLAVNKIKEIAVTVKKADKVEQRKLLEKCAMTALSSKLISQQKAFFAKMVVDAVMMLDDLLQLKMIGIKKVQGGALEDSQLVAGVAFKKTFSYAGFEMQPKKYHNPKIALLNVELELKAEKDNAEIRVHTVEDYQAIVDAEWNILYDKLEKIHHSGAKVVLSKLPIGDVATQYFADRDMFCAGRVPEEDLKRTMMACGGSIQTSVNALSADVLGRCQVFEETQIGGERYNFFTGCPKAKTCTFILRGGAEQFMEETERSLHDAIMIVRRAIKNDSVVAGGGAIEMELSKYLRDYSRTIPGKQQLLIGAYAKALEIIPRQLCDNAGFDATNILNKLRARHAQGGTWYGVDINNEDIADNFEAFVWEPAMVRINALTAASEAACLIVSVDETIKNPRSTVDAPTAAGRGRGRGRPH

SEQ ID NO: 97 - DNA, 737 bp, Mus musculus
ggagtttcgccgccgcagtcttcgccaccatgccgccctacaccgtggtctatttcccagttcgaggccgctgcgcggccctgcgcatgctgctggcagatcagggccagagctggaaggaggaggtggtgaccgtggagacgtggcaggagggctcactcaaagcctcctgcctatacgggcagctccccaagttccaggacggagacctcaccctgtaccagtccaataccatcctgcgtcacctgggccgcacccttgggctctatgggaaggaccagcaggaggcagccctggtggacatggtgaatgacggcgtggaggacctccgctgcaaatacatctccctcatctacaccaactatgaggcgggcaaggatgactatgtgaaggcactgcccgggcaactgaagccttttgagaccctgctgtcccagaaccagggaggcaagaccttcattgtgggagaccagatctccttcgctgactacaacctgctggacttgctgctgatccatgaggtcctagcccctggctgcctggatgcgttccccctgctctcagcatatgtggggcgcctcagcgcccggcccaagctcaaggccttcctggcctcccctgagtacgtgaacctccccatcaatggcaacgggaaacagtgagggttggggggactctgagcgggaggcagagtttgccttcctttctccaggaccaataaaatttctaagagagct

SEQ ID NO: 98 - protein, 210 aa, Mus musculus
MPPYTVVYFPVRGRCAALRMLLADQGQSWKEEVVTVETWQEGSLKASCLYGQLPKFQDGDLTLYQSNTILRHLGRTLGLYGKDQQEAALVDMVNDGVEDLRCKYISLIYTNYEAGKDDYVKALPGQLKPFETLLSQNQGGKTFIVGDQISFADYNLLDLLLIHEVLAPGCLDAFPLLSAYVGRLSARPKLKAFLASPEYVNLPINGNGKQ

SEQ ID NO: 99 - DNA, 4552 bp, Homo sapien
agcgcccgccgcgtccggggccggctggtgcgcgagacgccgccgagagttgtgaagggcgcgggtggggggcgctgccggcctcgtgggtacgttcgtgccgcgtctgtcccagagctggggccgcaggagcggaggcaagaggggcactatggcagacaaagttaggaggcagaggccgaggaggcgagtctgttgggccttggtggctgtgctcttggcagacctgttggcactgagtgatacactggcagtgatgtctgtggacctgggcagtgagtccatgaaggtggccattgtcaaacctggagtgcccatggaaattgtcttgaataaggaatctcggaggaaaacaccggtgatcgtgaccctgaaagaaaatgaaagattctttggagacagtgcagcaagcatggcgattaagaatccaaaggctacgctacgttacttccagcacctcctggggaagcaggcagataacccccatgtagctctttaccaggcccgcttcccggagcacgagctgactttcgacccacagaggcagactgtgcactttcagatcagctcgcagctgcagttctcacctgaggaagtgttgggcatggttctcaattattctcgttctctagctgaagattttgcagagcagcccatcaaggatgcagtgatcaccgtgccagtcttcttcaaccaggccgagcgccgagctgtgctgcaggctgctcgtatggctggcctcaaagtgctgcagctcatcaatgacaacaccgccactgccctcagctatggtgtcttccgccggaaagatattaacaccactgcccagaatatcatgttctatgacatgggctcaggcagcaccgtatgcaccattgtgacctaccagatggtgaagactaaggaagctgggatgcagccacagctgcagatccggggagtaggatttgaccgtaccctggggggcctggagatggagctccggcttcgagaacgcctggctgggcttttcaatgagcagcgcaagggtcagagagcaaaggatgtgcgggagaacccgcgtgccatggccaagctgctgcgtgaggctaatcggctcaaaaccgtcctcagtgccaacgctgaccacatggcacagattgaaggcctgatggatgatgtggacttcaaggcaaaagtgactcgtgtggaatttgaggagttgtgtgcagacttgtttgagcgggtgcctgggcctgtacagcaggccctccagagtgccgaaatgagtctggatgagattgagcaggtgatcctggtgggtggggccactcgggtccccagagttcaggaggtgctgctgaaggccgtgggcaaggaggagctggggaagaacatcaatgcagatgaagcagccgccatgggggcagtgtaccaggcagctgcgctcagcaaagcctttaaagtgaagccatttgtcgtccgagatgcagtggtctaccccatcctggtggagttcacgagggaggtggaggaggagcctgggattcacagcctgaagcacaataaacgggtactcttctctcggatggggccctaccctcaacgcaaagtcatcacctttaaccgctacagccatgatttcaacttccacatcaactacggcgacctgggcttcctggggcctgaagatcttcgggtatttggctcccagaatctgaccacagtgaagctaaaaggggtgggtgacagcttcaagaagtatcctgactacgagtccaagggcatcaaggctcacttcaacctggatgagagtggcgtgctcagtctagacagggtggagtctgtatttgagacactggtagaggacagcgcagaagaggaatctactctcaccaaacttggcaacaccatttccagcctgtttggaggcggtaccacaccagatgccaaggagaatggtactgatactgtccaggaggaagaggagagccctgcagaggggagcaaggacgagcctggggagcaggtggagctcaaggaggaagctgaggccccagtggaggatggctctcagcccccaccccctgaacctaagggagatgcaacccctgagggagaaaaggccacagaaaaagaaaatggggacaagtctgaggcccagaaaccaagtgagaaggcagaggcagggcctgagggcgtcgctccagccccagagggagagaagaagcagaagcccgccaggaagcggcgaatggtagaggagatcggggtggagctggttgttctggacctgcctgacttgccagaggataagctggctcagtcggtgcagaaacttcaggacttgacactccgagacctggagaagcaggaacgggaaaaagctgccaacagcttggaagcgttcatatttgagacccaggacaagctgtaccagcccgagtaccaggaagtgtccacagaggagcagcgtgaggagatctctgggaagctcagcgccgcatccacctggctggaggatgagggtgttggagccaccacagtgatgttgaaggagaagctggctgagctgaggaagctgtgccaagggctgttttttcgggtagaggagcgcaagaagtggcccgaacggctgtctgccctcgataatctcctcaaccattccagcatgttcctcaagggggcccggctcatcccagagatggaccagatcttcactgaggtggagatgacaacgttagagaaagtcatcaatgagacctgggcctggaagaatgcaactctggccgagcaggctaagctgcccgccacagagaagcctgtgttgctctcaaaagacattgaagctaagatgatggccctggaccgagaggtgcagtatctgctcaataaggccaagtttaccaagccccggccccggcctaaggacaagaatgggacccgggcagagccacccctcaatgccagtgccagtgaccagggggagaaggtcatccctccagcaggccagactgaagatgcagagcccatttcagaacctgagaaagtagagactggatccgagccaggagacactgagcctttggagttaggaggtcctggagcagaacctgaacagaaagaacaatcgacaggacagaagcggcctttgaagaacgacgaactataacccccacctctgttttccccattcatctccacccccttcccccaccacttctatttatttaacatcgagggttgggggaggggttggtcctgccctcggctggagttcctttctcacccctgtgatttggaggtgtggagaaggggaagggagggacagctcactggttccttctgcagtacctctgtggttaaaaatggaaactgttctcctccccagccccactccctgttccctacccatataggccctaaatttgggaaaaatcactattaatttctgaatcctttgcctgtgggtaggaagagaatggctgccagtggctgatgggtcccggtgatgggaagggtatcaggttgctggggagtttccactcttctctggtgattgttccttccctcccttcctctcccaccatgcgatgagcatcctttcaggccagtgtctgcagagcctcagttaccaggtttggtttctgagtgcctatctgtgctctttcctccctctgcgggcttctcttgctctgagcctcccttccccattcccatgcagctcctttccccctgggtttccttggcttcctgcagcaaattgggcagttctctgccccttgcctaaaagcctgtacctctggattggcggaagtaaatctggaaggattctcactcgtatttcccacccctagtggccagaggagggaggggcacagtgaagaagggagcccaccacctctccgaagaggaaagccacgtagagtggttggcatggggtgccagcatcgtgcaagctctgtcataatctgcatcttcccagcagcctggtaccccaggttcctgtaactccctgcctcctcctctcttctgctgttctgctcctcccagacagagcctttccctcaccccctgaccccctgggctgaccaaaatgtgctttctactgtgagtccctatcccaagatcctggggaaaggagagaccatggtgtgaatgtagagatgccacctccctctctctgaggcaggcctgtggatgaaggaggagggtcagggctggccttcctctgtgcatcactctgctaggttgggggcccccgacccaccatacctacgcctagggagcccgtcctccagtattccgtctgtagcaggagctagggctgctgcctcagctccaagacaagaatgaacctggctgtgtcagtcattttgtcttttcctttttttttttttgccacattggcagagatgggacctaagggtcccacccctcaccccacccccacctcttctgtatgtttgaattctttcagtagctgttgatgctggttggacaggtttgagtcaaattgtactttgctccattgttaattgagaaactgtttcaataaaatattcttttctac

SEQ ID NO: 100 - protein, 999 aa, Homo sapien
MADKVRRQRPRRRVCWALVAVLLADLLALSDTLAVMSVDLGSESMKVAIVKPGVPMEIVLNKESRRKTPVIVTLKENERFFGDSAASMAIKNPKATLRYFQHLLGKQADNPHVALYQARFPEHELTFDPQRQTVHFQISSQLQFSPEEVLGMVLNYSRSLAEDFAEQPIKDAVITVPVFFNQAERRAVLQAARMAGLKVLQLINDNTATALSYGVFRRKDINTTAQNIMFYDMGSGSTVCTIVTYQMVKTKEAGMQPQLQIRGVGFDRTLGGLEMELRLRERLAGLFNEQRKGQRAKDVRENPRAMAKLLREANRLKTVLSANADHMAQIEGLMDDVDFKAKVTRVEFEELCADLFERVPGPVQQALQSAEMSLDEIEQVILVGGATRVPRVQEVLLKAVGKEELGKNINADEAAAMGAVYQAAALSKAFKVKPFVVRDAVVYPILVEFTREVEEEPGIHSLKHNKRVLFSRMGPYPQRKVITFNRYSHDFNFHINYGDLGFLGPEDLRVFGSQNLTTVKLKGVGDSFKKYPDYESKGIKAHFNLDESGVLSLDRVESVFETLVEDSAEEESTLTKLGNTISSLFGGGTTPDAKENGTDTVQEEEESPAEGSKDEPGEQVELKEEAEAPVEDGSQPPPPEPKGDATPEGEKATEKENGDKSEAQKPSEKAEAGPEGVAPAPEGEKKQKPARKRRMVEEIGVELVVLDLPDLPEDKLAQSVQKLQDLTLRDLEKQEREKAANSLEAFIFETQDKLYQPEYQEVSTEEQREEISGKLSAASTWLEDEGVGATTVMLKEKLAELRKLCQGLFFRVEERKKWPERLSALDNLLNHSSMFLKGARLIPEMDQIFTEVEMTTLEKVINETWAWKNATLAEQAKLPATEKPVLLSKDIEAKMMALDREVQYLLNKAKFTKPRPRPKDKNGTRAEPPLNASASDQGEKVIPPAGQTEDAEPISEPEKVETGSEPGDTEPLELGGPGAEPEQKEQSTGQKRPLKNDEL

SEQ ID NO: 101 - DNA, 2002 bp, Homo sapien
aattccgcggcaaccgctccggcaacgccaaccgctccgctgcgcgcaggctgggctgcaggctctcggctgcagcgctgggctggtgtgcagtggtgcgaccacggctcacggcagcctcagccacccagatgtaagcgatctggttcccacctcagccttccgagtagtggatctaggatctggcttccaacatgtggcagctctgggcctccctctgctgcctgctggtgttggccaatgcccggagcaggccctctttccatcccgtgtcggatgagctggtcaactatgtcaacaaacggaataccacgtggcaggccgggcacaacttctacaacgtggacatgagctacttgaagaggctatgtggtaccttcctgggtgggcccaagccaccccagagagttatgtttaccgaggacctgaagctgcctgcaagcttcgatgcacgggaacaatggccacagtgtcccaccatcaaagagatcagagaccagggctcctgtggctcctgctgggccttcggggctgtggaagccatctctgaccgcatctgcatccacaccaatgcgcacgtcagcgtggaggtgtcggcggaggacctgctcacctgctgtggcagcatgtgtggggacggctgtaatggtggctatcctgctgaagcttggaacttctggacaagaaaaggcctggtttctggtggcctctatgaatcccatgtagggtgcagaccgtactccatccctccctgtgagcaccacgtcaacggctcccggcccccatgcacgggggagggagatacccccaagtgtagcaagatctgtgagcctggctacagcccgacctacaaacaggacaagcactacggatacaattcctacagcgtctccaatagcgagaaggacatcatggccgagatctacaaaaacggccccgtggagggagctttctctgtgtattcggacttcctgctctacaagtcaggagtgtaccaacacgtcaccggagagatgatgggtggccatgccatccgcatcctgggctggggagtggagaatggcacaccctactggctggttgccaactcctggaacactgactggggtgacaatggcttctttaaaatactcagaggacaggatcactgcggaatcgaatcagaagtggtggctggaattccacgcaccgatcagtactgggaaaagatctaatctgccgtgggcctgtcgtgccagtcctgggggcgagatcggggtagaaagtcattttattctttaagttcacgtaagatacaagtttcaggcagggtctgaaggactggattggccaaagtcctccaaggagaccaagtcctggctacatcccagcctgtggttacagtgcagacaggccatgtgagccaccgctgccagcacagagcgtccttccccctgtagactagtgccgtgggagtacctgctgcccagctgctgtggccccctccgtgatccatccatctccagggagcaagacagagacgcaggatggaaagcggagttcctaacaggatgaaagttcccccatcagttcccccagtacctccaagcaagtagctttccacatttgtcacagaaatcagaggagagatggtgttgggagccctttggagaacgccagtctccaggtccccctgcatctatcgagtttgcaatgtcacaacctctctgatcttgtgctcagcatgattctttaatagaagttttatttttcgtgcactctgctaatcatgtgggtgagccagtggaacagcgggagcctgtgctggtttgcagattgcctcctaatgacgcggctcaaaaggaaaccaagtggtcaggagttgtttctgacccactgatctctactaccacaaggaaaatagtttaggagaaaccagcttttactgtttttgaaaaattacagcttcaccctgtcaagttaacaaggaatgcctgtgccaataaaaggtttctccaacttg

SEQ ID NO: 102 - protein, 339 aa, Homo sapien [sequence omitted]

SEQ ID NO: 103 - DNA, 1996 bp, Homo sapien
tccggcaacgccaaccgctccgctgcgcgcaggctgggctgcaggctctcggctgcagcgctgggctggtgtgcagtggtgcgaccacggctcacggcagcctcagccacccagatgtaagcgatctggttcccacctcagcctcccgagtagtggatctaggatccggcttccaacatgtggcagctctgggcctccctctgctgcctgctggtgttggccaatgcccggagcaggccctctttccatcccctgtcggatgagctggtcaactatgtcaacaaacggaataccacgtggcaggccgggcacaacttctacaacgtggacatgagctacttgaagaggctatgtggtaccttcctgggtgggcccaagccaccccagagagttatgtttaccgaggacctgaagctgcctgcaagcttcgatgcacgggaacaatggccacagtgtcccaccatcaaagagatcagagaccagggctcctgtggctcctgctgggccttcggggctgtggaagccatctctgaccggatctgcatccacaccaatgcgcacgtcagcgtggaggtgtcggcggaggacctgctcacatgctgtggcagcatgtgtggggacggctgtaatggtggctatcctgctgaagcttggaacttctggacaagaaaaggcctggtttctggtggcctctatgaatcccatgtagggtgcagaccgtactccatccctccctgtgagcaccacgtcaacggctcccggcccccatgcacgggggagggagatacccccaagtgtagcaagatctgtgagcctggctacagcccgacctacaaacaggacaagcactacggatacaattcctacagcgtctccaatagcgagaaggacatcatggccgagatctacaaaaacggccccgtggagggagctttctctgtgtattcggacttcctgctctacaagtcaggagtgtaccaacacgtcaccggagagatgatgggtggccatgccatccgcatcctgggctggggagtggagaatggcacaccctactggctggttgccaactcctggaacactgactggggtgacaatggcttctttaaaatactcagaggacaggatcactgtggaatcgaatcagaagtggtggctggaattccacgcaccgatcagtactgggaaaagatctaatctgccgtgggcctgtcgtgccagtcctgggggcgagatcggggtagaaatgcattttattctttaagttcacgtaagatacaagtttcaggcagggtctgaaggactggattggccaaacatcagacctgtcttccaaggagaccaagtcctggctacatcccagcctgtggttacagtgcagacaggccatgtgagccaccgctgccagcacagagcgtccttccccctgtagactagtgccgtgggagtacctgctgcccagctgctgtggccccctccgtgatccatccatctccagggagcaagacagagacgcaggatggaaagcggagttcctaacaggatgaaagttcccccatcagttcccccagtacctccaagcaagtagctttccacatttgtcacagaaatcagaggagagatggtgttgggagccctttggagaacgccagtctccaggtccccctgcatctatcgagtttgcaatgtcacaacctctctgatcttgtgctcagcatgattctttaatagaagttttatttttcgtgcactctgctaatcatgtgggtgagccagtggaacagcgggagcctgtgctggtttgcagattgcctcctaatgacgcggctcaaaaggaaaccaagtggtcaggagttgtttctgacccactgatctctactaccacaaggaaaatagtttaggagaaaccagcttttactgtttttgaaaaattacagcttcaccctgtcaagttaacaaggaatgcctgtgccaataaaaggtttctccaacttga

SEQ ID NO: 104 - protein, 339 aa, Homo sapien
MWQLWASLCCLLVLANARSRPSFHPLSDELVNYVNKRNTTWQAGHNFYNVDMSYLKRLCGTFLGGPKPPQRVMFTEDLKLPASFDAREQWPQCPTIKEIRDQGSCGSCWAFGAVEAISDRICIHTNAHVSVEVSAEDLLTCCGSMCGDGCNGGYPAEAWNFWTRKGLVSGGLYESHVGCRPYSIPPCEHHVNGSRPPCTGEGDTPKCSKICEPGYSPTYKQDKHYGYNSYSVSNSEKDIMAEIYKNGPVEGAFSVYSDFLLYKSGVYQHVTGEMMGGHAIRILGWGVENGTPYWLVANSWNTDWGDNGFFKILRGQDHCGIESEVVAGIPRTDQYWEKI

SEQ ID NO: 105 - DNA, 618 bp, Homo sapien
cttttgcgggtggcggcgaacgcggagagcacgccatgaaggcctcgggcacgctacgagagtacaaggtagtgggtcgctgcctgcccacccccaaatgccacacgccgcccctctaccgcatgcgaatctttgcgcctaatcatgtcgtcgccaagtcccgcttctggtactttgtatctcagttaaagaagatgaagaagtcttcaggggagattgtctactgtgggcaggtgtttgagaagtcccccctgcgggtgaagaacttcgggatctggctgcgctatgactcccggagcggcacccacaacatgtaccgggaataccgggacctgaccaccgcaggcgctgtcacccagtgctaccgagacatgggtgcccggcaccgcgcccgagcccactccattcagatcatgaaggtggaggagatcgcggccagcaagtgccgccggccggctgtcaagcagttccacgactccaagatcaagttcccgctgccccaccgggtcctgcgccgtcagcacaagccacgcttcaccaccaagaggcccaacaccttcttctaggtgcagggccctcgtccgggtgtgccccaaataaactcaggaacgccccggt

SEQ ID NO: 106 - protein, 176 aa, Homo sapien [sequence omitted]

SEQ ID NO: 107 - DNA, 2767 bp, Homo sapien
gggcgggcgcattgcagactgcggagtcagacggtgctatgtacgccctcttcctcctggccagcctcctgggcgcggctctagccggcccggtccttggactgaaagaatgcaccaggggctcggcagtgtggtgccagaatgtgaagacggcgtccgactgcggggcagtgaagcactgcctgcagaccgtttggaacaagccaacagtgaaatcccttccctgcgacatatgcaaagacgttgtcaccgcagctggtgatatgctgaaggacaatgccactgaggaggagatccttgtttacttggagaagacctgtgactggcttccgaaaccgaacatgtctgcttcatgcaaggagatagtggactcctacctccctgtcatcctggacatcattaaaggagaaatgagccgtcctggggaggtgtgctctgctctcaacctctgcgagtctctccagaagcacctagcagagctgaatcaccagaagcagctggagtccaataagatcccagagctggacatgactgaggtggtggcccccttcatggccaacatccctctcctcctctaccctcaggacggcccccgcagcaagccccagccaaaggataatggggacgtttgccaggactgcattcagatggtgactgacatccagactgctgtacggaccaactccacctttgtccaggccttggtggaacatgtcaaggaggagtgtgaccgcctgggccctggcatggccgacatatgcaagaactatatcagccagtattctgaaattgctatccagatgatgatgcacatgcaacccaaggagatctgtgcgctggttgggttctgtgatgaggtgaaagagatgcccatgcagactctggtccccgccaaagtggcctccaagaatgtcatccctgccctggaactggtggagcccattaagaagcacgaggtcccagcaaagtctgatgtttactgtgaggtgtgtgaattcctggtgaaggaggtgaccaagctgattgacaacaacaagactgagaaagaaatactcgacgcttttgacaaaatgtgctcgaagctgccgaagtccctgtcggaagagtgccaggaggtggtggacacgtacggcagctccatcctgtccatcctgctggaggaggtcagccctgagctggtgtgcagcatgctgcacctctgctctggcacgcggctgcctgcactgaccgttcacgtgactcagccaaaggacggtggcttctgcgaagtgtgcaagaagctggtgggttatttggatcgcaacctggagaaaaacagcaccaagcaggagatcctggctgctcttgagaaaggctgcagcttcctgccagacccttaccagaagcagtgtgatcagtttgtggcagagtacgagcccgtgctgatcgagatcctggtggaggtgatggatccttccttcgtgtgcttgaaaattggagcctgcccctcggcccataagcccttgttgggaactgagaagtgtatatggggcccaagctactggtgccagaacacagagacagcagcccagtgcaatgctgtcgagcattgcaaacgccatgtgtggaactaggaggaggaatattccatcttggcagaaaccacagcattggtttttttctacttgtgtgtctgggggaatgaacgcacagatctgtttgactttgttataaaaatagggctcccccacctcccccatttctgtgtcctttattgtagcattgctgtctgcaagggagcccctagcccctagcccctggcagacatagctgcttcagtgccccttttctctctgctagatggatgttgatgcactggaggtcttttagcctgcccttgcatggcgcctgctggaggaggagagagctctgctggcatgagccacagtttcttgactggaggccatcaaccctcttggttgaggccttgttctgagccctgacatgtgcttgggcactggtgggcctgggcttctgaggtggcctcctgccctgatcagggaccctccccgctttcctgggcctctcagttgaacaaagcagcaaaacaaaggcagttttatatgaaagattagaagcctggaataatcaggctttttaaatgatgtaattcccactgtaatagcatagggattttggaagcagctgctggtggcttgggacatcagtggggccaagggttctctgtccctggttcaactgtgatttggctttcccgtgtctttcctggtgatgccttgtttggggttctgtgggtttgggtgggaagagggccatctgcctgaatgtaacctgctagctctccgaagccctgcgggcctggcttgtgtgagcgtgtggacagtggtggccgcgctgtgcctgctcgtgttgcctacatgtccctggctgttgaggcgctgcttcagcctgcacccctcccttgtctcatagatgctccttttgaccttttcaaataaatatggatggcgagctcctaggcctctggcttcctggtagagggcggcatgccgaagggtctgtctgggtgtggattggatgctgggggtgtgggggttggaagctgtctgtggcccacttgggcacccacgcttctgtccacttctggttgccaggagacagcaagcaaagccagcaggacatgaagttgctattaaatggacttcgtgatttttgttttgcactaaagtttctgtgatttaacaataaaattctgttagcccccccg

SEQ ID NO: 108 - protein, 524 aa, Homo sapien
MYALFLLASLLGAALAGPVLGLKECTRGSAVWCQNVKTASDCGAVKHCLQTVWNKPTVKSLPCDICKDVVTAAGDMLKDNATEEEILVYLEKTCDWLPKPNMSASCKEIVDSYLPVILDIIKGEMSRPGEVCSALNLCESLQKHLAELNHQKQLESNKIPELDMTEVVAPFMANIPLLLYPQDGPRSKPQPKDNGDVCQDCIQMVTDIQTAVRTNSTFVQALVEHVKEECDRLGPGMADICKNYISQYSEIAIQMMMHMQPKEICALVGFCDEVKEMPMQTLVPAKVASKNVIPALELVEPIKKHEVPAKSDVYCEVCEFLVKEVTKLIDNNKTEKEILDAFDKMCSKLPKSLSEECQEVVDTYGSSILSILLEEVSPELVCSMLHLCSGTRLPALTVHVTQPKDGGFCEVCKKLVGYLDRNLEKNSTKQEILAALEKGCSFLPDPYQKQCDQFVAEYEPVLIEILVEVMDPSFVCLKIGACPSAHKPLLGTEKCIWGPSYWCQNTETAAQCNAVEHCKRHVWN

SEQ ID NO: 109 - DNA, 649 bp, Homo sapien
agaatacactcacaagccactccgctgctcgcctctccgccccgcgtccagctcgcccagctcgcccagcgtccgccgcgcctcgccaaggcttcaacggaccacaccaaaatgccatctcaaatggaacacgccatggaaaccatgatgtttacatttcacaaattcgctggggataaaggctacttaacaaaggaggacctgagagtactcatggaaaaggagttccctggatttttggaaaatcaaaaagaccctctggctgtggacaaaataatgaaggacctggaccagtgtagagatggcaaagtgggcttccagagcttcttttccctaattgcgggcctcaccattgcatgcaatgactattttgtagtacacatgaagcagaagggaaagaagtaggcagaaatgagcagttcgctcctccctgataagagttgtccaaagggtcgcttaaggaatctgccccacagcttcccccatagaaggatttcatgagcagatcaggacacttagcaaatgtaaaaataaaatctaactctcatttgacaagcagagaaagaaaagttaaataccagataagcttttgatttttgtattgtttgcatccccttgccctcaataaataaagttcttttttagttcc

SEQ ID NO: 110 - protein, 97 aa, Homo sapien
MPSQMEHAMETMMFTFHKFAGDKGYLTKEDLRVLMEKEFPGFLENQKDPLAVDKIMKDLDQCRDGKVGFQSFFSLIAGLTIACNDYFVVHMKQKGKK

SEQ ID NO: 111 - DNA, 1821 bp, Homo sapien
cgcgtgaactgcttcctgcaggctggccatggcgcttcacgttcccaaggctccgggctttgcccagatgctcaaggagggagcgaaacacttttcaggattagaagaggctgtgtatagaaacatacaagcttgcaaggagcttgcccaaaccactcgtacagcatatggaccaaaaggaatgaacaaaatggttatcaaccacttggagaagttgtttgtgacaaacgatgcagcaactattttaagagaactagaagtacagcatcctgctgcaaaaatgattgtaatggcttctcatatgcaagagcaagaagttggagatggcacaaactttgttctggtatttgctggagctctcctggaattagctgaagaacttctgaggattggcctgtcagtttcagaggtcatagaaggttatgaaatagcctgcagaaaagctcatgagattcttcctaatttggtatgttgttctgcaaaaaaccttcgagatattgatgaagtctcatctctacttcgtacctccataatgagtaaacaatatggtaatgaagtatttctggccaagcttattgctcaggcatgcgtatctatttttcctgattccggccatttcaatgttgataacatcagagtttgtaaaattctgggctctggtatcagttcctcttcagtattgcatggcatggtttttaagaaggaaaccgaaggtgatgtaacatctgtcaaagatgcaaaaatagcagtgtactcttgtccttttgatggcatgataacagaaactaagggaacagtgttgataaagactgctgaagaattgatgaattttagtaagggagaagaaaacctcatggatgcacaagtcaaagctattgctgatactggtgcaaatgtcgtagtaacaggtggcaaagtggcagacatggctcttcattatgcaaataaatataatatcatgttagtgaggctaaactcaaaatgggatctccgaagactttgtaaaactgttggtgctacagctcttcctagattgacacctcctgtccttgaagaaatgggacactgtgacagtgtttacctctcagaagttggagatactcaggtggtggtttttaagcatgaaaaggaagatggcgccatttctaccatagtacttcgaggctctacagacaatctgatggatgacatagaaagggtagtagacgatggtgttaatactttcaaagttcttacaagggataaacgtcttgtacccggaggtggagcaacagaaattgaattagccaaacagatcacatcatatggagagacatgtcctggacttgaacagtatgctattaagaagtttgctgaggcatttgaagctattccccgcgcactggcagaaaactctggagttaaggccaatgaagtaatctctaaactttatgcagtacatcaagaaggaaataaaaacgttggattagatattgaggctgaagtccctgctgtaaaggacatgctggaagctggtattctagatacttacctgggaaaatattgggctatcaaactcgctactaatgctgcagtcactgtacttagagtggatcagatcatcatggcaaaaccagctggtgggcccaagcctccaagtgggaagaaagactgggatgatgaccaaaatgattgaaattggcttaatttttactgtaggtgaaggctgtatttgtagtagtactcaagaatcacctgatgttttcttattctccttaaattaagagttattttgtgtttgtattcttggctggatgttataataaacatattgttactgtc

SEQ ID NO: 112 - protein, 548 aa, Homo sapien
MALHVPKAPGFAQMLKEGAKHFSGLEEAVYRNIQACKELAQTTRTAYGPKGMNKMVINHLEKLFVTNDAATILRELEVQHPAAKMIVMASHMQEQEVGDGTNFVLVFAGALLELAEELLRIGLSVSEVIEGYEIACRKAHEILPNLVCCSAKNLRDIDEVSSLLRTSIMSKQYGNEVFLAKLIAQACVSIFPDSGHFNVDNIRVCKILGSGISSSSVLHGMVFKKETEGDVTSVKDAKIAVYSCPFDGMITETKGTVLIKTAEELMNFSKGEENLMDAQVKAIADTGANVVVTGGKVADMALHYANKYNIMLVRLNSKWDLRRLCKTVGATALPRLTPPVLEEMGHCDSVYLSEVGDTQVVVFKHEKEDGAISTIVLRGSTDNLMDDIERVVDDGVNTFKVLTRDKRLVPGGGATEIELAKQITSYGETCPGLEQYAIKKFAEAFEAIPRALAENSGVKANEVISKLYAVHQEGNKNVGLDIEAEVPAVKDMLEAGILDTYLGKYWAIKLATNAAVTVLRVDQIIMAKPAGGPKPPSGKKDWDDDQND

SEQ ID NO: 113 - DNA, 1973 bp, Homo sapien
ggatccggcaacgaaggtaccatggcgggacgtggcgccatggtgctgttgcacgtgctgtttgagcacgcggtcggctacgcgctcgtggcgctgaaggaagtggaggagatcagtctgctgcagccgcaggtggaggagtccgtgctcaacctgggcaaattccacagcatcgttcgtctggtggccttttgtccctttgcctcatcccaggttgccttggaaaatgccaacgccgtgtctgaaggggttgttcatgaggacctccgcctgctcttggagacccacctgccgtccaaaaagaagaaagtactcttgggagttggggatcccaagattggtgccgcaatacaggaggagttagggtacaactgccagactggaggagtcatagctgagatcctgcgaggagttcgtctgcacttccacaatctggtgaagggtctgaccgatctgtcagcttgtaaagcacagctggggctgggacacagctattcccgtgccaaagttaagtttaatgtgaaccgggtggacaatatgatcatccagtccattagcctcctggaccagctggataaggacatcaataccttctctatgcgtgtcagggagtggtacgggtatcactttccggagctggtgaagatcatcaacgacaatgccacatactgccgtcttgcccagtttattggaaaccgaagggaactgaatgaggacaagctggagaagctggaggagctgacaatggatggggccaaggctaaggctattctggatgcctcacggtcctccatgggcatggacatatctgccattgacttgataaacatcgagagcttctccagtcgtgtggtgtctttatctgaataccgccagagcctacacacttacctgcgctccaagatgagccaagtagcccccagcctgtcagccctaattggggaagcggtaggtgcacgtctcatcgcacatgctggcagcctcaccaacctggccaagtatccagcatccacagtgcagatccttggggctgaaaaggccctgttcagagccctgaagacaaggggtaacactccaaaatatggactcattttccactccaccttcattggccgagcagctgccaagaacaaaggccgcatctcccgatacctggcaaacaaatgcagtattgcctcacgaatcgattgcttctctgaggtgcccacgagtgtattcggggagaagcttcgagaacaagttgaagagcgactgtccttctatgagactggagagataccacgaaagaatctggatgtcatgaaggaagcaatggttcaggcagaggcagaggaagcggctgctgagattactaggaagctggagaaacaggagaagaaacgcttaaagaaggaaaagaaacggctggctgcacttgccctcgcgtcttcagaaaacagcagtagtactccagaggagtgtgaggagacgagtgaaaaacccaaaaagaagaaaaagcaaaagccccaggaggttcctcaggagaatggaatggaagacccatctatctctttctccaaacccaagaaaaagaaatctttttccaaggaggagttgatgagtagcgatcttgaagagaccgctggcagcaccagtattcccaagaggaagaagtctacacccaaggaggaaacagttaatgaccctgaggaggcaggccacagaagtcggtccaagaaaaagaggaaattctccaaagaggagccggtcagcagtgggcctgaagaggcggttggcaagagcagctccaagaagaagaaaaagttccataaagcatcccaggaagattagaatgcaaatggacattctctgggaggtggggcataccatagcccaaggtgacatttcccaccctgtgcccgtgttcccaataaaaacaaattcacaagaaaaaaaaaaaaaaaaaaaaaattcctgaggccgcaagggaattc

SEQ ID NO: 114 - protein, 602 aa, Homo sapien
MAGRGAMVLLHVLFEHAVGYALVALKEVEEISLLQPQVEESVLNLGKFHSIVRLVAFCPFASSQVALENANAVSEGVVHEDLRLLLETHLPSKKKKVLLGVGDPKIGAAIQEELGYNCQTGGVIAEILRGVRLHFHNLVKGLTDLSACKAQLGLGHSYSRAKVKFNVNRVDNMIIQSISLLDQLDKDINTFSMRVREWYGYHFPELVKIINDNATYCRLAQFIGNRRELNEDKLEKLEELTMDGAKAKAILDASRSSMGMDISAIDLINIESFSSRVVSLSEYRQSLHTYLRSKMSQVAPSLSALIGEAVGARLIAHAGSLTNLAKYPASTVQILGAEKALFRALKTRGNTPKYGLIFHSTFIGRAAAKNKGRISRYLANKCSIASRIDCFSEVPTSVFGEKLREQVEERLSFYETGEIPRKNLDVMKEAMVQAEAEEAAAEITRKLEKQEKKRLKKEKKRLAALALASSENSSSTPEECEETSEKPKKKKKQKPQEVPQENGMEDPSISFSKPKKKKSFSKEELMSSDLEETAGSTSIPKRKKSTPKEETVNDPEEAGHRSRSKKKRKFSKEEPVSSGPEEAVGKSSSKKKKKFHKASQED

SEQ ID NO: 115 - DNA, 1883 bp, Homo sapien
atgcccgagaatgtggcaccccggagcggggcgactgccggggctgccggcggccgcgggaaaggcgcctatcaggaccgcgacaagccagcccagatccgcttcagcaacatttccgccgccaaagcggttgctgatgctattagaacaagccttggaccaaaaggaatggataaaatgattcaagatggaaaaggtgatgtaaccattacaaatgatggtgctaccattctgaaacaaatgcaagtattacatccagcagccagaatgctggtggagctgtctaaggctcaagatatagaagcaggagatggcaccacatcagtagtcatcattgctggctccctcttagattcttgtaccaagcttcttcagaaagggattcatccaaccatcatttctgagtcattccagaaggccctggaaaagggcattgaaatcttgactgacatgtctcgacctgtggaactgagtgacagagaaactttgttaaatagtgcaaccacttcactgaactcaaaggtggtttctcagtattcaagtctgctttctccaatgagtgtaaatgcagtgatgaaagtgattgacccagccacagccaccagtgtagatcttagagatattaaaatagttaagaagcttggtgggacaattgatgactgtgagttggtggaagggctggttctcacccaaaaagtgtcaaattctggcataaccagagttgaaaaggccaagattgggcttattcagttttgcttatctgctcccaaaacagacatggataatcaaatagtggtttctgactatgcccagatggaccgagtgctgcgagaagagagagcctatattttaaatttagtgaagcaaattaaaaaaacaggatgtaatgtccttctcatacagaaatctattctaagagatgctcttagtgatcttgcattacactttctgaataaaatgaagatcatggtgattaaggatattgaaagagaagacattgaattcatttgtaagacaattggaaccaagccagttgctcatattgaccaatttactgctgacatgctgggttctgctgagttagctgaggaggtcaatttaaatggttctggcaaactgctcaagattacaggctgtgccagccctggaaaaacagttacaattgttgttcgtggttctaacaaactggtgattgaagaagctgagcgctccattcatgatgccctatgtgttattcgttgtttagtgaagaagagggctcttattgcaggaggtggtgctccagaaatagagttggccctagcattaactgaatattcacgaacactgagtggtatggaatcctactgcgttcgtgcttttgcagatgctatggaggtcattccatctacactagctgaaaatgccggcctgaatcccatttctacagtaacagaactaagaaaccggcatgcccagggagaaaaaactgcaggcattaatgtccgaaagggtggtatttccaacattttggaggaactggttgtccagcctctgttggtatcagtcagtgctctgactcttgcaactgaaactgttcggagcattctgaaaatagatgatgtggtaaacactcgataatctggataactgactagcaccattatgatcaccagtattgtggctggaatggaagaagatcaccttggtgttccttgtttggaagattatttcctctgaatttctgggcttggtcttccagttggcatttgcctgaagttgtattgaaacaatttaatgaaaatattaaatatttggtttcaaaaggcagatttatcttctcccaacattctgttatttctgatacttttgaaaaactaataaaaactaataaaagaagcgta

SEQ ID NO: 116 - protein, 539 aa, Homo sapien
MPENVAPRSGATAGAAGGRGKGAYQDRDKPAQIRFSNISAAKAVADAIRTSLGPKGMDKMIQDGKGDVTITNDGATILKQMQVLHPAARMLVELSKAQDIEAGDGTTSVVIIAGSLLDSCTKLLQKGIHPTIISESFQKALEKGIEILTDMSRPVELSDRETLLNSATTSLNSKVVSQYSSLLSPMSVNAVMKVIDPATATSVDLRDIKIVKKLGGTIDDCELVEGLVLTQKVSNSGITRVEKAKIGLIQFCLSAPKTDMDNQIVVSDYAQMDRVLREERAYILNLVKQIKKTGCNVLLIQKSILRDALSDLALHFLNKMKIMVIKDIEREDIEFICKTIGTKPVAHIDQFTADMLGSAELAEEVNLNGSGKLLKITGCASPGKTVTIVVRGSNKLVIEEAERSIHDALCVIRCLVKKRALIAGGGAPEIELALALTEYSRTLSGMESYCVRAFADAMEVIPSTLAENAGLNPISTVTELRNRHAQGEKTAGINVRKGGISNILEELVVQPLLVSVSALTLATETVRSILKIDDVVNTR

SEQ ID NO: 117 - DNA, 975 bp, Homo sapien
gggggggaagtgctctaacttttcttaaggttttgttgctagcccttcaagtgcactgagctatgtgactcggatggtctttcacacggcacatttggacatttccagaactaccatgagatggtttagacgggaattcatgcaaatgaggggtcaaaaatggtatagtgaccccgtccacgtcctccaagctcacgaccttggagccccgtggagctggactgaggaggaggctgcacagcgggagagcagctggtccagaccagccctgcagcccccactcagccggcagccagatggccccgcaaggcctccagggatggcccctagccacaggccctggctgaggtctctgggtcggtcagtgacatgtaggtaggaagcactgaaaatagtgttcccagagcactttgcaactccctgggtaagagggacgacacctctggtttttcaataccaattacatggaacttttctgtaatgggtacaatgaagaagtttctaaaaacacacacaaagcacattgggccaactatttagtaagcccggatagacttattgccaaaaacaaaaaatagctttcaaaagaaatttaagttctatgagaaattccttagtcatggtgttgcgtaaatcatattttagctgcacggcattaccccacacagggtggcagaacttgaagggttactgacgtgtaaatgctggtatttgatttcctgtgtgtgttgccctggcattaagggcattttacccttgcagttttactaaaacactgaaaaatattccaagcttcatattaaccctacctgtcaacgtaacgatttcatgaacgttattatattgtcgaattcctactgacaacattataactgtatgggagcttaactttataaggaaatgtattttgacactggtatcttattaaagtattctgatcctaccaaaaaaaaaaaaaaaaaaaaaaaaaaaaaa

SEQ ID NO: 118 - protein, 101 aa, Homo sapien
MVFHTAHLDISRTTMRWFRREFMQMRGQKWYSDPVHVLQAHDLGAPWSWTEEEAAQRESSWSRPALQPPLSRQPDGPARPPGMAPSHRPWLRSLGRSVTCR

SEQ ID NO: 119 - DNA, 2518 bp, Homo sapien
ctgcggcgcgccgggcggaactttctagaacgctcggtgagaggcggaggagcggtaactaccccggctgcgcacagctcggcgctccttcccgctccctcacacaccggcctcagcccgcaccggcagtagaagatggtgaaagaaacaacttactacgatgttttgggggtcaaacccaatgctactcaggaagaattgaaaaaggcttataggaaactggctttgaagtaccatcctgataagaacccaaatgaaggagagaagtttaaacagatttctcaagcttacgaagttctctctgatgcaaagaaaagggaattatatgacaaaggaggagaacaggcaattaaagagggtggagcaggtggcggttttggctcccccatggacatctttgatatgttttttggaggaggaggaaggatgcagagagaaaggagaggtaaaaatgttgtacatcagctctcagtaaccctagaagacttatataatggtgcaacaagaaaactggctctgcaaaagaatgtgatttgtgacaaatgtgaaggtagaggaggtaagaaaggagcagtagagtgctgtcccaattgccgaggtactggaatgcaaataagaattcatcagataggacctggaatggttcagcaaattcagtctgtgtgcatggagtgccagggccatggggagcggatcagtcctaaagatagatgtaaaagctgcaacggaaggaagatagttcgagagaagaaaattttagaagttcatattgacaaaggcatgaaagatggccagaagataacattccatggtgaaggagaccaagaaccaggactggagccaggcgatattatcattgtgttagatcagaaggaccatgctgtttttactcgacgaggagaagaccttttcatgtgtatggacatacagctcgttgaagcactgtgtggcttccagaagccaatatctactcttgacaaccgaaccatcgtcatcacctctcatccaggtcagattgtcaagcatggagatatcaagtgtgtactaaatgaaggcatgccaatttatcgtagaccatatgaaaagggtcgcctaatcatcgaatttaaggtaaactttcctgagaatggctttctctctcctgataaactgtctttgctggaaaaactcctacccgagaggaaggaagtggaagagactgatgagatggaccaagtagaactggtggactttgatccaaatcaggaaagacggcgccactacaatggagaagcatatgaggatgatgaacatcatcccagaggtggtgttcagtgtcagacctcttaatgggccagtgaataacactcactgctggcatttaatgtgcagtagtgaatgagtgaaggactgtaatcataatatgctcactacttgctcttgtttttgttttaataaactatagtagtgttttaaaaagttaaatgaagaataaacgcaaatataaaagctctgattttgccctgtatgtatgatgacttcagtgtgcaagatgaagtttaatacctgtaaaaactacaaagaagttcccctagcatttctaggccaaaccttgtaattgacttcagctatgtacgtggacaagcttagactgaaatgctaggtatatgtattggcttcagtgtatgacccttcattgttaagctatgaaagtaaaactctgtatttaactggcaatgaggaaaaaaaaattttgtagagaagtgttggtctgtatagttctttatattaagtgggattcattgtaatgcctctgcatttattctgttgcctcagctgttacttgaagatggcgtaatatataatttatcctgtggtatcagtgataaaaatgatacctttctgtaggaggggtttatcataatatgctgcttcttgaaggcttgcacttccagaattgtgtttccttctgctgtgccattcatatatatatacatatatatatataatcttgaccagtcctggtcatttgctcccctccttgtctgtggaccatgataagcccaagtagtgacttcagagctgggtaacagaaattaaagtgaaaagacctttacgtggagaatttgcatgcgtaatataggaaggtgttctttaggtatgttacaggattactttaaaccatttgactttcgctccaaagttatgttggtagtatagcaaattatgatgaatagctttaattgtatgtttaaaagtctcatatgttcacatgcttaaatctgggtatcagaatttaagcaattcttgaaatgtattgtctccttaatatactaattacaaagcatctccaatgtgtgtcactacaggcttttttttcccagatcatcaaattttggcttttaactaagatacatagctttattttagctagtctgaatgagtgatacaaaaatactattgaactatagttaaataatattaaataggatggagagtaaaagtggaggactgggtaatgagccaagaagaaggggtg

SEQ ID NO: 120 - protein, 397 aa, Homo sapien
MVKETTYYDVLGVKPNATQEELKKAYRKLALKYHPDKNPNEGEKFKQISQAYEVLSDAKKRELYDKGGEQAIKEGGAGGGFGSPMDIFDMFFGGGGRMQRERRGKNVVHQLSVTLEDLYNGATRKLALQKNVICDKCEGRGGKKGAVECCPNCRGTGMQIRIHQIGPGMVQQIQSVCMECQGHGERISPKDRCKSCNGRKIVREKKILEVHIDKGMKDGQKITFHGEGDQEPGLEPGDIIIVLDQKDHAVFTRRGEDLFMCMDIQLVEALCGFQKPISTLDNRTIVITSHPGQIVKHGDIKCVLNEGMPIYRRPYEKGRLIIEFKVNFPENGFLSPDKLSLLEKLLPERKEVEETDEMDQVELVDFDPNQERRRHYNGEAYEDDEHHPRGGVQCQTS

SEQ ID NO: 121 - DNA, 1438 bp, Homo sapien
cggtaactaccccggctgcgcacagctcggcgctccttcccgctccctcacacaccgcctcagcccgcaccggcagtagaagatggtgaaagaaacaacttactacgatgttttgggggtcaaacccaatgctactcaggaagaattgaaaaaggcttataggaaactggccttgaagtaccatcctgataagaacccaaatgaaggagagaagtttaaacagatttctcaagcttacgaagttctctctgatgcaaagaaaagggaattatatgacaaaggaggagaacaggcaattaaagagggtggagcaggtggcggttttggctcccccatggacatctttgatatgttttttggaggaggaggaaggatgcagagagaaaggagaggtaaaaatgttgtacatcagctctcagtaaccctagaagacttatataatggtgcaacaagaaaactggctctgcaaaagaatgtgatttgtgacaaatgtgaaggtagaggaggtaagaaaggagcagtagagtgctgtcccaattgccgaggtactggaatgcaaataagaattcatcagataggacctggaatggttcagcaaattcagtctgtgtgcatggagtgccagggccatggggagcggatcagtcctaaagatagatgtaaaagctgcaacggaaggaagatagttcgagagaagaaaattttagaagttcatattgacaaaggcatgaaagatggccagaagataacattccatggtgaaggagaccaagaaccaggactggagccaggcgatattatcattgtgttagatcagaaggaccatgctgtttttactcgacgaggagaagaccttttcatgtgtatggacatacagctcgttgaagcactgtgtggcttccagaagccaatatctactcttgacaaccgaaccatcgtcatcacctctcatccaggtcagattgtcaagcatggagatatcaagtgtgtactaaatgaaggcatgccaatttatcgtagaccatatgaaaagggtcgcctaatcatcgaatttaaggtaaactttcctgagaatggctttctctctcctgataaactgtctttgctggaaaaactcctacccgagaggaaggaagtggaagagactgatgagatggaccaagtagaactggtggactttgatccaaatcaggaaagacggcgccactacaatggagaagcatatgaggatgatgaacatcatcccagaggtggtgttcagtgtcagacctcttaatggccagtgaataacactcactgctggcatttaatgtgcagtagtgaatgagtgaaggactgtaatcataatatgctcactacttgctcttgtttttgttttaataaactatagtagtgttataaaaagttaaatgaagaataaacgcaaatataaaagctc

SEQ ID NO: 122 - protein, 397 aa, Homo sapien; identical to SEQ ID NO: 120

SEQ ID NO: 123 - DNA, 3285 bp, Homo sapien
ctagaattcagcggccgctgaattctagacccggatgaagagtaacgccattaccgcccgagccgccgagagccttagccgacggaaactggacactggaccggcagcgccatgagactcctcccccgcttgctgctgcttctcttactcgtgttccctgccactgtcttgttccgaggcggccccagaggctcgttagcagtggcacaagatcttacagaggatgaagaaacagtagaagattccataattgaggatgaagatgatgaagccgaggtagaagaagatgaacccacagatttggtagaagataaagaggaagaagatgtgtctggtgaacctgaagcttcaccgagtgcagatacaactatactgtttgtaaaaggagaagattttccagcaaataacattgtgaagttcctggtaggctttaccaacaagggtacagaagattttattgttgaatccttagatgcctcattccgttatcctcaggaccaccagttttatatccagaatttcacagctcttcctctgaacactgtagtgccaccccagagacaggcaacttttgagtactctttcattcctgcagagcccatgggcggacgaccatttggtttggtcatcaatctgaactacaaagatttgaacggcaatgtattccaagatgcagtcttcaatcaaacagttacagttattgaaagagaggatgggttagatggagaaacaatctttatgtatatgttccttgctggtcttgggcttctggttattgttggccttcatcaactcctagaatctagaaagcgtaagagacccatacagaaagtagaaatgggtacatcaagtcagaatgatgttgacatgagttggattcctcaggaaacattgaatcaaatcaataaagcttcaccaagaaggttgcccaggaaacgggcacagaagagatcagtgggatctgatgagtaaatgttcctttgtgcaacaattcggtctttacttaacctgccctaatatttttcggcctgatgggaattagtgcagagaagccagtcaccatagaaggcaactcctacttgtgtgtggactgagcaatcagagtctgtggcgataatattgctgaaaatgcactgcattcatttttctaaagtaacaaatttggtttttttttaaaccattaaaatctatgtgtgtgcgtgtgtatgtatgtgagcagttggtcttaccagaatcattgttgaactacctgaaacaagtctttagaatactaaatataatgctgttgtctcttcctttttgacattttctgattttttcccccaaaactcagttaatatttacccactatgattattgatgtcctgccttgaacagttttaaagaaaacaatttttggaatagctcaaatttcaattgatggcacaaatcagcattttgttgttgttactgtattacaattagtattctaaaggcagaagcagaagtagctgctttttagcaatagaattgtttcagtattttgctgctgtttaatgcgcatcttcagaaaacttcccagtggcttcaaggaatttggggatctctctggcaacaaattgtgaaacatgaaatttctgctgactttaatatatgaaacctaatcctacccccttttttaacaaaaagaaactagtacatttgtgaaaattgtgttgtgttgtccattgttgctctagttctgacccagaggtagctctggagtgattttagacctactcactcagttgtgtgtaggtttttttgttttgttttgagagagaatttttctctccttaatagaagcatcctttttaaagagaagttgccttggtccacacactaagcagaaaaccaagttatcaggacagagatatttcccagttactcctaatcaatgaagaaagtgagttggatatttttaaagcagttaactaattttttcttacctaatcttttgggagttttgcttgttgatataacctttttagttaacctgaaagattccaaaaattgttcttaagtgcttgagactggaaccaaaattaaattgtacttcataaaatcctcttatagagttactcttgccctagattgtaaattaagtttggcattattgtcagactggatggagggtgaagtaaaatagtatgaacaattaagaggctctccccctcttgtctttaagccatattctcctacatgtattttataagaaaatgttaagtcaaattttagtggctctttaattcctgacctcttcattctccttttcagtataacctcccctatgctcatgcccacacagacaaaaaaacaaaacgaaatacacacagaaaaaagtctttccaaactgtttaagtatttaaacatctgagccaaagcagatagaagttattgtataattgttaatcactttgcaaataggggctatcaaattacctatattggcattgctggattataaactctatatctgtaatataaagtgtttgagtttttaattgggctgttatgatcagtaattgattttgagaaagctctatgagctctaagtaactgcatggttttttgtttaatgtaatataggagacccttcacattcccaaggaatatattccaaaacatttttgtgaatatctaagtttgtgaaactactagggcatgatacagtaaggtgtaattacagaatttacgaaatgtaaatggcctctacagagttttatggaatacctggtactaacgtaggcagctgcaaaaccacactgagttacagctgtcagccctcctcattcctaaataacttgccttacatatcagccctcccacttctgaagttcaaattagtgcctcggaaatgtagaatttattatttgtcattttttttttttagcatagattgagaacagttgaactcttaaatcctcagatgccaggggtctgctctagcatcagtaagtatttagcagaaactaactccgtaatgaatggaattcaattccacacatggtttgttcaagcacacttaataagtagcctattttttaaatgtctttttaaaatgtaaatatttggatgaagtttttctttgttttgatatattcatttgctacaccaactatgttttcagaattcatcttttgaacaacttggtttcagaatatgtaaaatgactttaaggatcttgtgtatcaaacctatccccggatgtgtgagaataatgtgttcataaagcatggatctcgtaaaaaaaaaaaaaaaaaaaaa

SEQ ID NO: 124 - protein, 286 aa, Homo sapien
MRLLPRLLLLLLLVFPATVLFRGGPRGSLAVAQDLTEDEETVEDSIIEDEDDEAEVEEDEPTDLVEDKEEEDVSGEPEASPSADTTILFVKGEDFPANNIVKFLVGFTNKGTEDFIVESLDASFRYPQDHQFYIQNFTALPLNTVVPPQRQATFEYSFIPAEPMGGRPFGLVINLNYKDLNGNVFQDAVFNQTVTVIEREDGLDGETIFMYMFLAGLGLLVIVGLHQLLESRKRKRPIQKVEMGTSSQNDVDMSWIPQETLNQINKASPRRLPRKRAQKRSVGSDE

SEQ ID NO: 125 - DNA, 2251 bp, Homo sapien
gccgcgtgcagaggtgctcaagcctcctcgcggtccgcagtcagtgccgccgcgcccggcctcccgcacgccccgcaggtagcgcccccgcccgcggcccagagtgcgctcgcgccggcaccagctcccggataaacggcgcgccgcgcggagatgacagccgaggagatgaaggcgaccgagagcggggcgcagtcggcgccgctgcccatggagggagtggacatcagccccaaacaggacgaaggcgtgctgaaggtcatcaagagagagggcacaggtacagagatgcccatgattggggaccgagtctttgtccactacactggctggctattagatggcacaaagtttgactccagtctggatcgcaaggacaaattctcctttgacctgggaaaaggggaggtcatcaaggcttgggacattgccatagccaccatgaaggtgggggaggtgtgccacatcacctgcaaaccagaatatgcctacggttcagcaggcagtcctccaaagattccccccaatgccacgcttgtatttgaggtggagttgtttgagtttaagggagaagatctgacggaagaggaagatggcggaatcattcgcagaatacagactcgcggtgaaggctatgctaagcccaatgagggtgctatcgtggaggttgcactggaagggtactacaaggacaagctctttgaccagcgggagctccgctttgagattggcgagggggagaacctggatctgccttatggtctggagagggccattcagcgcatggagaaaggagaacattccatcgtgtacctcaagcccagctatgcttttggcagtgttgggaaggaaaagttccaaatcccaccaaatgctgagctgaaatatgaattacacctcaagagttttgaaaaggccaaggagtcttgggagatgaattcagaagagaagctggaacagagcaccatagtgaaagagcggggcactgtgtacttcaaggaaggtaaatacaagcaagctttactacagtataagaagatcgtgtcttggctggaatatgagtctagtttttccaatgaggaagcacagaaagcacaggcccttcgactggcctctcacctcaacctggccatgtgtcatctgaaactacaggccttctctgctgccattgaaagctgtaacaaggccctagaactggacagcaacaacgagaagggcctcttccgccggggagaggcccacctggccgtgaatgactttgaactggcacgggctgatttccagaaggtcctgcagctctaccccaacaacaaagccgccaagacccagctggctgtgtgccagcagcggatccgaaggcagcttgcccgggagaagaagctctatgccaatatgtttgagaggctggctgaggaggagaacaaggccaaggcagaggcttcctcaggagaccatcccactgacacagagatgaaggaggagcagaagagcaacacggcagggagccagtctcaggtggagacagaagcatagcccctctccaccagccctactcctgcggctgcctgccccccagtctccccactccaccctgttagttttgtaaaaactgaagaattttgagtgaattagacctttatttttctatctggttggatggtggctttaggggaagggggaaaggtgtaggctgggggattgaggtggggaatcattttagctggtgtcagcccctcttcccttcctccattgcacatgaacatatgtccatccatatatattcatcagaatgttaatttattttgctccctctgttaggtccattttctaagggtagaagaggcaagtggtagggatgaggtctgataagaacccagggtggagagggagactcctgggcagccgttttcctcatcctttccctctcccagtccatttccaaatgtggcctccatgtgggtgctagggacatgggaaaaaccactgctatgccatttcttctctctgttcccttcctcacccccgacggtgtggctgatgatgtcttctggtgtcatggtgaccaccccctgttccctgttctggtatttcccctgtcagtttcccctctcggccaggttgtgtcccaaaatcccctcagcctcttctctgcacgttgctgaaggtccaggcttgcctcaagttccatgcttgagcaataaagtggaaacaataaaacctgggtgtcagacaaaaaaaaaaaaaaaaaaaa

SEQ ID NO: 126 - protein, 459 aa, Homo sapien
MTAEEMKATESGAQSAPLPMEGVDISPKQDEGVLKVIKREGTGTEMPMIGDRVFVHYTGWLLDGTKFDSSLDRKDKFSFDLGKGEVIKAWDIAIATMKVGEVCHITCKPEYAYGSAGSPPKIPPNATLVFEVELFEFKGEDLTEEEDGGIIRRIQTRGEGYAKPNEGAIVEVALEGYYKDKLFDQRELRFEIGEGENLDLPYGLERAIQRMEKGEHSIVYLKPSYAFGSVGKEKFQIPPNAELKYELHLKSFEKAKESWEMNSEEKLEQSTIVKERGTVYFKEGKYKQALLQYKKIVSWLEYESSFSNEEAQKAQALRLASHLNLAMCHLKLQAFSAAIESCNKALELDSNNEKGLFRRGEAHLAVNDFELARADFQKVLQLYPNNKAAKTQLAVCQQRIRRQLAREKKLYANMFERLAEEENKAKAEASSGDHPTDTEMKEEQKSNTAGSQSQVETEA

SEQ ID NO: 127 - DNA, 2251 bp, Homo sapien; identical to SEQ ID NO: 125

SEQ ID NO: 128 - protein, 459 aa, Homo sapien; identical to SEQ ID NO: 126

SEQ ID NO: 129 - DNA, 2376 bp, Homo sapien
gaggaggagtggggaccgggcggggggtggaggaagaggcctcgcgcagaggagggagcaattgaatttcaaacacaaacaactcgacgagcgcgcacccaccgcgccggagccttgccccgatccgcgcccgccccgtccgtgcggcgcgcgggcggagacgccgtggccgcgccggagctcgggccgggggccaccatcgaggcgggggccgcgcgagggccggagcggagcggcgccgccaccgccgcacgcgcaaacttgggctcgcgcttcccggcccggcgcggagcccggggcgcccggagccccgccatgtcgcgatccaaccggcagaaggagtacaaatgcggggacctggtgttcgccaagatgaagggctacccacactggccggcccggattgacgagatgcctgaggctgccgtgaaatcaacagccaacaaataccaagtcttttttttcgggacccacgagacggcattcctgggccccaaagacctcttcccttacgaggaatccaaggagaagtttggcaagcccaacaagaggaaagggttcagcgaggggctgtgggagatcgagaacaaccctactgtcaaggcttccggctatcagtcctcccagaaaaagagctgtgtggaagagcctgaaccagagcccgaagctgcagagggtgacggtgataagaaggggaatgcagagggcagcagcgacgaggaagggaagctggtcattgatgagccagccaaggagaagaacgagaaaggagcgttgaagaggagagcaggggacttgctggaggactctcctaaacgtcccaaggaggcagaaaaccctgaaggagaggagaaggaggcagccaccttggaggttgagaggccccttcctatggaggtggaaaagaatagcaccccctctgagcccggctctggccgggggcctccccaagaggaagaagaagaggaggatgaagaggaagaggctaccaaggaagatgctgaggccccaggcatcagagatcatgagagcctgtagccaccaatgtttcaagaggagcccccaccctgttcctgctgctgtctgggtgctactggggaaactggccatggcctgcaaactgggaacccctttcccaccccaacctgctctcctcttctactcacttttcccactccaagcccagcccatggagattgacctggatggggcaggccacctggctctcacctctaggtccccatactcctatgatctgagtcagagccatgtcttctccctggaatgagttgaggccactgtgttccttccgcttggagctattttccaggcttctgctggggcctgggacaactgctcccacctcctgacacccttctcccactctcctaggcattctggacctctgggttgggatcaggggtaggaatggaaggatggagcatcaacagcagggtgggcttgtggggcctgggaggggcaatcctcaaatgcggggtgggggcagcacaggagggcggcctccttctgagctcctgtcccctgctacacctattatcccagctgcctagattcagggaaagtgggacagcttgtaggggaggggctcctttccataaatccttgatgattgacaacacccatttttccttttgccgaccccaagagttttgggagttgtagttaatcatcaagagaatttggggcttccaagttgttcgggccaaggacctgagacctgaagggttgactttacccatttgggtgggagtgttgagcatctgtccccctttagatctctgaagccacaaataggatgcttgggaagactcctagctgtcctttttcctctccacacagtgctcaaggccagcttatagtcatatatatcacccagacataaaggaaaagacacattttttaggaaatgtttttaataaaagaaaattacaaaaaaaaattttaaagacccctaaccctttgtgtgctctccattctgctccttccccatcgttgcccccatttctgaggtgcactgggaggctccccttctatttggggcttgatgactttctttttgtagctggggctttgatgttccttccagtgtcatttctcatccacataccctgacctggccccctcagtgttgtcaccagatctgatttgtaacccactgagaggacagagagaaataagtgccctctcccaccctcttcctactggtctctctatgcctctctacagtctcgtctcttttaccctggcccctctcccttgggctctgatgaaaaattgctgactgtagctttggaagtttagctctgagaaccgtagatgatttcagttctaggaaaataaaacccgttgattact

SEQ ID NO: 130 - protein, 240 aa, Homo sapien
MSRSNRQKEYKCGDLVFAKMKGYPHWPARIDEMPEAAVKSTANKYQVFFFGTHETAFLGPKDLFPYEESKEKFGKPNKRKGFSEGLWEIENNPTVKASGYQSSQKKSCVEEPEPEPEAAEGDGDKKGNAEGSSDEEGKLVIDEPAKEKNEKGALKRRAGDLLEDSPKRPKEAENPEGEEKEAATLEVERPLPMEVEKNSTPSEPGSGRGPPQEEEEEEDEEEEATKEDAEAPGIRDHESL

SEQ ID NO: 131 - DNA, 5773 bp, Homo sapien
gtgaccacggaccaggcagtctctaatgaataggcaaggccacaacctccattctcccagaaaagaagaaatgctcatctgaaattcatcacctctctggagtcttcaaactgaccaagcattgaaaagaacacagtttcagaaaacagtttccagtgcctctggccttcctactgaaagcagacacagagtgcatgaagaccgttcaaatatgtcagggacctcctcccatgagtccttctatgactccctctcagacatgcaggaagaaagcaagaatactgacttcttcccgggcctttctgctttcctcagccaggaagagataaacaagagtcttgacctggcccggagagccatagccgactccgaaacagaagattttgactcggaaaaggagatctcgcagattttcagtacttctcctgcaagcctctgtgaacatccttcccataaggagaccaaattgggtgaacacgcctcgaggagacctcaggataacaggtcaacacctgtccagcctctggcagagaaacaaactaagagtatctcttcacctgtttcaaagaggaaacctgccatgtcacccctgctcaccaggcccagctacatccggagcctccgaaaggctgaaaagcgtggtgcaaaaactcccagcacaaacgtaaagcccaaaacgccacatcaaagaaagggtggcccccagagccagctgtgtgacaaggcagctaatttaattgaggagctaacatccatatttaaagccgcaaagccaagaaacagaagcccaaatggggagtcctcgtcaccagacagtgggtacctgtctcctaaaaatcagccgtcagccctgctgagtgcctcagccagccagagccctatggaagaccaaggggagatggaaagagaggtcaagtcccctggggccaggcattgctaccaggacaaccaggacttggcagtgccacacaaccgcaagtctcacccacagccccacagcgccctccacttcccagctgcacctcgattcatccaaaagctgaggagccaagaagtagcagaagggagccgagtttatctggagtgtagagtcactggaaaccccactcctcgagtcagatggttctgtgaagggaaagaactgcacaacactcctgatattcaaatccactgtgagggaggggacctccataccctgatcatagcagaggcctttgaggacgacacaggtcgctacacctgtttggctacgaatcccagcggctcagacacaacatctgctgaggtgttcattgaaggtgccagttcaacagattctgacagtgaaagtttagctttcaaatcaagagctggagctatgccacaagctcaaaagaaaacaacttctgtttccttgacaataggatcatcatctccaaagacaggggtgaccacagctgtgattcaaccactgtctgtccctgtgcaacaggttcacagtccaacttcatatctctgccgacctgatggaaccactactgcctactttcctcctgtttttacaaaggaactgcaaaacacagccgtggcggaaggccaggtggtggttctggagtgccgggtccgtggggcaccccctctgcaggtccagtggtttcggcaagggagtgaaatccaagactctccagatttccgaattctacagaaaaaacctagatctacagctgaacctgaggagatttgcaccctagttatcgctgagactttccctgaagatgcagggatctttacatgttcagcaagaaatgattatggatcagcaaccagcactgcccagctggttgtcacctcagccaacactgaaaactgtagttacgagtcaatgggagaatccaacaatgaccacttccaacactttccacctccccctccaatcttggagacaagttccttggagttggcttcaaagaaaccatctgagatccagcaggtgaacaaccctgagttaggcctgagcagggcagcccttcaaatgcaattcaatgctgctgagagggaaacgagcggagtccatcccagccgtggagtaaatggactgattaacggcaaagctaacagtaataaatctcttccaacaccagctgtcctgctttcacccactaaggagccaccacctctgcttgccaaaccaaaactaggatttccaaagaaggccagtagaactgctagaatagcctccgatgaggaaattcaaggcacaaaggatgctgttattcaagacctggaacgaaaacttcgcttcaaggaggacctcctgaacaatggccagccgaggttaacatacgaagaaagaatggctcgtcgactgctaggtgctgacagtgcaactgtctttaatattcaggagccagaagaggaaacagctaatcaggaatacaaagtctccagctgtgaacagagactcatcagtgaaatagagtacaggctagaaaggtctcctgtggatgaatcaggtgatgaagttcagtatggagatgtgcctgtggaaaatggaatggcaccattctttgagatgaagctgaaacattacaagatctttgagggaatgccagtaactttcacatgtagagtggctggaaatccaaagccaaagatctattggtttaaagatgggaagcagatctctccaaagagtgatcactacaccattcaaagagatctcgatgggacctgctccctccataccacagcctccaccctagatgatgatgggaattatacaattatggctgcaaaccctcagggccgcatcagttgtactggacggctaatggtacaggctgtcaaccaaagaggtcgaagtccccggtctccctcaggccatcctcatgtcagaaggcctcgttctagatcaagggacagtggagacgaaaatgaaccaattcaggagcgattcttcagacctcacttcttgcaggctcctggagatctgactgttcaagaaggaaaactctgcagaatggactgcaaagtcagtgggttaccaaccccagatctaagctggcaactagatggaaagcccgtacgccctgacagtgctcacaagatgctggtgcgtgagaacggggtgcactctctgatcatagagccagtcacgtcacgtgatgccggcatctacacatgtatagctaccaaccgagcaggacagaactcattcagcctggagcttgtggttgctgctaaagaagcacacaaaccccctgtgtttattgagaagctccaaaacacaggagttgctgatgggtacccagtgcggctggaatgtcgtgtattgggagtgccaccacctcagatattttggaagaaagaaaatgaatcactcactcacagcactgaccgagtgagcatgcaccaggacaaccacggctacatctgcctgctcattcagggagccacaaaagaagatgctgggtggtatactgtgtcagccaagaatgaagcagggattgtgtcctgtactgccaggctggacgtttacatttctcgacattaatagtgaaccacaccaggagaacaaatacccaacccagtggcatcagcagtcacagagcaccaagccaaaaaaagtacggccctcagccagtcgctatgcagcactttcggaccagggactagacatcaaagcagcgttccaacctgaggccaacccatctcacctgacactgaatactgccttggtagaaagtgaggacctgtaatccagcattcttgttaaagctgaaacactgaaacagccattgccttgaccaacatattcctttgtcacattatgtaaaaggcagaaacatacctttgactataagaaattaaaaaaaaacaccaaaataatatttttcttacttgatataccaaacttagtttaagtagataatgctaatacaaatatacacattgcacagaaaatacacatttactgtccaatttaaaactttggaattgctgtgattaaagtgatcaaaatgccaaaatactaaaggaaatcaattgttcacaggtaactacaatttgtattatctacaagtgcctttaaacacaagatataggtgctgtgtagcctgatagtgtgaaatgtttaatgagggagttgtaccacaaacagtactacaatgattctgaagcacagtgtattcagacagatacagtgaaccaagtgcaatatgtaaggatgaaagaagaagagatgacaaagaartccaagtaaatgccttgtctttgcaaatgtttttatattaaatcataaggaaggaactacttgccttaaatgttaatatcaaaagagttttctaacaaggttaataccttagttcttaacattttttttctttatgtgtagtgttttcatgctaccttggtaggaaacttatttacaaaccatattaaaaggctaatttaaatataaataatataaagtgctctgaataaagcagaaatatattacagttcattccacagaaagcatccaaaccacccaaatgaccaaggcatatatagtatttggaggaatcaggggtttggaaggagtagggaggagaatgaaggaaartgcaaccagcatgattatagtgtgttcatttagataaaagtagaaggcacaggagaggtagcaaaggccaggcttttctttggttttcttcaaacataggtgaaaaaaacactgccattcacaagtcaaggaacccagggccagctggaagtgtggagcacacatgctgtggagcacacatgctgtggagattgcagtgtgtctgaggtttgtgtagtagtggaagattttaggtatgtagagcaagttgaaaatggattgagactgcatggtggcataaatgagaaattgcctgtagcatctagtctacttgaaggaagtggagacataaggagagacaaaaacaggtttgtgccataaagtattttttcaaagacaccaagatgtggtaaatgaaaattattagttcacttccctgctgccatgaaactttgccttaagaaggtgctggattccaaggtttgtaaaggcatctcggtaaagactgctttttgaatgcatatgattttgcatcagctagactgagttgattctgaccagacttgatggttttaagtcggaaccgataaattttaaaaaggagaaaaaataatttgacctagtagtataaaacatgaggctttaatggtactttgctatgaaaagaaaacactgtattccttatgcaaaacacatgtatctttcattatttataagtggcctctcttagctcagttactcaattcatacgtaatattttttaaaataattttatatctgtgtaccaccccatatatttcatattactgtttcacatgtacagctttctacttctttgtaagaacaccaaccaaccaaggtttaagtgattaataggcttgagcaccgggtggcagatgttctatgcagtgtggttcaagtttctttgaccgcacttatatgcattgctagtatggaatttaagataccatacacagtctctcatggacctatctctattgtagaattatgacttatgtcttacttggcaaatttttctgaatgtgacctttttttgctgatttgctgggtttgggattaactagcattattttgccacctttatattgtatttataaaaaaaagtactatcaatcaatcatactactttggattgttgtgctggtgtaatgtggatttaacatcaataaatatttgacaaataaaaaaaaa

SEQ ID NO: 132 - protein, 1106 aa, Homo sapien
MSGTSSHESFYDSLSDMQEESKNTDFFPGLSAFLSQEEINKSLDLARRAIADSETEDFDSEKEISQIFSTSPASLCEHPSHKETKLGEHASRRPQDNRSTPVQPLAEKQTKSISSPVSKRKPAMSPLLTRPSYIRSLRKAEKRGAKTPSTNVKPKTPHQRKGGPQSQLCDKAANLIEELTSIFKAAKPRNRSPNGESSSPDSGYLSPKNQPSALLSASASQSPMEDQGEMEREVKSPGARHCYQDNQDLAVPHNRKSHPQPHSALHFPAAPRFIQKLRSQEVAEGSRVYLECRVTGNPTPRVRWFCEGKELHNTPDIQIHCEGGDLHTLIIAEAFEDDTGRYTCLATNPSGSDTTSAEVFIEGASSTDSDSESLAFKSRAGAMPQAQKKTTSVSLTIGSSSPKTGVTTAVIQPLSVPVQQVHSPTSYLCRPDGTTTAYFPPVFTKELQNTAVAEGQVVVLECRVRGAPPLQVQWFRQGSEIQDSPDFRILQKKPRSTAEPEEICTLVIAETFPEDAGIFTCSARNDYGSATSTAQLVVTSANTENCSYESMGESNNDHFQHFPPPPPILETSSLELASKKPSEIQQVNNPELGLSRAALQMQFNAAERETSGVHPSRGVNGLINGKANSNKSLPTPAVLLSPTKEPPPLLAKPKLGFPKKASRTARIASDEEIQGTKDAVIQDLERKLRFKEDLLNNGQPRLTYEERMARRLLGADSATVFNIQEPEEETANQEYKVSSCEQRLISEIEYRLERSPVDESGDEVQYGDVPVENGMAPFFEMKLKHYKIFEGMPVTFTCRVAGNPKPKIYWFKDGKQISPKSDHYTIQRDLDGTCSLHTTASTLDDDGNYTIMAANPQGRISCTGRLMVQAVNQRGRSPRSPSGHPHVRRPRSRSRDSGDENEPIQERFFRPHFLQAPGDLTVQEGKLCRMDCKVSGLPTPDLSWQLDGKPVRPDSAHKMLVRENGVHSLIIEPVTSRDAGIYTCIATNRAGQNSFSLELVVAAKEAHKPPVFIEKLQNTGVADGYPVRLECRVLGVPPPQIFWKKENESLTHSTDRVSMHQDNHGYICLLIQGATKEDAGWYTVSAKNEAGIVSCTARLDVYISRH

SEQ ID NO: 133 - DNA, 1692 bp, Homo sapien
atacacgtgccatgtgcagcatgaggggctacccgagcccgtcaccctgagatggaagccggcttcccagcccaccatccccatcgtgggcatcattgctggcctggttctccttggatctgtggtctctggagctgtggttgctgctgtgatatggaggaagaagagctcaggtggaaaaggagggagctactctaaggctgagtggagcgacagtgcccaggggtctgagtctcacagcttgtaaagcctgagacagctgccttgtgtgcgactgagatgcacagctgccttgtgtgcgactgagatgcaggatttcctcacgcctcccctatgtgtcttaggggactctggcttctctttttgcaagggcctctgaatctgtctgtgtccctgttagcacaatgtgaggaggtagagaaacagtccacctctgtgtctaccatgacccccttcctcacactgacctgtgttccttccctgttctcttttctattaaaaataagaacctgggcagagtgcggcagctcatgcctgtaatcccagcacttagggaggccgaggagggcagatcacgaggtcaggagatcgaaaccatcctggctaacacggtgaaaccccgtctctactaaaaaatacaaaaaattagctgggcgcagaggcacgggcctgtagtcccagctactcaggaggcggaggcaggagaatggcgtcaacccgggaggcggaggttgcagtgagccaggattgtgcgactgcactccagcctgggtgacagggtgaaacgccatctcaaaaaataaaaattaaaaaataaaaaaagaacctggatctcaatttaatttttcatattcttgcaatgaaatggacttgaggaagctaagatcatagctagaaatacagataattccacagcacatctctagcaaatttagcctattcctattctctagcctattccttaccacctgtaatcttgaccatataccttggagttgaatattgttttcatactgctgtggtttgaatgttccctccaacactcatgttgagacttaatccctaatgtggcaatactgaaaggtggggcctttgagatgtgattggatcgtaaggctgtgccttcattcatgggttaatggattaatgggttatcacaggaatgggactggtggctttataagaagaggaaaagagaactgagctagcatgcccaacccacagagagcctccactagagtgatgctaagtggaaatgtgaggtgcagctgccacagagggcccccaccagggaaatgtctagtgtctagtggatccaggccacaggagagagtgccttgtggagcgctgggagcaggacctgaccaccaccaggaccccagaactgtggagtcagtggcagcatgcagcgcccccttgggaaagctttaggcaccagcctgcaacccattcgagcagccacgtaggctcgacccagcaaagccacaggcacggggctacctgaggccttgggggccaatccctgctccagtgtgtccgtgaggcagcacacgaagtcaaaagagattatctcttcccacagataccttttctctcccatgaccctttaacagcatctgcttcattcccctcaccttcccaggctgatctgaggtaaactttgaagtaaaataaaagctgtgtttgagcatc

SEQ ID NO: 134 - DNA, 5773 bp, Homo sapien; identical to SEQ ID NO: 131

SEQ ID NO: 135 - protein, 1106 aa, Homo sapien; identical to SEQ ID NO: 132

SEQ ID NO: 136 - DNA, 482 bp, Homo sapien
ttccttttcctccctgtcgccaccgaggtcgcacgcgtgagacttctccgccgcctccgccgcagacgccgccgcgatgcgctacgtcgcctcctacctgctggctgccctagggggcaactcctcccccagcgccaaggacatcaagaagatcttggacagcgtgggtatcgaggcggacgacgaccggctcaacaaggttatcagtgagctgaatggaaaaaacattgaagacgtcattgcccagggtattggcaagcttgccagtgtacctgctggtggggctgtagccgtctctgctgccccaggctctgcagcccctgctgctggttctgcccctgctgcagcagaggagaagaaagatgagaagaaggaggagtctgaagagtcagatgatgacatgggatttggcctttttgattaaattcctgctcccctgcaaataaagcctttttacacatctcaaaaaaaaaaaaaaaaaa

SEQ ID NO: 137 - protein, 115 aa, Homo sapien
MRYVASYLLAALGGNSSPSAKDIKKILDSVGIEADDDRLNKVISELNGKNIEDVIAQGIGKLASVPAGGAVAVSAAPGSAAPAAGSAPAAAEEKKDEKKEESEESDDDMGFGLFD

SEQ ID NO: 138 - DNA, 1901 bp, Homo sapien
atggggcatcggccggtgctcgtgctcagccagaacacaaagcgtgaatccggaagaaaagttcaatctggaaacatcaatgctgccaagactattgcagatatcatccgaacatgtttgggacccaagtccatgatgaagatgcttttggacccaatgggaggcattgtgatgaccaatgatggcaatgccattcttcgagagattcaagtccagcatccagcggccaagtccatgatcgaaattagccggacccaggatgaagaagttggagatgggaccacatcagtaattattcttgcaggggaaatgctgtctgtagctgagcacttcctggagcagcagatgcacccaacagtggtgatcagtgcttaccgcaaggcattggatgatatgatcagcaccctaaagaaaataagtatcccagtcgacatcagtgacagtgatatgatgctgaacatcatcaacagctctattactaccaaagccatcagccggtggtcatctttggcttgcaacattgccctggatgctgtcaagatggtacagtttgaggagaatggtcggaaagagattgacataaaaaaatatgcaagagtggaaaagatacctggaggcatcattgaagactcctgtgtcttgcgtggagtcatgattaacaaggatgtgacccatccacgtatgcggcgctatatcaagaaccctcgcattgtgctgctggattcttctctggaatacaagaaaggaggaagccagactgacattgagattacacgagaggaggacttcacccgaattctccagatggaggaagagtacatccagcagctctgtgaggacattatccaactgaagcccgatgtggtcatcactgaaaagggcatctcagatttagctcagcactaccttatgcgggccaatatcacagccatccgcagagtccggaagacagacaataatcgcattgctagagcctgtggggcccggatagtcagccgaccagaggaactgagagaagatgatgttggaacaggagcaggcctgttggaaatcaagaaaattggagatgaatactttactttcatcactgactgcaaagaccccaaggcctgcaccattctcctccggggggctagcaaagagattctctcggaagtagaacgcaacctccaggatgccatgcaagtgtgtcgcaatgttctcctggaccctcagctggtgccagggggtggggcctccgagatggctgtcgcccatgccttgacagaaaaatccaaggccatgactggtgtggaacaatggccatacagggctgttgcccaggccctagaggtcattcctcgtaccctgatccagaactgtggggccagcaccatccgtctacttacctcccttcgggccaagcacacccaggagaactgtgagacctggggtgtaaatggtgagacgggtactttggtggacatgaaggaactgggcatatgggagccattggctgtgaagctgcagacttataagacagcagtggagacggcagttctgctactgcgaattgatgacatcgtttcaggccacaaaaagaaaggcgatgaccagagccggcaaggcggggctcctgatgctggccaggagtgagtgctaggcaaggctacttcaatgcacagaaccagcagagtctccccttttcctgagccagagtgccaggaacactgtggacgtctttgttcagaagggatcaggttggggggcagcccccagtccctttctgtcccagctcagttttccaaaagacactgacatgtaattcttctctattgtaaggtttccatttagtttgcttccgatgattaaatctaagtcatttgaaaaaaaaaaaaaaaaaaaaaaaaaaaaaaaaaaaa

SEQ ID NO: 139 - protein, 544 aa, Homo sapien
MGHRPVLVLSQNTKRESGRKVQSGNINAAKTIADIIRTCLGPKSMMKMLLDPMGGIVMTNDGNAILREIQVQHPAAKSMIEISRTQDEEVGDGTTSVIILAGEMLSVAEHFLEQQMHPTVVISAYRKALDDMISTLKKISIPVDISDSDMMLNIINSSITTKAISRWSSLACNIALDAVKMVQFEENGRKEIDIKKYARVEKIPGGIIEDSCVLRGVMINKDVTHPRMRRYIKNPRIVLLDSSLEYKKGGSQTDIEITREEDFTRILQMEEEYIQQLCEDIIQLKPDVVITEKGISDLAQHYLMRANITAIRRVRKTDNNRIARACGARIVSRPEELREDDVGTGAGLLEIKKIGDEYFTFITDCKDPKACTILLRGASKEILSEVERNLQDAMQVCRNVLLDPQLVPGGGASEMAVAHALTEKSKAMTGVEQWPYRAVAQALEVIPRTLIQNCGASTIRLLTSLRAKHTQENCETWGVNGETGTLVDMKELGIWEPLAVKLQTYKTAVETAVLLLRIDDIVSGHKKKGDDQSRQGGAPDAGQE

SEQ ID NO: 140 - DNA, 1783 bp, Homo sapien
cctctcggagctggaaatgcagctattgagatcttcgaatgctgcggagctggaggcggaggcagctggggaggtccgagcgatgtgaccaggccgccatcgctcgtctcttcctctctcctgccgcctcctgtgtcgaaaataacttttttagtctaaagaaagaaagacaaaagtagtcgtccgcccctcacgccctctcttcctctcagccttccgcccggtgaggaagcccggggtggctgctccgccgtcggggccgcgccgccgagccccagcgccccgggccgcccccgcacgccgcccccatgcatcccttctacacccgggccgccaccatgataggcgagatcgccgccgccgtgtccttcatctccaagtttctccgcaccaaggggctgacgagcgagcgacagctgcagaccttcagccagagcctgcaggagctgctggcagaacattataaacatcactggttcccagaaaagccatgcaagggatcgggttaccgttgtattcgcatcaaccataaaatggatcctctgattggacaggcagcacagcggattggactgagcagtcaggagctgttcaggcttctcccaagtgaactcacactctgggttgacccctatgaagtgtcctacagaattggagaggatggctccatctgtgtgctgtatgaagcctcaccagcaggaggtagcactcaaaacagcaccaacgtgcaaatggtagacagccgaatcagctgtaaggaggaacttctcttgggcagaacgagcccttccaaaaactacaatatgatgactgtatcaggttaagatatagtctgtggatggatcatctgatgatgatccataaatttgatttttgctttgggtgggctcctcttggggatggattatggaatttaaaccatgtcacagctgtgaagatctggcacaagatagaatggtaaaaaaaaaaaaaaattttaagtgacagtgccatagtttggacagtacctttcaatgattaattttaatagcctgtgagtccaagtaaatgatcactttatttgctagggagggaagtcctagggtggtttcagtttctcccagacatacctaaatttttacatcaatccttttaaagaaaatctgtatttcaaagaatctttctctgcagtaaatctcgcaggggaatttgcactattacacttgaaagttgttattgttaaccttttcggcagcttttaataggaaagttaaacgttttaaacatggtagtactggaaattttacaagacttttacctagcacttaaatatgtataaatgtacataaagacaaactagtaagcatgacctggggaaatggtcagaccttgtattgtgtttttggccttgaaagtagcaagtgaccagaatctgccatggcaacaggctttaaaaaagacccttaaaaagacactgtctcaactgtggtgttagcaccagccagctctctgtacatttgctagcttgtagttttctaagactgagtaaacttcttatttttagaaagtggaggtctggtttgtaactttccttgtacttaattgggtaaaagtcttttccacaaaccaccatctattttgtgaactttgttagtcatcttttatttggtaaattatgaactggtgtaaatttgtacagttcatgtatattgattgtggcaaagttgtacagatttctatattttggatgagaaatttttcttctctctataataaatcgtttcttatcttggcatttttaacc

SEQ ID NO: 141 - protein, 171 aa, Homo sapien
MHPFYTRAATMIGEIAAAVSFISKFLRTKGLTSERQLQTFSQSLQELLAEHYKHHWFPEKPCKGSGYRCIRINHKMDPLIGQAAQRIGLSSQELFRLLPSELTLWVDPYEVSYRIGEDGSICVLYEASPAGGSTQNSTNVQMVDSRISCKEELLLGRTSPSKNYNMMTVSG

SEQ ID NO: 142 - DNA, 1783 bp, Homo sapien; identical to SEQ ID NO: 140

SEQ ID NO: 143 - protein, 171 aa, Homo sapien; identical to SEQ ID NO: 141

SEQ ID NO: 144 - DNA, 5341 bp, Homo sapien
gcacagtctgtctcttcgccggttcccggccccgtggatcctacttctctgtcgcccgcggttcgccgccccgctcgccgccgcgatgccagtgtttcatacgcgcacgatcgagagcatcctggagccggtggcacagcagatctcccacctggtgataatgcacgaggagggcgaggtggacggcaaagccattcctgacctcaccgcgcccgtggccgccgtgcaggcggccgtcagcaacctcgtccgggttggaaaagagactgttcaaaccactgaggatcagattttgaagagagatatgccaccagcatttattaaggttgagaatgcttgcaccaagcttgtccaggcagctcagatgcttcagtcagacccttactcagtgcctgctcgagattatctaattgatgggtcaaggggcatcctctctggaacatcagacctgctccttaccttcgatgaggctgaggtccgtaaaattattagagtttgcaaaggaattttggaatatcttacagtggcagaggtggtggagactatggaagatttggtcacttacacaaagaatcttgggccaggaatgactaagatggccaagatgattgacgagagacagcaggagctcactcaccaggagcaccgagtgatgttggtgaactcgatgaacaccgtgaaagagttgctgccagttctcatttcagctatgaagatttttgtaacaactaaaaactcaaaaaaccaaggcatagaggaagctttaaaaaatcgcaattttactgtagaaaaaatgagtgctgaaattaatgagataattcgtgtgttacaactcacctcttgggatgaagatgcctgggccagcaaggacactgaagccatgaagagagcattggcctccatagactccaaactgaaccaggccaaaggttggctccgtgaccctagtgcctccccaggggatgctggtgagcaggccatcagacagatcttagatgaagctggaaaagttggtgaactctgtgcaggcaaagaacgcagggagattctgggaacttgcaaaatgctagggcagatgactgatcaagtggctgacctccgtgccagaggacaaggatcctcaccggtggccatgcagaaagctcagcaggtatctcagggtctggatgtgctcacagcaaaagtggaaaatgcagctcgcaagctggaagccatgaccaactcaaagcagagcattgcaaagaagatcgatgctgctcagaactggcttgcagatccaaatggtggaccggaaggagaagagcagattcgaggtgctttggctgaagctcggaaaatagcagaattatgtgatgatcctaaagaaagagatgacattctacgttcccttggggaaatatctgctctgacttctaaattagcagatctacgaagacaggggaaaggagattctccagaggctcgagccttggccaaacaggtggccacggccctgcagaacctgcagaccaaaaccaaccgggctgtggccaacagcagaccggccaaagcagctgtacaccttgagggcaagattgagcaagcacagcggtggattgataatcccacagtggatgaccgtggagtcggtcaggctgccatccgggggcttgtggccgaagggcatcgtctggctaatgttatgatggggccttatcggcaagatcttctcgccaagtgtgaccgagtggaccagctgacagcccagctggctgacctggctgccagaggggaaggggagagtcctcaggcacgagcacttgcatctcagctccaagactccttaaaggatctaaaagctcggatgcaggaggccatgactcaggaagtgtcagatgttttcagcgataccacaactcccatcaagctgttggcagtggcagccacggcgcctcctgatgcgcctaacagggaagaggtatttgatgagagggcagctaactttgaaaaccattcaggaaagcttggtgctacggccgagaaggcggctgcggttggtactgctaataaatcaacagtggaaggcattcaggcctcagtgaagacggcccgagaactcacaccccaggtggtctcggctgctcgtatcttacttaggaaccctggaaatcaagctgcttatgaacattttgagaccatgaagaaccagtggatcgataatgttgaaaaaatgacagggctggtggacgaagccattgataccaaatctctgttggatgcttcagaagaagcaattaaaaaagacctggacaagtgcaaggtagctatggccaacattcagcctcagatgctggttgctggggcaaccagtattgctcgtcgggccaaccggatcctgctggtggctaagagggaggtggagaattccgaggatcccaagttccgtgaggctgtgaaagctgcctctgatgaattgagcaaaaccatctccccaatggtgatggatgcaaaagctgtggctggaaacatttccgaccctggactgcaaaagagcttcctggactcaggatatcggatcctgggagctgtggccaaggtcagagaagccttccaacctcaggagcctgacttcccgccgcctccaccagaccttgaacaactccgactaacagatgagcttgctcctcccaaaccacctctgcctgaaggtgaggtccctccacctaggcctccaccaccagaggaaaaggatgaagagttccctgagcagaaggccggggaggtgattaaccagccaatgatgatggctgccagacagctccatgatgaagctcgcaaatggtccagcaagccgggcatcccagccgctgaggtgggtataggtgttgtagctgaggcagatgcggccgatgctgctggcttccctgtcccccctgacatggaagacgattacgaacctgagctgctgttaatgccatccaatcagccggtcaaccagcccattctggccgcggctcagtccttgcatcgggaagctaccaagtggtctagtaagggcaatgacatcattgcagcagccaagcgcatggctctgctgatggctgagatgtctcggctggtaagagggggcagtggtaccaagcgggcactcattcagtgtgccaaggacatcgccaaggcctcagatgaggtgactcggttggccaaggaggttgccaagcagtgcacagataaacggattagaaccaacctcttacaggtatgtgagcgaatcccaaccataagcacccagctcaaaatcctgtccacagtgaaggccaccatgctgggccggaccaacatcagtgatgaggagtctgagcaggccacagagatgctggttcacaatgcccagaacctcatgcagtctgtgaaggagactgtgcgggaagctgaagctgcttcaatcaaaattcgaacagatgctggatttacactgcgctgggttagaaagactccctggtaccagtaggcacctggctgagcctggctggcacagaaacctctactaaaaagaaggaaaatgatctgagtcccaggagctgcccagagttgctgggagctgaaaaatcacatcctggcctggcacatcagaaaggaatgggggcctcttcaaattagaagacatttatactcttttttcatggacactttgaaatgtgtttctgtataaagcctgtattctcaaacacagttacacttgtgcaccctctatcccaataggcagactgggtttctagcccatggacttcacataagctcagaatccaagtgaacactagccagacactctgctctgcccttgttccctaggggacacttccctctgtttctctttccttggctcccattcactcttccagaatcccaagacccagggcccaggcaaatcagttactaagaagaaaattgctgtgcctcccaaaattgttttgagctttccatgttgctgccaaccataccttccttccctgggctgtgctacctgggtccttttcagaagtgagctttgctgctacaggggaaggtggcctctgtggagccccagcatatgggggcctggattcatttcctgcccttcctcagtttaatccttctagtttcccacaatataaaactgtacttcactgtcaggaagaaatcacagaatcatatgattctgcttttaccatgcccctgagcaatgtctgtgctagggaaactccccgtcccatatcctgcctcagcccgccaaggtagccatcccatgaacacactgtgtcctggtgctctctgccactggaagggcagagtagccagggtgtggccctgccatcttcccagcagggccactcccggcactccatgcttagtcactgcctgcagaggtctgtgctgaggccttatcattcattcttagctcttaattgttcattttgagctgaaatgctgcattttaattttaaccaaaacatgtctcctatatcctggtttttgtagccttcctccacatcctttctaaacaagattttaaagacatgtaggtgtttgttcatctgtaactctaaaagatcctttttaaattcagtcctaagaaagaggagtgcttgtcccctaagagtgtttaatggcaaggcagccctgtctgaaggacacttcctgcctaagggagagtggtatttgcagactagaattctagtgctgctgaagatgaatcaatgggaaatactactcctgtaattcctacctccctgcaaccaactacaaccaagctctctgcatctactcccaagtatggggttcaagagagtaatgggtttcatatttcttatcaccacagtaagttcctactaggcaaaatgagagggcagtgtttcctttttggtacttattactgctaagtatttcccagcacatgaaaccttattttttccaaagccagaaccagatgagtaaaggagtaagaaccttgcctgaacatccttccttcccacccatcgctgtgtgttagttcccaacatcgaatgtgtacaacttaagttggtcctttacactcaggctttcactatttcctttaaaatgaggatgattattttcaaggccctcagcatatttgtatagttgcttgcctgatataaatgcaatattaatgcctttaaagtatgaatctatgccaaagatcacttgttgttttactaaagaaagattacttagaggaaataagaaaaatcatgtttgctctcccggttcttccagtggtttgagacactggtttacactttatgccggatgtgcttttctccaatatcagtgctcgagacacagtgaagcaaattaaaaaaaa

SEQ ID NO: 145 - protein, 1134 aa, Homo sapien
MPVFHTRTIESILEPVAQQISHLVIMHEEGEVDGKAIPDLTAPVAAVQAAVSNLVRVGKETVQTTEDQILKRDMPPAFIKVENACTKLVQAAQMLQSDPYSVPARDYLIDGSRGILSGTSDLLLTFDEAEVRKIIRVCKGILEYLTVAEVVETMEDLVTYTKNLGPGMTKMAKMIDERQQELTHQEHRVMLVNSMNTVKELLPVLISAMKIFVTTKNSKNQGIEEALKNRNFTVEKMSAEINEIIRVLQLTSWDEDAWASKDTEAMKRALASIDSKLNQAKGWLRDPSASPGDAGEQAIRQILDEAGKVGELCAGKERREILGTCKMLGQMTDQVADLRARGQGSSPVAMQKAQQVSQGLDVLTAKVENAARKLEAMTNSKQSIAKKIDAAQNWLADPNGGPEGEEQIRGALAEARKIAELCDDPKERDDILRSLGEISALTSKLADLRRQGKGDSPEARALAKQVATALQNLQTKTNRAVANSRPAKAAVHLEGKIEQAQRWIDNPTVDDRGVGQAAIRGLVAEGHRLANVMMGPYRQDLLAKCDRVDQLTAQLADLAARGEGESPQARALASQLQDSLKDLKARMQEAMTQEVSDVFSDTTTPIKLLAVAATAPPDAPNREEVFDERAANFENHSGKLGATAEKAAAVGTANKSTVEGIQASVKTARELTPQVVSAARILLRNPGNQAAYEHFETMKNQWIDNVEKMTGLVDEAIDTKSLLDASEEAIKKDLDKCKVAMANIQPQMLVAGATSIARRANRILLVAKREVENSEDPKFREAVKAASDELSKTISPMVMDAKAVAGNISDPGLQKSFLDSGYRILGAVAKVREAFQPQEPDFPPPPPDLEQLRLTDELAPPKPPLPEGEVPPPRPPPPEEKDEEFPEQKAGEVINQPMMMAARQLHDEARKWSSKPGIPAAEVGIGVVAEADAADAAGFPVPPDMEDDYEPELLLMPSNQPVNQPILAAAQSLHREATKWSSKGNDIIAAAKRMALLMAEMSRLVRGGSGTKRALIQCAKDIAKASDEVTRLAKEVAKQCTDKRIRTNLLQVCERIPTISTQLKILSTVKATMLGRTNISDEESEQATEMLVHNAQNLMQSVKETVREAEAASIKIRTDAGFTLRWVRKTPWYQ

SEQ ID NO: 146 - DNA, 967 bp, Mus musculus
gcggcatgggcagtatccgccgccatcctcttccgtgaggcgcgctgagacccggaccggccctcctgagaggatgccggtgcgggcgcccgcggagagggacccgtcgccatgggccgtgtgatccgtggacagaggaagggcgccgggtctgtgttccgcgcgcacgtgaagcaccgtaaaggcgctgcgcgcctgcgcgccgtggatttcgctgagcggcacggctacatcaagggcatcgtcaaggacatcatccacgacccgggccgcggcgcgcccctcgccaaggtggtcttccgggatccgtatcggtttaagaagcggacggagctgttcattgccgccgagggcattcacacgggccagtttgtgtattgcggcaagaaggcccagctcaacattggcaatgtgctccctgtgggcaccatgcctgagggtacaatcgtgtgctgcctggaggagaagcctggagaccgtggcaagctggcccgggcatcagggaactatgccaccgttatctcccacaaccctgagaccaagaagacccgtgtgaagctgccctccggctccaagaaggttatctcctcagccaacagagctgtggttggtgtggtggctggaggtggccgaattgacaaacccatcttgaaggctggccgggcgtaccacaaatataaggcaaagaggaactgctggccacgagtacggggtgtggccatgaatcctgtggagcatccttttggaggtggcaaccaccagcacatcggcaagccctccaccatccgcagagatgcccctgctggccgcaaagtgggtctcattgctgcccgccggactggacgtctccggggaaccaagactgtgcaggagaaagagaactagtgctgagggcctcaataaagtttgtgtttatgccaaaaaaaaaaaaaaaaaaaaaaaaaaaaaaaaaaaaaaaaaaaaaaaa

SEQ ID NO: 147 - protein, 257 aa, Mus musculus [sequence omitted]

SEQ ID NO: 148 - DNA, 547 bp, Homo sapien
acggaagtgtaggttacggtctgagacatcaccgccaagctgggcatcggggagatggccgagactgaccccaagaccgtgcaggacctcacctcggtggtgcagacactcctgcagcagatgcaagataaatttcagaccatgtctgaccagatcattgggagaattgatgatatgagtagtcgcattgatgatctggaaaagaatatcgcggacctcatgacacaggctggggtggaagaactggaaagtgaaaacaagatacctgccacgcaaaagagttgaaggttgctaataatttatactggaatctggcatttttccaagccaagagaagatcgaatggctttttgcagctaactactatgtgtagacaggttttatattataaagtatgcattcttatcacctagtatatagttagtttgtagagtgatttccccccagtttcttgaacatggtatcttcacatcttggaccttggtcagttgtgctattcattattaaacactaaaactttggcggttcttgcataaaaaaaaaaaaa

SEQ ID NO: 149 - protein, 76 aa, Homo sapien
MAETDPKTVQDLTSVVQTLLQQMQDKFQTMSDQIIGRIDDMSSRIDDLEKNIADLMTQAGVEELESENKIPATQKS

SEQ ID NO: 150 - DNA, 6480 bp, Homo sapien
agagcgagcaggggagagcgagaccagttttaaggggaggaccggtgcgagtgaggcagccccgaggctctgctcgcccaccacccaatcctcgcctcccttctgctccaccttctctctctgccctcacctctcccccgaaaaccccctatttagccaaaggaaggaggtcaggggaacgctctcccctccccttccaaaaaacaaaaacagaaaaacccttttccaggccggggaaagcaggagggagaggggccgccgggctggccatggagctgctgtgccacgaggtggacccggtccgcagggccgtgcgggaccgcaacctgctccgagacgaccgcgtcctgcagaacctgctcaccatcgaggagcgctaccttccgcagtgctcctacttcaagtgcgtgcagaaggacatccaaccctacatgcgcagaatggtggccacctggatgctggaggtctgtgaggaacagaagtgcgaagaagaggtcttccctctggccatgaattacctggaccgtttcttggctggggtcccgactccgaagtcccatctgcaactcctgggtgctgtctgcatgttcctggcctccaaactcaaagagaccagcccgctgaccgcggagaagctgtgcatttacaccgacaactccatcaagcctcaggagctgctggagtgggaactggtggtgctggggaagttgaagtggaacctggcagctgtcactcctcatgacttcattgagcacatcttgcgcaagctgccccagcagcgggagaagctgtctctgatccgcaagcatgctcagaccttcattgctctgtgtgccaccgactttaagtttgccatgtacccaccgtcgatgatcgcaactggaagtgtgggagcagccatctgtgggctccagcaggatgaggaagtgagctcgctcacttgtgatgccctgactgagctgctggctaagatcaccaacacagacgtggattgtctcaaagcttgccaggagcagattgaggcggtgctcctcaatagcctgcagcagtaccgtcaggaccaacgtgacggatccaagtcggaggatgaactggaccaagccagcacccctacagacgtgcgggatatcgacctgtgaggatgccagttgggccgaaagagagagacgcgtccataatctggtctcttcttctttctggttgtttttgttctttgtgttttagggtgaaacttaaaaaaaaaattctgcccccacctagatcatatttaaagatcttttagaagtgagagaaaaaggtcctacgaaaacggaataataaaaagcatttggtgcctatttgaagtacagcataagggaatcccttgtatatgcgaacagttattgtttgattatgtaaaagtaatagtaaaatgcttacaggaaaacctgcagagtagttagagaatatgtatgcctgcaatatgggaacaaattagaggagacttttttttttcatgttatgagctagcacatacacccccttgtagtataatttcaaggaactgtgtacgccatttatggcatgattagattgcaaagcaatgaactcaagaaggaattgaaataaggagggacatgatggggaaggagtacaaaacaatctctcaacatgattgaaccatttgggatggagaagcacctttgctctcagccacctgttactaagtcaggagtgtagttggatctctacattaatgtcctcttgctgtctacagtagctgctacctaaaaaaagatgttttattttgccagttggacacaggtgattggctcctgggtttcatgttctgtgacatcctgcttcttcttccaaatgcagttcattgcagacaccaccatattgctatctaatggggaaatgtagctatgggccataaccaaaactcacatgaaacggaggcagatggagaccaagggtgggatccagaatggagtcttttctgttattgtatttaaaagggtaatgtggccttggcatttcttcttagaaaaaaactaatttttggtgctgattggcatgtctggttcacagtttagcattgttataaaccattccattcgaaaagcactttgaaaaattgttcccgagcgatagatgggatggtttatgcaagtcatgctgaatactcctcccctcttctcttttgccccctcccttcctgcccccagtctgggttactcttcgcttctggtatctggcgttctttggtacacagttctggtgttcctaccaggactcaagagacaccccttcctgctgacattcccatcacaacattcctcagacaagcctgtaaactaaaatctgttaccattctgatggcacagaaggatcttaattcccatctctatacttctcctttggacatggaaagaaaagttattgctggtgcaaagatagatggctgaacatcagggtgtggcattttgttcccttttccgttttttttttttttattgttgttgttaattttattgcaaagttgtattcagcgtacttgaatttttcttcctctccacttcttagaggcattcagttagcaaagaggttggagcaacaacttttttttttttttttgcacaattgtaattgacaggtaatgaagctatttgttaaaatatttgcctttttaagtaaaaaagaaaaatcagaacagggctatttgaagaattattttatacacagattctgccttgtttcatagtatgagggttgaagacggaaaacaatctaagggtctctcatttttttaattttgttttgttcagtttggtttttttttttttttgcgctgctaagaagctaaagtcatccatccttattcacgttgacagtacctagctgtaatgtttcacagagtgtgctgctattttataaacatttttataatatattattttactgcttaaattccaagtcctgaagtagatggttgagatatgagttcttcgtactggaaaagcccttccgtagtttgttttcttctggtagcatattcatggttgtttttttttttcttttttggttttttggttttttttttttcctctgatcacattcttcaaagacggagtattctttacctcaggtttactggacaaaatcaataactacaaaaggcaatgattcacgcttttgttttcataatacctcacaaccgtacagtttctgcttgggagcccattcgcatgaggaatacagaagcagtgtgagcagggctgactccctctcaggtggaaggcagggcggtctcactcccagggacctttttggtcatggaggccatcgggctcccagttagaccctggtatcctcatcatgatggaaaaaatacattgaaccaagggatcctccctccccttcaaggcagacgttcagtacaaacatttatgcggtaggctcagatgtcgtaatttgcacttaggtaccaggtgtcaggaaacagactaaaaagaattccaccaggctgtttggagatcctcatcttggagctttttcaaaagcggggcttcatctgcaaagggccctttcatcttgaagtttttcccctccgtctttcccctcccctggcatggacaccttgtgtttaggatcatctctgcaggtttcctaggtctgaatctgcgagtagatgaacctgcagcaagcagcgtttatggtgcttccttctccctcctctgtctcaaactgcgcaggcaagcactatgcaagcccaggccctctgctgagcggtactaaacggtcgggttttcaatcacactgaattggcaggataagaaaaataggtcagataagtatgggatgatagttgaagggaggtgaagaggctgcttctctacagaggtgaaattccagatgagtcagtctcttgggaagtgtgtttagaagggttcaggactttgtgagttagcatgaccctaaaattctaggggatttctggtgggacaatgggtggtgaattttgaagttttggagagggaagtggagcagccagcaagtaagctagccagagttttctcaagagccagctttgctcagcacactctcctgggccccaaggagtcccacggaatggggaaagtgggaaccctggagttcttgggaatcttggagcctaaagagaaaccgaggtgcaaattcatttcatggtgactgacccttgagcttaaacagaagcagcaaatgaaagaaccggacaaataaggaagggcacaagcctacccgactctatttacagtctgtaactttccactcttcctgtagtcccgaggcccctgggtccttctagcttttctctttcccatccttggggccttgtgtgatgatgggtgtggggctgccgatgggaaagtcgggggttgttaggcttttctgcctgctcctgcttaaacacaagaaggaatcctggattttgccctctccttagctcttagtctctttggtaggagttttgttccagaggagctctcccccttggatttgaacttgctctttttgttgttgttgttctttctcttctttttcttacctcccactaaaggggttccaaattatcctggtctttttctaccttgttgtgtttctatctcgtctttacttccatctgtttgtttttttctccatcagtgggggccgagttgttcccccagcctgccaaattttgatccttcccctcttttggccaaatcctagggggaagaaatcctagtatgccaaaaatatatgctaagcataattaaactccatgcgggtccataacagccaagaagcctgcaggagaaagccaagggcagttccctccgcagaacaccccatgcgtgctgagaggcgagctccttgaagaaggggctgttcttccaggaggccttattttgaactgcctcaggaccccactggagagcacagcatgccttactactgggtcatccttggtctatgtgctctgtactggaggctctgttctgcctcttatcagccaggtcaggggcacacatggcttaagtgacaaagccagaggagaagacaaccctgacagcatcacgctgcatcccattgctagcaggattggcaactcttcagacggagctgcgcttccctgcagtctagcacctctagggcctctccagactgtgccctgggagctctgggactgaaaggttaagaacataaggcaggatcagatgactctctccaagagggcaggggaattttctctccatgggccacaggggacagggctgggagaagaaatagacttgcaccttatgtcatgtaaataattgattttctagttcaagaagataatattggtagtgtgggaattggaggtaggaaggggaggaagtctgagtaagccagttggcttctaagccaaaaggattcctctttgtttatctctgagacagtccaaccttgagaatagctttaaaagggaaattaatgctgagatgataaagtccccttaagccaacaaaccctctgtagctatagaatgagtgcaggtttctattggtgtggactcagagcaatttacaagagctgttcatgcagccatccatttgtgcaaaatagggtaagaagattcaagaggatatttattacttcctcataccacatggcttttgatgattctggattctaaacaacccagaatggtcatttcaggcacaacgatactacattcgtgtgtgtctgcttttaaacttggctgggctatcagaccctattctcggctcaggttttgagaagccatcagcaaatgtgtacgtgcatgctgtagctgcagcctgcatcccttcgcctgcagcctactttggggaaataaagtgccttactgactgtagccattacagtatccaatgtcttttgacaggtgcctgtccttgaaaaacaaagtttctatttttatttttaattggtttagttcttaactgctggccaactcttacatccccagcaaatcatcgggccattggattttttccattatgttcatcacccttatatcatgtacctcagatctctctctctctcctctctctcagttatatagtttcttgtcttggactttttttttcttttctttttctttttttttttgctttaaaacaagtgtgatgccatatcaagtccatgttattctctcacagtgtactctataagaggtgtgggtgtctgtttggtcaggatgttagaaagtgctgataagtagcatgatcagtgtatgcgaaaaggtttttaggaagtatggcaaaaatgttgtattggctatgatggtgacatgatatagtcagctgccttttaagaggtcttatctgttcagtgttaagtgatttaaaaaaataataacctgttttctgactagtttaaagatggatttgaaaatggttttgaatgcaattaggttatgctatttggacaataaactcaccttgacct

SEQ ID NO: 151 - protein, 289 aa, Homo sapien
MELLCHEVDPVRRAVRDRNLLRDDRVLQNLLTIEERYLPQCSYFKCVQKDIQPYMRRMVATWMLEVCEEQKCEEEVFPLAMNYLDRFLAGVPTPKSHLQLLGAVCMFLASKLKETSPLTAEKLCIYTDNSIKPQELLEWELVVLGKLKWNLAAVTPHDFIEHILRKLPQQREKLSLIRKHAQTFIALCATDFKFAMYPPSMIATGSVGAAICGLQQDEEVSSLTCDALTELLAKITNTDVDCLKACQEQIEAVLLNSLQQYRQDQRDGSKSEDELDQASTPTDVRDIDL

SEQ ID NO: 152 - DNA, 6480 bp, Homo sapien; identical to SEQ ID NO: 150

SEQ ID NO: 153 - protein, 289 aa, Homo sapien; identical to SEQ ID NO: 151

SEQ ID NO: 154 - DNA, 6478 bp, Homo sapien
agagcgagcaggggagagcgagaccagttttaaggggaggaccggtgcgagtaaggcagccccgaggctctgctcgcccaccacccaatcctcgcctcccttctgctccaccttctctctctgccctcacctctcccccgaaaaccccctatttagccaaaggaaggaggtcaggggaacgctctcccctccccttccaaaaaacaaaaacagaaaaacccttttccaggccggggaaagcaggagggagaggggccgccgggctggccatggagctgctgtgccacgaggtggacccggtccgcagggccgtgcgggaccgcaacctgctccgagacgaccgcgtcctgcagaacctgctcaccatcgaggagcgctaccttccgcagtgctcctacttcaagtgcgtgcagaaggacatccaaccctacatgcgcagaatggtggccacctggatgctggaggtctgtgaggaacagaagtgcgaagaagaggtcttccctctggccatgaattacctggaccgtttcttggctggggtcccgactccgaagtcccatctgcaactcctgggtgctgtctgcatgttcctggcctccaaactcaaagagaccagcccgctgaccgcggagaagctgtgcatttacaccgacaactccatcaagcctcaggagctgctggagtgggaactggtggtgctggggaagttgaagtggaacctggcagctgtcactcctcatgacttcattgagcacatcttgcgcaagctgccccagcagcgggagaagctgtctctgatccgcaagcatgctcagaccttcattgctctgtgtgccaccgactttaagtttgccatgtacccaccgtcgatgatcgcaactggaagtgtgggagcagccatctgtgggctccagcaggatgaggaagtgagctcgctcacttgtgatgccctgactgagctgctggctaagatcaccaacacagacgtggattgtctcaaagcttgccaggagcagattgaggcggtgctcctcaatagcctgcagcagtaccgtcaggaccaacgtgacggatccaagtcggaggatgaactggaccaagccagcacccctacagacgtgcgggatatcgacctgtgaggatgccagttgggccgaaagagagagacgcgtccataatctggtctcttcttctttctggttgtttttgttctttgtgttttagggtgaaacttaaaaaaaaaattctgcccccacctagatcatatttaaagatcttttagaagtgagagaaaaaggtcctacgaaaacggaataataaaaagcatttggtgcctatttgaagtacagcataagggaatcccttgtatatgcgaacagttattgtttgattatgtaaaagtaatagtaaaatgcttacaggaaaacctgcagagtagttagagaatatgtatgcctgcaatatgggaacaaattagaggagactttttttttcatgttatgagctagcacatacacccccttgtagtataatttcaaggaactgtgtacgccatttatggcatgattagattgcaaagcaatgaactcaagaaggaattgaaataaggagggacatgatggggaaggagtacaaaacaatctctcaacatgattgaaccatttgggatggagaagcacctttgctctcagccacctgttactaagtcaggagtgtagttggatctctacattaatgtcctcttgctgtctacagtagctgctacctaaaaaaagatgttttattttgccagttggacacaggtgattggctcctgggtttcatgttctgtgacatcctgcttcttcttccaaatgcagttcattgcagacaccaccatattgctatctaatggggaaatgtagctatgggccataaccaaaactcacatgaaacggaggcagatggagaccaagggtgggatccagaatggagtcttttctgttattgtatttaaaagggtaatgtggccttggcatttcttcttagaaaaaaactaatttttggtgctgattggcatgtctggttcacagtttagcattgttataaaccattccattcgaaaagcactttgaaaaattgttcccgagcgatagatgggatggtttatgcaagtcatgctgaatactcctcccctcttctcttttgccccctcccttcctgcccccagtctgggttactcttcgcttctggtatctggcgttctttggtacacagttctggtgttcctaccaggactcaagagacaccccttcctgctgacattcccatcacaacattcctcagacaagcctgtaaactaaaatctgttaccatctgatggcacagaaggatcttaattcccatctctatacttctcctttggacatggaaagaaaagttattgctggtgcaaagatagatggctgaacatcagggtgtggcattttgttcccttttccgttttttttttttttattgttgttgttaattttattgcaaagttgtattcagcgtacttgaatttttcttcctctccacttcttagaggcattcagttagcaaagaggttggagcaacaactttttttttttttttttgcacaattgtaattgacaggtaatgaagctatttgttaaaatatttgcctttttaagtaaaaaagaaaaatcagaacagggctatttgaagaattattttatacacagattctgccttgtttcatagtatgagggttgaagacggaaaacaatctaagggtctctcatttttttaattttgttttgttcagtttggtttttttttttttttgcgctgctaagaagctaaagtcatccatccttattcacgttgacagtacctagctgtaatgtttcacagagtgtgctgctattttataaacatttttataatatattattttactgcttaaattccaagtcctgaagtagatggttgagatatgagttcttcgtactggaaaagcccttccgtagtttgttttcttctggtagcatattcatggttgtttttttttttcttttttggttttttggttttttttttttcctctgatcacattcttcaaagacggagtattcttacctcaggtttactggacaaaatcaataactacaaaaggcaatgattcacgcttttgttttcataatacctcacaaccgtacagtttctgcttgggagcccattcgcatgaggaatacagaagcagtgtgagcagggctgactccctctcaggtggaaggcagggcggtctcactcccagggacctttttggtcatggaggccatcgggctcccagttagaccctggtatcctcatcatgatggaaaaaatacattgaaccaagggatcctccctccccttcaaggcagacgttcagtacaaacatttatgcggtaggctcagatgtcgtaatttgcacttaggtaccaggtgtcaggaaacagactaaaaagaattccaccaggctgtttggagatcctcatcttggagctttttcaaaagcggggcttcatctgcaaagggccctttcatcttgaagtttttcccctccgtctttcccctcccctggcatggacaccttgtgtttaggatcatctctgcaggtttcctaggtctgaatctgcgagtagatgaacctgcagcaagcagcgtttatggtgcttccttctccctcctctgtctcaaactgcgcaggcaagcactatgcaagcccaggccctctgctgagcggtactaaacggtcgggttttcaatcacactgaattggcaggataagaaaaataggtcagataagtatgggatgatagttgaagggaggtgaagaggctgcttctctacagaggtgaaattccagatgagtcagtctcttgggaagtgtgtttagaagggttcaggactttgtgagttagcatgaccctaaaattctaggggatttctggtgggacaatgggtggtgaattttgaagttttggagagggaagtggagcagccagcaagtaagctagccagagttttctcaagagccagctttgctcagcacactctcctgggccccaaggagtcccacggaatggggaaagtgggaaccctggagttcttgggaatcttggagcctaaagagaaaccgaggtgcaaattcatttcatggtgactgacccttgagcttaaacagaagcagcaaatgaaagaaccggacaaataaggaagggcacaagcctacccgactctatttacagtctgtaactttccactcttcctgtagtcccgaggcccctgggtccttctagcttttctctttcccatccttggggccttgtgtgatgatgggtgtggggctgccgatgggaaagtcgggggttgttaggcttttctgcctgctcctgcttaaacacaagaaggaatcctggattttgccctctccttagctcttagtctctttggtaggagttttgttccagaggagctctcccccttggatttgaacttgctctttttgttgttgttgttctttctcttctttttcttacctcccactaaaggggttccaaattatcctggtctttttctaccttgttgtgtttctatctcgtctttacttccatctgtttgtttttttctccatcagtgggggccgagttgttcccccagcctgccaaattttgatccttcccctcttttggccaaatcctagggggaagaaatcctagtatgccaaaaatatatgctaagcataattaaactccatgcgggtccataacagccaagaagcctgcaggagaaagccaagggcagttccctccgcagaacaccccatgcgtgctgagaggcgagctccttgaagaaggggctgttcttccaggaggccttattttgaactgcctcaggaccccactggagagcacagcatgccttactactgggtcatccttggtctatgtgctctgtactggaggctctgttctgcctcttatcagccaggtcaggggcacacatggcttaagtgacaaagccagaggagaagacaaccctgacagcatcacgctgcatcccattgctagcaggattggcaactcttcagacggagctgcgcttccctgcagtctagcacctctagggcctctccagactgtgccctgggagctctgggactgaaaggttaagaacataaggcaggatcagatgactctctccaagagggcaggggaattttctctccatgggccacaggggacagggctgggagaagaaatagacttgcaccttatgtcatgtaaataattgattttctagttcaagaagataatattggtagtgtgggaattggaggtaggaaggggaggaagtctgagtaagccagttggcttctaagccaaaaggattcctctttgtttatctctgagacagtccaaccttgagaatagctttaaaagggaaattaatgctgagatgataaagtccccttaagccaacaaaccctctgtagctatagaatgagtgcaggtttctattggtgtggactcagagcaatttacaagagctgttcatgcagccatccatttgtgcaaaatagggtaagaagattcaagaggatatttattacttcctcataccacatggcttttgatgattctggattctaaacaacccagaatggtcatttcaggcacaacgatactacattcgtgtgtgtctgcttttaaacttggctgggctatcagaccctattctcggctcaggttttgagaagccatcagcaaatgtgtacgtgcatgctgtagctgcagcctgcatcccttcgcctgcagcctactttggggaaataaagtgccttactgactgtagccattacagtatccaatgtcttttgacaggtgcctgtccttgaaaaacaaagtttctatttttatttttaattggtttagttcttaactgctggccaactcttacatccccagcaaatcatcgggccattggattttttccattatgttcatcacccttatatcatgtacctcagatctctctctctctcctctctctcagttatatagtttcttgtcttggactttttttttcttttctttttctttttttttttgctttaaaacaagtgtgatgccatatcaagtccatgttattctctcacagtgtactctataagaggtgtgggtgtctgtttggtcaggatgttagaaagtgctgataagtagcatgatcagtgtatgcgaaaaggtttttaggaagtatggcaaaaatgttgtattggctatgatggtgacatgatatagtcagctgccttttaagaggtcttatctgttcagtgttaagtgatttaaaaaaataataacctgttttctgactagtttaaagatggatttgaaaatggttttgaatgcaattaggttatgctatttggacaataaactcaccttgacct

SEQ ID NO: 155 - protein, 289 aa, Homo sapien; identical to SEQ ID NO: 151

SEQ ID NO: 156 - DNA, 442 bp, Rattus norvegicus
cttcctttccaacttggacgctgcagaatggctcccgcaaagaagggtggcgagaagaaaaagggccgttctgccatcaacgaagtggtaacccgagaatacaccatcaacattcacaagcgcatccatggagtgggcttcaagaagcgtgcacctcgggcactcaaagagattcggaaatttgccatgaaggagatgggaactccagatgtgcgcattgacaccaggctcaacaaagctgtctgggccaaaggaataaggaatgtgccataccgaatccgtgtgcggctgtccagaaaacgtaatgaggatgaagattcaccaaataagctatatactttggttacctatgtacctgttaccactttcaaaaatctacagacagtcaatgtggatgagaactaatcgctgatcgtcagatcaaataaagttataaaattgc

SEQ ID NO: 157 - protein, 125 aa, Rattus norvegicus [sequence omitted]

SEQ ID NO: 158 - DNA, 7581 bp, Homo sapien
tagacagtaaggagccaggggaacagagagaattgtggggcagcaccgctccttgggtccccactccccatttctcattgcttggaaatccatgccaagatgcctgccttccttggtctaaagtgtctggggaaattgtgcagctctgagaaaagcaaagtcacctcatctgagagaaccagtgccaggggctcgaacagaaagagactgattgttgaggaccggagggtctctgggacctccttcaccgctcataggcgtgccactatcactcatttgctgtatctctgtcccaaggactactgcccacgtgggcgtgtatgtaacagcgttgatccttttgtggcccaccctcaggaccctcaccacccatcagagaagcctgtcattcactgccataaatgtggggagccttgcaagggtgaagtgcttcgggtccagaccaaacatttccacatcaagtgtttcacctgcaaagtgtgtggctgtgacctggcacaagggggcttcttcataaagaacggagagtatctctgcaccctggactaccagcggatgtacgggacacgctgccatggctgtggggagttcgtggagggcgaagtggtgactgctctgggcaagacctaccatcccaattgctttgcttgtactatctgcaagcgcccgtttccacccggagaccgagtcacattcaatgggagagactgcctttgtcaactctgtgcacagccgatgtcgtccagtccgaaagaaaccaccttctccagcaattgtgccggctgcggaagagatatcaagaacgggcaggcgctgctggcgctggataagcagtggcacttggggtgctttaaatgcaagtcctgcgggaaggtcctcaccggggagtacatcagcaaggatggtgctccgtactgtgaaaaggactaccagggactctttggggtgaaatgtgaggcgtgtcaccagtttatcacagggaaagtcctggaggcaggtgacaaacattaccaccccagctgtgcacgatgcagcagatgcaaccagatgttcacagaaggagaggaaatgtatcttcaaggctccaccgtttggcatcccgactgtaagcaatctacgaagaccgaggaaaagctgcggcctaccaggacatcctcggaaagtatttattctaggccaggctccagtattcctggctcaccaggtcatactatctatgcaaaagtagacaatgagatcctggattacaaggatttagcagccattccgaaggtcaaggcaatttatgacattgaacgtccagatcttattacctatgagcctttctacacttcgggctatgatgacaaacaggagagacagagccttggagagtctccgaggactttgtctcctactccatcagcagaagggtaccaggatgttcgggatcggatgatccatcggtccacgagccagggctccatcaactcccctgtgtacagccgccacagctacactccaaccacgtcccgctctccccagcatttccacagacctggcaatgagccgtccagcggccggaactcccctctcccttaccggccagacagccgccctctaactccaacttacgctcaggcccctaaacatttccatgttccagatcaaggaatcaacatttaccgaaagccacccatctacaaacagcatgctgccttggcagcccagagcaagtcctcagaagatatcatcaagttttccaagttcccagcagcccaggcaccagaccccagcgagacaccagagattgagacggaccactggcctggtcccccctcatttgctgtcataggacctgacatgaaacgcagatctagtggcagagaggaagatgatgaggaacttctgagacgtcggcagcttcaagaagagcaattaatgaagcttaactcaggcctgggacagttgatcttgaaagaagagatggagaaagagagccgggaaaggtcatctctgttagccagtcgctacgattctcccatcaactcagcttcacatattccatcatctaaaactgcatctctccctggctatggaagaaatgggcttcaccggcctgtttctaccgacttcgctcagtataacagctatggggatgtcagcgggggagtgcgagattaccagacactcccagatggccacatgcctgcaatgagaatggaccgaggagtgtctatgcccaacatgttggaaccaaagatatttccatatgaaatgctcatggtgaccaacagagggcgaaacaaaatcctcagagaggtggacagaaccaggctggagcgccacttagcccctgaagtgtttcgggaaatctttggaatgtccatacaggagtttgacaggttacctctttggagacgcaacgacatgaagaaaaaagcaaaactcttctaagtcccactcgtgaatggcaattagagaaaggactgacagtggcggtgccccataggatgtcatattgaggcccaaacttgattggagaatttgcaaactaccgtcgctcagcaacaccaaaaagagaaagtctggttaaaacaccatgagtcaaatgtcgggccagccaacagtaacacttgccaagaagcatggcgtagaaatttctatgttccgaaacacagagtagtgtccacatgtgaccttttcacattaccttatgtatacaacaggagctgcgttgttttcttctttttcttttcctttatctgttgtccaacaacagtgctgactgtccggataagagctggcaagtgcccttaggatgccgcatgggaaaaatcggttatcataatttcaaagtataaatatatttattatgtagcgctgcggctaagaaggaagagtgaggggtctgtccatggggtggcagtgatttcacacccgcctttcttgaatggcttcgtgttactcagccgtgccctggcaggaatggaactccatcagggaacagggcagctctgtttgaatggggtgaaaaacagcaaaattaattcttagcaagctccttgttctctactgttcaccgggacctggctggcaaatgacttagctattagtatatttaaaaactgttcaaaagcaaaagagaaggaacaggaatgaaaggaaaccttcccttaactctttctgcttcccatagcaggtctggttcctgctccccgcctaggacaggagctgtctggagctccacctttgcaaagaaaggaaaaacacaaattgcccccagattggcccagtggcatgccattaggtgattttgcgtaggggccatatcattcatggccaaaaaaaaccaaaaagcaaaaaacaaaaacaagtcccatgtcctactgactctagttcttccagtcgttatcctctgctgtctctctggcatcctatgaatcagatcaagcccatgctgttgttggtttttaaggtttctttcaataataggctaaggaaagacatgtttttctcttttaaatctctgcaactccaaagtagactccttcgaacgtatttaatttggccttttcagctttcttcttgcccagctctgtcgaattcatgggtgtgtgtgcacatgttggtttcactcacccagagtaattttgtgagcatgcatgtgctttttaatttctgcttgaatgtttgtcctgctgtgttgcagcttctaaagacattgtcaccgagtgtgtgtgactcaaagatcaagagtgaggctaaactgcgaccccaacatcacttccttcatggaaaggtgttggcgctgatgtagctcatggaaggatcagactgggaaccacagaggaaggatgaggtgggatgtggaggtcagagcatctcacgagagtccctcaggctctgcaacactagattcgaatatgagcctagggtttccccaacacgtgcgtgcatatgaaaccacatcatgattcccgacgtgagttagatgagggagagtttgtgtaactccacacccaggagggtaagccactttattatcatgctttggggctgtgcttaagaatttaagctctgttttaaagccgaagaagaaaacatttgaatttaccttcatatgccactaagaacaaaagctctgaagttcttcctgctggcaccaaatattaggattacaagctgtctctctgacaccagtggtaaaaaagcaagtagaatagtttctgagtctgtgttgcagcctctgacacgtggctcactgctgtcatttggggggtggaatgaacagtcactgttctatagcatcctcctgtgctcttacctaaggaatctaaattgtcctagccttccattgctatgcactgaatgaggactactctcgtgtgtgtgtgtgtgtgtgtgtgtgtgtgtgtgtgtgtgtgtgtgtgttggatctactaacatgtttagcaaatggctctgacagggtggccatgagcagatgagaccagctcttgcttggttggaagccacactgcagtttgcagtttagcctttggtgtctcagtggcctcttgcttattccatgctttttctatcccatcctctctctgtgccctcctgcaatggcagccttggcacaatgcctgggtgtcctcatccttgctttactctggaaagtgtggggatggagaggatggtgcatttccagtgcttccttacctgtcaataacaatggtggccacctgggtcccagcacttggctggtggagagatttttttcattatggagctaataaagggtccctacgttttacattgattaatgaattatcacccagacatgtgcagatgaaatgtcaatataagaaaaatcaaggtatttgggaaacatgggcataatcaggtagttttgctaaaattcctcttccttggtctacataaagaagacatgggtctgtcatagaatggggacattagactgaaaactgggacaacccccttccttattttatagagactaggagttaaggggcctgcctaagattgcagtgataaagaactgaaccctaaatcagctcccactaatgaaaccctgctttccttgtatcttttaaactcagttctgcatccaacttgagaagaaaaaaagcttctttccatatcaagtaccatatgagttcatttaaactgcaccttgcagaaatgcattgccagaaagcaccagtagcctcctatctgcaagcagagtagtgctctgctctggggaggggtcattggaaaccataatgcagagtgggccccctactccatttcccagcaaaaggctccagctggagggatgggttgtggggcaacctggttcctgctaactgccagattgaatgtgtgggctagaatgcctgcgcatttagttaaactgggctcagcatgcttgtcctcaaaatgtccatcctggtcacagcacacaagatggctattggtctgcttttaccctaccctgtactatacatgaaaattccagttattaacacactcaaactggtggagcttgttcaccctaggaaggggattgtatatatggcaggcttccctggtgccgatgtaaagggctacatttgggaacatttgacttccttgggactcttaagtgcatactgatggcatgaagtaaaaggggcctcaatgatgataggaaaatcagttcttttaaaatttcttcaagaaaatccaggctatcacatagtctttctgtgtgacttattaggagataggaagagcattgggaaacttgcacagctagctatgcatctacattttggtttggggttagttatgaaatgttcttaatatgacgtgttcaataacttcacataaacttcctgttctccaaaacctcaaagagatagagttaatgagttgttgtttttttttaaatgggggtagttttctatctgtcatgggctctagcatctactccgctacccaattctgtcatctccaagctgagtttcctcttctgaggcagaggctggagcagttctttttcagttctcatcctctccatcccaatccagtatatcaatcaactctaactcggagacgtctagctggcaatgtttctaaaactttcactggatttctttagacattgaagcaaacatttttttctaagaattgcttctcagatgatgatatcaaatgtatatgcttttgcaagtttgaaaagttcaaattaaccacttttgactaggtaagtctttctaaaaaccatttaaagctaactgggtcttagcatcctcctgtgtatggaagagacaggtgaccgctccaggttgggtgctcacagaacccttttcctgactctcatggaagatggtggaaggaaaatagactgtctcatcaaccctcctgtgtcctctgaagcaatctcagtttttattaaccacctcttctgtgtttctggtagctatttaacctgtatttaatctgtacttcctatgccagcctcaattttatttgatttttaaaattattctcttctaaccaatgaagtgtttgtcagtatgccccaaagcttgctcttttgtgctcccttttgaataactttctatccagaaaaagagattatttgggacttgagatttgcagtgataccaacttatagcaatgatgtactttaagggaactacccaactatgttgtgatagaagaaagagaaaccttcactttggcattttttttaatcactgtttatttttctgtttgcggcccaggaagcagtgggaggtggtggcagatatgctttgcatatggattgttatgtttttatttgggcaagtttaatcatggaaaactcaaaaagaaggggggaaatggtcagtttaagccaaaagaaactttctaaacaatgtataggtacacagcaaaattaaacaaatccaacaatttctgaagcttagtgtaattgagtggtggttgttattcaataaaattattcccaaaagtgtttctcctaagagtgcagttcccatgagtcacttcctgaacccattgaccaaaggtggacagagacaatcctgtagaccttgacattcagaaagatgtgagctgcttactgatcatatatgcatacgtttctttacagcagaggaaaccattgtccacaaaactgatgttcttttggggttttatgtacagacttgtccaatcatgtgtgtggttcctgcgagttgctgatgactccgcattgaagctctctgagttctttgattttaagttgggtttatggaattttttcaaatgttggaaggcgtgtggttcttcctgccctccctccccttttggaaatatgaaagcaaatgtttagaagaattccttttgaaaagctgtgtcgtgttccctgtgaaactgagcaggtgtgtgttggcgcgctaagtgccacatgcttgtgtgtagaggaggaggtggccctgccggctccgcgctgctgtgcctgtgatccctacctgctccccgctcctgttgccagcagcactcactgcactcctttgtcatatactctgcatcactgtcatactcacaacttcgtgaataaagttgtgtgctttattcgtc

SEQ ID NO: 159 - protein, 778 aa, Homo sapien
MPAFLGLKCLGKLCSSEKSKVTSSERTSARGSNRKRLIVEDRRVSGTSFTAHRRATITHLLYLCPKDYCPRGRVCNSVDPFVAHPQDPHHPSEKPVIHCHKCGEPCKGEVLRVQTKHFHIKCFTCKVCGCDLAQGGFFIKNGEYLCTLDYQRMYGTRCHGCGEFVEGEVVTALGKTYHPNCFACTICKRPFPPGDRVTFNGRDCLCQLCAQPMSSSPKETTFSSNCAGCGRDIKNGQALLALDKQWHLGCFKCKSCGKVLTGEYISKDGAPYCEKDYQGLFGVKCEACHQFITGKVLEAGDKHYHPSCARCSRCNQMFTEGEEMYLQGSTVWHPDCKQSTKTEEKLRPTRTSSESIYSRPGSSIPGSPGHTIYAKVDNEILDYKDLAAIPKVKAIYDIERPDLITYEPFYTSGYDDKQERQSLGESPRTLSPTPSAEGYQDVRDRMIHRSTSQGSINSPVYSRHSYTPTTSRSPQHFHRPGNEPSSGRNSPLPYRPDSRPLTPTYAQAPKHFHVPDQGINIYRKPPIYKQHAALAAQSKSSEDIIKFSKFPAAQAPDPSETPEIETDHWPGPPSFAVIGPDMKRRSSGREEDDEELLRRRQLQEEQLMKLNSGLGQLILKEEMEKESRERSSLLASRYDSPINSASHIPSSKTASLPGYGRNGLHRPVSTDFAQYNSYGDVSGGVRDYQTLPDGHMPAMRMDRGVSMPNMLEPKIFPYEMLMVTNRGRNKILREVDRTRLERHLAPEVFREIFGMSIQEFDRLPLWRRNDMKKKAKLF

SEQ ID NO: 160 - DNA, 1672 bp, Homo sapien
ggcttcatgacagaaagatgtgtgttctcggactctgtgctcttattgatatggaacagataccccaagttttaaatcaggtttctggacagattttgccggcttttatccttttatttaacggattgaaaagagcatatgcctgccatgcagaacatgagaatgacagtgatgatgatgatgaagctgaagatgatgatgaaaccgaggaactggggagtgatgaagatgatattgatgaagatgggcaagaatatttggagattctggctaagcaggctggtgaagatggagatgatgaagattgggaagaagatgatgctgaagagactgctctggaaggctattccacaatcattgatgatgaagataaccctgttgatgagtatcagatatttaaagctatctttcaaactattcaaaatcgtaatcctgtgtggtatcaggcactgactcacggtcttaatgaagaacaaagaaaacagttacaggacatagcaactctggctgatcaaagaagagcagcccatgaatccaaaatgattgagaagcatggaggatacaaattcagtgctccagttgtgccaagttctttcaattttggaggcccagcaccagggatgaattgagttatctctttctttcctgctgtgtgcttgtagtgaagagcttgtgttcctcctagtagtggttccagaactggttcatgttatctattctaaactaataatcaatagatggacaaaagaaacaacaaccccaggagatgggacctgatcatgcaacctggcactggaaaagaaatcagcgggattttgggggtgggggggatgggaggtaccttagagggagtattttctttattttttgaagaaagtaagatcctgactctgaagcttcaaagtgacactgtggaaatctgaaacgaggggatgtcatgaaggcagcttttctttttctgaggaaaaaataggcatgggctacaggactatttaaaatgtctcatttacagtataaaactcaaaggtagatgtaatttttacacctatgagtatttgtccaatttctgtctcttcctcaccattgggtatctattctttatatgtaaataagataaggtcatctgatagccttattcagtcttcatcattttcatcattgttcctatgtagattattggacatttattgtagcactacataactgattataaaaatctgtaaatgaattagcactttcatattgaaacaagcctgctagcctatgtataaaatagcaaaatgtttgctgtttataaaaagatgtaatggggtggggggcaggggtaatttcaagttattaatttaaaaatgaactagcaattttgtacctggtgactttgtggtgcactcacctctgatagtgacttgaattcggtatgtaaaaaggggttagtggtatttcattgctgctaaaaatgacaactccctctgtgtcctgtttttcttaaagctgtcagtgtacaagtgggtatttgaataccagaccttactgtaaaaaataaaaaaggtggtatctagagcatgtaaattggatataaagttctgctcttaaagagttgatctaagagtatggctaaacatctatatatgcaatctattaaaagaacttaattcggctattaaaaaaaaaa

SEQ ID NO: 161 - DNA, 2913 bp, Homo sapien
gggggagcccctgcaagtttcccgggccgcgcgccgcgctcgctcgcctcccagcccgcggcccgagccgccgccgcgcccgccatgccctcggccaaacaaaggggctccaagggcggccacggcgccgcgagcccctcggagaagggtgcccacccgtcgggcggcgcggatgacgtggcgaagaagccgccgccggcgccgcagcagccgccgccgccgcccgcgccgcacccgcagcagcacccgcagcagcacccgcagaaccaggcgcacggcaagggcggccaccgcggcggcggcggcggcggcggcaagtcctcctcctcctcctccgcctccgccgccgctgccgccgccgccgcctcgtcctcggcgtcctgctcgcgcaggctcggcagggcgctcaactttctcttctacctcgccctggtggcggcggccgctttctcgggctggtgcgtccaccacgtcctggaggaggtccagcaggtccggcgcagccaccaggacttctcccggcagagggaggagctgggccagggcttgcagggcgtcgagcagaaggtgcagtctttgcaagccacatttggaacttttgagtccatcttgagaagctcccaacataaacaagacctcacagagaaagctgtgaagcaaggggagagtgaggtcagccggatcagcgaagtgctgcagaaactccagaatgagattctcaaagacctctcggatgggatccatgtggtgaaggacgcccgggagcgggacttcacgtccctggagaacacggtggaggagcggctgacggagctcaccaaatccatcaacgacaacatcgccatcttcacagaagtccagaagaggagccagaaggagatcaatgacatgaaggcaaaggttgcctccctggaagaatctgaggggaacaagcaggatttgaaagccttaaaggaagctgtgaaggagatacagacctcagccaagtccagagagtgggacatggaggccctgagaagtacccttcagactatggagtctgacatctacaccgaggttcgcgagctggtgagcctcaagcaggagcagcaggctttcaaggaggcggccgacacggagcggctcgccctgcaggccctcacggagaagcttctcaggtctgaggagtccgtctcccgcctcccggaggagatccggagactggaggaagagctccgccagctgaagtccgattcccacgggccgaaggaggacggaggcttcagacactcggaagcctttgaggcactccagcaaaagagtcagggactggactccaggctccagcacgtggaggatggggtgctctccatgcaggtggcttctgcgcgccagaccgagagcctggagtccctcctgtccaagagccaggagcacgagcagcgcctggccgccctgcaggggcgcctggaaggcctcgggtcctcagaggcagaccaggatggcctggccagcacggtgaggagcctgggcgagacccagctggtgctctacggtgacgtggaggagctgaagaggagtgtgggcgagctccccagcaccgtggaatcactccagaaggtgcaggagcaggtgcacacgctgctcagtcaggaccaagcccaggccgcccgtctgcctcctcaggacttcctggacagactttcttctctagacaacctgaaagcctcagtcagccaagtggaggcggacttgaaaatgctcaggactgctgtggacagtttggttgcatactcggtcaaaatagaaaccaacgagaacaatctggaatcagccaagggtttactagatgacctgaggaatgatctggataggttgtttgtgaaagtggagaagattcacgaaaaggtctaaatgaattgcgtgtgcagggcgcggatttaaagtccaatttctcatgaccaaaaaatgtgtggttttttcccatgtgtcccctaccccccaatttcttgtcccctcttaaagagcagttgtcaccacctgaacaccaaggcattgtattttcatgcccagttaacttatttacaatatttaagttctctgcttctgcatttggttggtttcctgaagcgcagcccctgtgaataacaggtggcttttcatggatgtctctagtcagagaaaaatgataaaggcttaaattgaggattaacagaagcagattaacctcagaaatcctgtctggctggcagatttcaagtaaaaaaaaaaaaaaggtgggttggggggacccttttctttctagttgtctttaaggaaaattaattttacttttttttttgttctggccgaaatttttatgagatatctctcacttgtcttccactttgaaccggttaaagctcatagctgtcagctctgaatgaggaggggagaagcccctgggtctttctttgaaaggaatccgctgcttgagggctgcctccctcatggtgtgcgtgtcgttctcttcctgacgcatctgtgatatcagaggtaactatgcaaagcatccaggcggttctgaatgtgaagcactacacccagcagagtcccggtgccctctgtccccactgccggcccatgtcctctctccggaggtcaccaaggaatgcacaggtttcgactaccagaaaggggagtccttgggttctttcaaaaaattcgtgaggagagctgtctacagtggaatagggggtctccctggggaatgcaggccaagtccttttattttaacatgatgtccatgaagaggtttgccgtctgggcagccctgtcggcaaggagcgtgcatactgcgtttgtgtaattgtttgctgtatctcccttccctctgagctgtattgttctttaatggctgtcttgcccttccaaaaaaaattgaaaaaaaaaaaa

SEQ ID NO: 162 - protein, 602 aa, Homo sapien
MPSAKQRGSKGGHGAASPSEKGAHPSGGADDVAKKPPPAPQQPPPPPAPHPQQHPQQHPQNQAHGKGGHRGGGGGGGKSSSSSSASAAAAAAAASSSASCSRRLGRALNFLFYLALVAAAAFSGWCVHHVLEEVQQVRRSHQDFSRQREELGQGLQGVEQKVQSLQATFGTFESILRSSQHKQDLTEKAVKQGESEVSRISEVLQKLQNEILKDLSDGIHVVKDARERDFTSLENTVEERLTELTKSINDNIAIFTEVQKRSQKEINDMKAKVASLEESEGNKQDLKALKEAVKEIQTSAKSREWDMEALRSTLQTMESDIYTEVRELVSLKQEQQAFKEAADTERLALQALTEKLLRSEESVSRLPEEIRRLEEELRQLKSDSHGPKEDGGFRHSEAFEALQQKSQGLDSRLQHVEDGVLSMQVASARQTESLESLLSKSQEHEQRLAALQGRLEGLGSSEADQDGLASTVRSLGETQLVLYGDVEELKRSVGELPSTVESLQKVQEQVHTLLSQDQAQAARLPPQDFLDRLSSLDNLKASVSQVEADLKMLRTAVDSLVAYSVKIETNENNLESAKGLLDDLRNDLDRLFVKVEKIHEKV

SEQ ID NO: 163 - DNA, 2913 bp, Homo sapien; identical to SEQ ID NO: 161

SEQ ID NO: 164 - protein, 602 aa, Homo sapien; identical to SEQ ID NO: 162

SEQ ID NO: 165 - DNA, 3344 bp, Homo sapien
ggtacagctgcgcgtctgcgggaataggtgcagcgggcccttggcgggggactctgagggaggagctggggacggcgaccctaggagagttctttggggtgactttcaagatggactctactctaacagcaagtgaaatccggcagcgatttatagatttcttcaagaggaacgagcatacgtatgttcactcgtctgccaccatcccattggatgaccccactttgctctttgccaatgcaggcatgaaccagtttaaacccattttcctgaacacaattgacccatctcaccccatggcaaagctgagcagagctgccaatacccagaagtgcatccgggctgggggcaaacaaaatgacctggacgatgtgggcaaggatgtctatcatcacaccttcttcgagatgctgggctcttggtcttttggagattactttaaggaattggcatgtaagatggctctggaactcctcacccaagagtttggcattcccattgaaagactttatgttacttactttggcggggatgaagcagctggcttagaagcagatctggaatgcaaacagatctggcaaaatttggggctggatgacaccaaaatcctcccaggcaacatgaaggataacttctgggagatgggtgacacgggcccctgtggtccttgcagtgagatccactacgaccggattggtggtcgggacgccgcacatcttgtcaaccaggacgaccctaatgtgctggagatctggaaccttgtgttcatccagtataacagggaagctgatggcattctgaaacctcttcccaagaaaagcattgacacagggatgggcctggaacgactggtatctgtgctgcagaataagatgtccaactatgacactgacctttttgtcccttactttgaagccattcagaagggcacaggtgcccgaccatacactgggaaagttggtgctgaggatgccgatgggattgacatggcctaccgggtgctggctgaccatgctcggaccatcactgtggcactggctgatggtggccggcctgacaacacagggcgtggatatgtgttgagacggattctccgccgagctgtccgatacgcccatgaaaagctcaatgccagcaggggcttctttgctacgttagtggatgttgtcgtccagtccctgggagatgcatttcctgagctgaagaaggacccagacatggtgaaggacatcattaatgaagaagaggtgcagtttctcaagactctcagcagagggcgtcgcatcctggacaggaaaattcagagcctgggagacagcaagaccattcccggagacactgcttggctcctctatgacacctatgggtttccagtggatctgactggactgattgctgaagagaagggcctggtggtagacatggatggctttgaagaggagaggaaactggcccagctgaaatcacagggcaagggagctggtggggaagacctcattatgctggacatttacgctatcgaagagctccgggcacggggtctggaggtcacagatgattccccaaagtacaattaccatttggactccagtggtagctatgtatttgagaacacagtggctacggtgatggctctgcgcagggagaagatgttcgtggaagaggtgtccacaggccaggagtgtggagtggtgctggacaagacctgtttctatgctgagcaaggaggccagatctatgacgaaggctacctggtgaaggtggatgacagcagtgaagataaaacagagtttacagtgaagaatgctcaggtccgaggagggtatgtgctacacattggaaccatctacggtgacctgaaagtgggggatcaggtctggctgtttattgatgagccccgacgaagacccatcatgagcaaccacacagctacgcacattctgaacttcgccctgcgctcagtgcttggggaagctgaccagaaaggctcattggttgctcctgaccgcctcagatttgactttactgccaagggagccatgtccacccaacagatcaagaaggctgaagagattgctaatgagatgattgaggcagccaaggccgtctatacccaggattgccccctggcagcagcgaaagccatccagggcctacgggctgtgtttgatgagacctatcctgaccctgtgcgagtcgtctccattggggtcccggtgtccgagttgctggatgacccctctgggcctgctggctccctgacttctgttgagttctgtgggggaacgcacctgcggaactcgagtcatgcaggagcttttgtgatcgtgacggaagaagccattgccaagggtatccggaggattgtggctgtcacaggtgccgaggcccagaaggccctcaggaaagcagagagcttgaagaaatgtctctctgtcatggaagccaaagtgaaggctcagactgctccaaacaaggatgtgcagagggagatcgctgaccttggagaggccctggccactgcagtcatcccccagtggcagaaggatgaattgcgggagactctcaaatccctaaagaaggtcatggatgacttggaccgagccagcaaagccgatgtccagaaacgagtgttagagaagacgaagcagttcatcgacagcaaccccaaccagcctcttgtcatcctggagatggagagcggcgcctcagccaaggccctgaatgaagccttgaagctcttcaagatgcactcccctcagacttctgccatgctcttcacggtggacaatgaggctggcaagatcacgtgcctgtgtcaagtcccccagaatgcagccaatcggggcttaaaagccagcgagtgggtgcagcaggtgtcaggcttgatggacggtaaaggtggtggcaaggatgtgtctgcacaggccacaggcaagaacgttggctgcctgcaggaggcgctgcagctggccacttccttcgcccagctgcgcctcggggatgtaaagaactgagtggggaaggaggaggctcccactggatccatccgtccagccaagagctcttcatctgctacaagaacatttgaatcttgggacctttaaagagcccctcctaacccagcagtaactggaacacacttgggagcagtcctatgtctcagtgccccttaaatttctgccctgagccctccacgtcagtgccatcggtctagaaccactaaccccgcattgctgttgatcgtcacgctcgcatctatagataacggctctccagacctgagctttccgcgtcagcaagtaggaatcgtttttgctgcagagaataaaaggaccacgtgc

SEQ ID NO: 166 - protein, 968 aa, Homo sapien
MDSTLTASEIRQRFIDFFKRNEHTYVHSSATIPLDDPTLLFANAGMNQFKPIFLNTIDPSHPMAKLSRAANTQKCIRAGGKQNDLDDVGKDVYHHTFFEMLGSWSFGDYFKELACKMALELLTQEFGIPIERLYVTYFGGDEAAGLEADLECKQIWQNLGLDDTKILPGNMKDNFWEMGDTGPCGPCSEIHYDRIGGRDAAHLVNQDDPNVLEIWNLVFIQYNREADGILKPLPKKSIDTGMGLERLVSVLQNKMSNYDTDLFVPYFEAIQKGTGARPYTGKVGAEDADGIDMAYRVLADHARTITVALADGGRPDNTGRGYVLRRILRRAVRYAHEKLNASRGFFATLVDVVVQSLGDAFPELKKDPDMVKDIINEEEVQFLKTLSRGRRILDRKIQSLGDSKTIPGDTAWLLYDTYGFPVDLTGLIAEEKGLVVDMDGFEEERKLAQLKSQGKGAGGEDLIMLDIYAIEELRARGLEVTDDSPKYNYHLDSSGSYVFENTVATVMALRREKMFVEEVSTGQECGVVLDKTCFYAEQGGQIYDEGYLVKVDDSSEDKTEFTVKNAQVRGGYVLHIGTIYGDLKVGDQVWLFIDEPRRRPIMSNHTATHILNFALRSVLGEADQKGSLVAPDRLRFDFTAKGAMSTQQIKKAEEIANEMIEAAKAVYTQDCPLAAAKAIQGLRAVFDETYPDPVRVVSIGVPVSELLDDPSGPAGSLTSVEFCGGTHLRNSSHAGAFVIVTEEAIAKGIRRIVAVTGAEAQKALRKAESLKKCLSVMEAKVKAQTAPNKDVQREIADLGEALATAVIPQWQKDELRETLKSLKKVMDDLDRASKADVQKRVLEKTKQFIDSNPNQPLVILEMESGASAKALNEALKLFKMHSPQTSAMLFTVDNEAGKITCLCQVPQNAANRGLKASEWVQQVSGLMDGKGGGKDVSAQATGKNVGCLQEALQLATSFAQLRLGDVKN

SEQ ID NO: 167 - DNA, 1246 bp, Homo sapien
gaccagcctacagccgcctgcatctgtatccagcgccaggtcccgccagtcccagctgcgcgcgccccccagtcccgcacccgttcggcccaggctaagttagccctcaccatgccggtcaaaggaggcaccaagtgcatcaaatacctgctgttcggatttaacttcatcttctggcttgccgggattgctgtccttgccattggactatggctccgattcgactctcagaccaagagcatcttcgagcaagaaactaataataataattccagcttctacacaggagtctatattctgatcggagccggcgccctcatgatgctggtgggcttcctgggctgctgcggggctgtgcaggagtcccagtgcatgctgggactgttcttcggcttcctcttggtgatattcgccattgaaatagctgcggccatctggggatattcccacaaggatgaggtgattaaggaagtccaggagttttacaaggacacctacaacaagctgaaaaccaaggatgagccccagcgggaaacgctgaaagccatccactatgcgttgaactgctgtggtttggctgggggcgtggaacagtttatctcagacatctgccccaagaaggacgtactcgaaaccttcaccgtgaagtcctgtcctgatgccatcaaagaggtcttcgacaataaattccacatcatcggcgcagtgggcatcggcattgccgtggtcatgatatttggcatgatcttcagtatgatcttgtgctgtgctatccgcaggaaccgcgagatggtctagagtcagcttacatccctgagcaggaaagtttacccatgaagattggtgggattttttgtttgtttgttttgttttgtttgttgtttgttgtttgtttttttgccactaattttagtattcattctgcattgctagataaaagctgaagttactttatgtttgtcttttaatgcttcattcaatattgacatttgtagttgagcggggggtttggtttgctttggtttatattttttcagttgtttgtttttgcttgttatattaagcagaaatcctgcaatgaaaggtactatatttgctagactctagacaagatattgtacataaaagaatttttttgtctttaaatagatacaaatgtctatcaactttaatcaagttgtaacttatattgaagacaatttgatacataataaaaaattatgacaatgtcaaaaaaaaaaaaaaa

SEQ ID NO: 168 - protein, 228 aa, Homo sapien
MPVKGGTKCIKYLLFGFNFIFWLAGIAVLAIGLWLRFDSQTKSIFEQETNNNNSSFYTGVYILIGAGALMMLVGFLGCCGAVQESQCMLGLFFGFLLVIFAIEIAAAIWGYSHKDEVIKEVQEFYKDTYNKLKTKDEPQRETLKAIHYALNCCGLAGGVEQFISDICPKKDVLETFTVKSCPDAIKEVFDNKFHIIGAVGIGIAVVMIFGMIFSMILCCAIRRNREMV

SEQ ID NO: 169 - DNA, 2704 bp, Homo sapien
gcttagtgtaaccagcggcgtatattttttaggcgccttttcgaaaacctagtagttaatattcatttgtttaaatcttattttatttttaagctcaaactgcttaagaataccttaattccttaaagtgaaataattttttgcaaaggggtttcctcgatttggagctttttttttcttccaccgtcatttctaactcttaaaaccaactcagttccatcatggtgatgttcaagaagatcaagtcttttgaggtggtctttaacgaccctgaaaaggtgtacggcagtggcgagagggtggctggccgggtgatagtggaggtgtgtgaagttactcgtgtcaaagccgttaggatcctggcttgcggagtggctaaagtgctttggatgcagggatcccagcagtgcaaacagacttcggagtacctgcgctatgaagacacgcttcttctggaagaccagccaacaggtgagaatgagatggtgatcatgagacctggaaacaaatatgagtacaagttcggctttgagcttcctcaggggcctctgggaacatccttcaaaggaaaatatgggtgtgtagactactgggtgaaggcttttcttgaccgcccgagccagccaactcaagagacaaagaaaaactttgaagtagtggatctggtggatgtcaatacccctgatttaatggcacctgtgtctgctaaaaaagaaaagaaagtttcctgcatgttcattcctgatgggcgggtgtctgtctctgctcgaattgacagaaaaggattctgtgaaggtgatgagatttccatccatgctgactttgagaatacatgttcccgaattgtggtccccaaagctgccattgtggcccgccacacttaccttgccaatggccagaccaaggtgctgactcagaagttgtcatcagtcagaggcaatcatattatctcagggacatgcgcatcatggcgtggcaagagccttcgggttcagaagatcaggccttctatcctgggctgcaacatccttcgagttgaatattccttactgatctatgttagcgttcctggatccaagaaggtcatccttgacctgcccctggtaattggcagcagatcaggtctaagcagcagaacatccagcatggccagccgaaccagctctgagatgagttgggtagatctgaacatccctgataccccagaagctcctccctgctatatggatgtcattcctgaagatcaccgattggagagcccaacaactcctctgctagatgacatggatggctctcaagacagccctatctttatgtatgcccctgagttcaagttcatgccaccaccgacttatactgaggtggatccctgcatcctcaacaacaatgtgcagtgagcatgtggaagaaaagaagcagctttacctacttgtttctttttgtctctcttcctggacactcactttttcagagactcaacagtctcgtcaatggagtgtgggtccaccttagcctctgacttcctaatgtaggaggtggtcagcaggcaatctcctgggccttaaaggatgcggactcatcctcagccagcgcccatgttgtgatacaggggtgtttgttggatgggtttaaaaataactagaaaaactcaggcccatccattttctcagatctccttgaaaattgaggccttttcgatagtttcgggtcaggtaaaaatggcctcctggcgtaagcttttcaaggttttttggaggctttttgtaaattgtgataggaactttggaccttgaacttacgtatcatgtggagaagagccaatttaacaaactaggaagatgaaaagggaaattgtggccaaaactttgggaaaaggaggttcttaaaatcagtgtttcccctttgtgcacttgtagaaaaaaaagaaaaaccttctagagctgatttgatggacaatggagagagctttccctgtgattataaaaaaggaagctagctgctctacggtcatctttgcttagagtatactttaacctggcttttaaagcagtagtaactgccccaccaaaggtcttaaaagccatttttggagcctattgcactgtgttctcctactgcaaatattttcatatgggaggatggttttctcttcatgtaagtccttggaattgattctaaggtgatgttcttagcactttaattcctgtcaaattttttgttctccccttctgccatcttaaatgtaagctgaaactggtctactgtgtctctagggttaagccaaaagacaaaaaaaattttactacttttgagattgccccaatgtacagaattatataattctaacgcttaaatcatgtgaaagggttgctgctgtcagccttgcccactgtgacttcaaacccaaggaggaactcttgatcaagatgcccaaccctgtgatcagaacctccaaatactgccatgagaaactagagggcaggtgttcataaaagccctttgaacccccttcctgccctgtgttaggagatagggatattggcccctcactgcagctgccagcacttggtcagtcactctcagccatagcactttgttcactgtcctgtgtcagagcactgagctccacccttttctgagagttattacagccagaaagtgtgggctgaagatggttggtttcatgtgggggtattatgtaccc

SEQ ID NO: 170 - protein, 391 aa, Homo sapien
MVMFKKIKSFEVVFNDPEKVYGSGERVAGRVIVEVCEVTRVKAVRILACGVAKVLWMQGSQQCKQTSEYLRYEDTLLLEDQPTGENEMVIMRPGNKYEYKFGFELPQGPLGTSFKGKYGCVDYWVKAFLDRPSQPTQETKKNFEVVDLVDVNTPDLMAPVSAKKEKKVSCMFIPDGRVSVSARIDRKGFCEGDEISIHADFENTCSRIVVPKAAIVARHTYLANGQTKVLTQKLSSVRGNHIISGTCASWRGKSLRVQKIRPSILGCNILRVEYSLLIYVSVPGSKKVILDLPLVIGSRSGLSSRTSSMASRTSSEMSWVDLNIPDTPEAPPCYMDVIPEDHRLESPTTPLLDDMDGSQDSPIFMYAPEFKFMPPPTYTEVDPCILNNNVQ

SEQ ID NO: 171 - DNA, 2704 bp, Homo sapien; identical to SEQ ID NO: 169

SEQ ID NO: 172 - protein, 391 aa, Homo sapien; identical to SEQ ID NO: 170

SEQ ID NO: 173 - DNA, 2704 bp, Homo sapien; identical to SEQ ID NO: 169

SEQ ID NO: 174 - protein, 391 aa, Homo sapien; identical to SEQ ID NO: 170

SEQ ID NO: 175 - DNA, 1399 bp, Homo sapien
agtgtgaaatcttcagagaagaatttctctttagttctttgcaagaaggtagagataaagacactttttcaaaaatggcaatggtatcagaattcctcaagcaggcctggtttattgaaaatgaagagcaggaatatgttcaaactgtgaagtcatccaaaggtggtcccggatcagcggtgagcccctatcctaccttcaatccatcctcggatgtcgctgccttgcataaggccataatggttaaaggtgtggatgaagcaaccatcattgacattctaactaagcgaaacaatgcacagcgtcaacagatcaaagcagcatatctccaggaaacaggaaagcccctggatgaaacacttaagaaagcccttacaggtcaccttgaggaggttgttttagctctgctaaaaactccagcgcaatttgatgctgatgaacttcgtgctgccatgaagggccttggaactgatgaagatactctaattgagattttggcatcaagaactaacaaagaaatcagagacattaacagggtctacagagaggaactgaagagagatctggccaaagacataacctcagacacatctggagattttcggaacgctttgctttctcttgctaagggtgaccgatctgaggactttggtgtgaatgaagacttggctgattcagatgccagggccttgtatgaagcaggagaaaggagaaaggggacagacgtaaacgtgttcaataccatccttaccaccagaagctatccacaacttcgcagagtgtttcagaaatacaccaagtacagtaagcatgacatgaacaaagttctggacctggagttgaaaggtgacattgagaaatgcctcacagctatcgtgaagtgcgccacaagcaaaccagctttctttgcagagaagcttcatcaagccatgaaaggtgttggaactcgccataaggcattgatcaggattatggtttcccgttctgaaattgacatgaatgatatcaaagcattctatcagaagatgtatggtatctccctttgccaagccatcctggatgaaaccaaaggagattatgagaaaatcctggtggctctttgtggaggaaactaaacattcccttgatggtctcaagctatgatcagaagactttaattatatattttcatcctataagcttaaataggaaagtttcttcaacaggattacagtgtagctacctacatgctgaaaaatatagcctttaaatcatttttatattataactctgtataatagagataagtccattttttaaaaatgttttccccaaaccataaaaccctatacaagttgttctagtaacaatacatgagaaagatgtctatgtagctgaaaataaaatgacgtcacaagac

SEQ ID NO: 176 - protein, 346 aa, Homo sapien
MAMVSEFLKQAWFIENEEQEYVQTVKSSKGGPGSAVSPYPTFNPSSDVAALHKAIMVKGVDEATIIDILTKRNNAQRQQIKAAYLQETGKPLDETLKKALTGHLEEVVLALLKTPAQFDADELRAAMKGLGTDEDTLIEILASRTNKEIRDINRVYREELKRDLAKDITSDTSGDFRNALLSLAKGDRSEDFGVNEDLADSDARALYEAGERRKGTDVNVFNTILTTRSYPQLRRVFQKYTKYSKHDMNKVLDLELKGDIEKCLTAIVKCATSKPAFFAEKLHQAMKGVGTRHKALIRIMVSRSEIDMNDIKAFYQKMYGISLCQAILDETKGDYEKILVALCGGN

SEQ ID NO: 177 - DNA, 3322 bp, Homo sapien
gaaagctgtatttgctgcacgtggaaatctccgttattttccagcacccaacagtagcgtaatgggagtaacggacttaacctcatttctctttcagagcatttagccttcatatgcccttccctgcatgcttcccccaggccgtcaagacttgagttctgcctcgcttcccggcgcggtcgcagccctcagcccacttaggataatggcgacagctgaggtactgaacattggtaaaaaattatatgagggtaaaacaaaagaagtctacgaattgttagacagtccaggaaaagtcctcctgcagtccaaggaccagattacagcaggaaatgcagctagaaaaaaccacctggaaggaaaagctgcaatctcaaataaaatcaccagttgtatttttcagttattacaggaagcaggtattaaaactgccttcaccagaaaatgtggggagacagctttcattgcaccgcagtgtgaaatgattccaattgaatgggtttgcagaagaatagcaactggttcttttctcaaaagaaatcctggtgtcaaggaaggatataagttttacccacctaaagtggagttgtttttcaaggatgatgccaataatgacccacagtggtctgaggaacagctgattgctgcaaaattttgctttgctggacttcttataggccagactgaagtggatatcatgagtcatgctacacaggctatatttgaaatactggagaaatcctggttgccccagaattgtacactggttgatatgaagattgaatttggtgttgatgtaaccaccaaagaaattgttcttgctgatgttattgacaatgattcctggagactctggccatcaggagatcgaagccaacagaaagacaaacagtcttatcgggacctcaaagaagtaactcctgaagggctccaaatggtaaagaaaaactttgagtgggttgcagagagagtagagttgcttttgaaatcagaaagtcagtgcagggttgtagtgttgatgggctctacttctgatcttggtcactgtgaaaaaatcaagaaggcctgtggaaattttggcattccatgtgaacttcgagtaacatctgcgcataaaggaccagatgaaactctgaggattaaagctgagtatgaaggggatggcattcctactgtatttgtggcagtggcaggcagaagtaatggtttgggaccagtgatgtctgggaacactgcatatccagttatcagctgtcctcccctcacaccagactggggagttcaggatgtgtggtcttctcttcgactacccagtggtcttggctgttcaaccgtactttctccagaaggatcagctcaatttgctgctcagatatttgggttaagcaaccatttggtatggagcaaactgcgagcaagcattttgaacacatggatttccttgaagcaggctgacaagaaaatcagagaatgtaatttataagaaagaatgccattgaattttttaggggaaaaactacaaatttctaatttagctgaaggaaaatcaagcaagatgaaaaggtaattttaaattagagaacacaaataaaatgtattagtgaataaatgcttctctagatccatattaataaacatgagcatctaacccctcctttcttaggctagacaccaagatatttcagccagcctttatcattcctcttactttatcctttttccttaagtattggtggtcactactattgagtttcttccttaacactgattaaatgatcttaactccctcagctaaaactggcattactgactcccagctatatttctccagacttgcatttttttttttttttttgagacagggtctcactgtcgcccaggctggagtgcagtggcgtgatctcagttcactgctgctttccctcctgggctcaagcagttctcccacctcagcctctcgactaacagggactataatcttgcagcaccatgccgagctaattttattttttgtagagatgagctctcactatgtcacccaggttcgtctcaaactcctgaaccctagtaattctcctatctcagcctcccaaagtgctagggttacagacatgagccactgtgcctgtctagacttgtactttcaactgtccatttctccctgtctgtcccatgggcactcatgaaaaaacagaatgctcccaactttattcatcttccaagcctgtagctcttggtatactcactgttgcaagtcagaagcttgatttcatcattgatgtttttctcacgtttcacatctcactcatcaccaagtcatgttggtgttaatttctgattaacccttgaatttaccgtcttctcatcctctgtacaaaagcctcaagtgagggtcaaattcaacattatcctgatctagacagcccccattctcaatccacccttttccaagttgattgcccaaggacttctaacaataaactctcttttgcaccacagacttctttgaaaatatacatgctgttgaccctctctgtagaaaaccgcacacataaaacttaccaacagatttcattggttcttgggttctcccgaagcctatccatggtttatagattaagaattgatgaggtagctgggcacagtggctcacacctacgatcacagcacttcgggaggctgaagcaagcagatcacttgaggtcaggagtttgagaccagcctggccaacatggtgaaaccctgtctctactaaaaatacaaaaagtagccagccgtgatgacaggcacctgtaatcccagctactcgggaggctgaggcatgagaattgcttgaacccgggaggcggaggttgcagtgagcctggatcatgccactgcactccaacctgggcagcagagcaagactctgtctcaaaaggggaaaaaaaaaattgctgatgtgacccatgaagggaactcattttcctcgtaattttggactgccacacattggtacctttagttctctgaaggcccacgtttttatcattaagacctatttgttagctagtagagctttatgttcgctgtccatgaaaccttctgtaaccacagtgactacaagtagttctttctctattgaattattaggtccagaatagaagatgtcattgtacactttatttccctcacactgtgttatgctctgatgtgctatgcttagctatctgtcagagattagtaaattataaaactcatgtgtactacttaagtttatatcttatgctagtttataagaacaattaaaaggacttagaagattaaaaaaaaaaaaaaaaaa

SEQ ID NO: 178 - protein, 425 aa, Homo sapien
MATAEVLNIGKKLYEGKTKEVYELLDSPGKVLLQSKDQITAGNAARKNHLEGKAAISNKITSCIFQLLQEAGIKTAFTRKCGETAFIAPQCEMIPIEWVCRRIATGSFLKRNPGVKEGYKFYPPKVELFFKDDANNDPQWSEEQLIAAKFCFAGLLIGQTEVDIMSHATQAIFEILEKSWLPQNCTLVDMKIEFGVDVTTKEIVLADVIDNDSWRLWPSGDRSQQKDKQSYRDLKEVTPEGLQMVKKNFEWVAERVELLLKSESQCRVVVLMGSTSDLGHCEKIKKACGNFGIPCELRVTSAHKGPDETLRIKAEYEGDGIPTVFVAVAGRSNGLGPVMSGNTAYPVISCPPLTPDWGVQDVWSSLRLPSGLGCSTVLSPEGSAQFAAQIFGLSNHLVWSKLRASILNTWISLKQADKKIRECNL

SEQ ID NO: 179 - DNA, 4878 bp, Homo sapien
tccgcgtcagcaagctgcctgcagctgtcctgactgcgccctgagtggaggtaccaagtgacactgtttctccttctaggaacagaagcgtttggagaacagtcccagccttgtgacactgggcccatatcagcgtttagcccaccagggtccacccagcacctgcgctcccaagctgtcacaatgcaaacaacgctatcaagatctcacaggagaagctgctgctatcatgaagccaactgtctttgctcatggcgatacgagctggagaaatacagagttatacttagtaggtgaacccttgctgatagcaggacatgtatacaggtccgggtggacctccaggacctgggctacgagacttgtggccaaagcaagaatgaggctgaacaggaggaaaccaccagtcccggactacaaccatagggccacccaccacattgaaaaccagaagagcattttgctgccgccgagcgtggacgcaggcggatctctgaagagctgggtcgccagcctctcccgcgcacgttgcctggcctccagcacctacttggtcccgcgcgctccctcgtgtcgcccctcggagcagcagccgccgcggtcgccgctacccggaaagaagtcagagacgccgcgaggtcgccgccaccgccatgcccaagaataaaggtaaaggaggtaaaaacagacgcaggggtaagaatgagaatgaatctgaaaaaagagaactggtattcaaagaggatggtcaggagtatgctcaggtaatcaaaatgttgggaaatggacggctagaagcaatgtgtttcgatggtgtaaagaggttatgtcacatcagaggaaaattgagaaaaaaggtttggataaatacctcggacattattttggttggtctccgagactaccaggataacaaagctgatgtaattttaaaatacaatgcagacgaagctagaagtctgaaggcatacggcgagcttccagagcatgctaaaatcaatgaaactgatacatttggtcctggagatgatgatgaaattcagtttgatgacattggagatgatgatgaagatattgatgacatctaaattgaactcaacattttacattccatcttttctgaagattgtcctacaatttggattttgatcatgacaaagaagattaaaatttcattagcatgaatgcaatttgttaaagcagactgatttgtttctaagatatttttggtttttttaaaactgataataatgctgaattatcttaagtgagatgttaagcccactttgttcttttaatgtaatggagcttatgggtagaagaccatgtctactaattacaaaaaaaaaaaaaaaccatgcattgctgcttttcctaccacttccagtaagaaaatgggtgttttgaagaaatcatttgccttgtcctcacggaatctgattaagccctggcctcttgattgtatagagtcattgtgtatattccagttacctagatattcccttgagattttgatacaatttgagggaggcagaagtctgcagttgaagaaaaaaaataagtctgtttgtcatatttaagtagcctgtggctatttttatactgattttgatatcatgttcttttcatagtcgtattttgccaccgtaaacataaaaaaaaaaaaagatttccaaaatgccgttttcagaacctgggttttaatagcagtattgaatttgtaagcttagtagttgcagaaattgaacactaggtggcactcagttatcttaacaggggaagtactgatacaattgttgacttttcttttactatgtgtaagaaataccccaaacatgaaaagattgttttgatcatatgcatgtatgtagaatatttttgcagagcagaaagattatgttagaagtgtgatttttattttcagaagtcatatacatgtaagctacaattttgagtgctttataaacacttaagatatatatataaattttaatttcatagcaacttgtaaaaaataaaatacttgttgaaaagcctttttcaacatatccctaagctaagggaagaggaaggaataacaactcagtgaaaagatggtctccagtttctgaatgaaaaagctacagctgagaaataaaataaaatgtcatgctgcagaatatgttatacccttattttgtgttaaggatatattttattatgtgaatggttttgtttttgttttttgtttttgttttttgcttgtattgggaattagctttactggtaacttccttatttagtttttagtggtcaactctaataaaatgaaactagggctgagctagttagccctcactagccaaactgaaactctatgcaacattaaaagaagagatccatcatgtagcttgtgacacttttattttattagtcaccggggaacttttcagtgatgaaaatacacagggtaataaaccttcacatggcttcaaaaggaaaacaagcaaatcttctctaatctactcttactataatttcctaagtgtacaccaaactctggatttaaaaatctgaagtactatagaacattaagttgaagaatggaaattaagagtacgtattcatggtttatatttcttattctatggagttcgtgaacacatctaggtggaatgcatctgagactaagggctggtttttaatcctcataagaaaccagccttgaagaattaacaattctcttcattggtattctaaacctcctaagatatttaggcttctgtacataaaagtgtttttgctaaatttacagtatatatagatcctttcatattattttactaagaatgtttgaactttgcatatttgatatagttcctggtaggaatagcacagctcaaacattagtttttctacttacctcctctaacacgtggtttgtctggagagtttctaaaaattcagctataaccccagttcatgtatttactggtgattgttcttgctgaggtagtaacagcccaatcttgggctgttaaatcctaggaaatctcgaatcatagtgattaaaatagttggggtaaagttgtagcttatatgcaatactacttggaggaattcttctactaatttgtatttaatgtggaaattgtatagtttcattgatttaatcataaataatggaaatggtctccaagaagttttatttttcatttttttgcttatacactctgattcctataatacagtgctataagctatgcacagaaaataaaatgtttgaaatccaagaataatggttcttactgctaagagggagtaatagttattactaatgattttgattgggttgcatttttgttgcaatgtttattccacttgcagttagaatatgaatatgttttatcactagtgtggctaaataaccaaacatttgtgtaaaaaaaaaaaaaagccaagatttcattgtttgttgaatatttcttaagcatctggcccctaaagagaccgcttcttaccaagcctgtaaactatgcatgatggaaattcttgtattttatttaggaatggctgttggtttactcaccacatctgtggaatcatggctataaatgtttgcttacaaactctttgtgacttgtaatttaacttaatctcatctaatgtaaatattagattatgatgttcagtaacatcttccataggtataaactgctgtcattattgatttcagagtaactctgagtaatcaaataggtaaaagcatgttttgagtaaaatagctagatttatactttacttgtatacagacttaacaacaaccggtattgactggattgacagctaaagtatcagaatgaaagcaaggtttttttgatgttacctgactgtcataaagatgaaaatgatttgtattggtatgaaatgcttatctttattctacttcgtaagggtaagttttatttatactctttggactcccatgaacttttgcacactgctttgtgtttttggtttaccctaaactaccatcctttttatctttgctttttttcttcctattcagaaaagagcaaaatgtgaaaagacacaagactctcaggtatagaatgaactgagcaatttggagaatgtattggactttgtcctctcttattcccccctcctagccctgcaagttgctaggtacttgtgaggcagtgtactggagaggggagagcatggatcctggggtcaaagggcctttgcccccacccttacttggccctctacctgcaggtgaccactggcacattctcctgcttgtctcagcttcaggttcttcacctctaagatggggatgatgaaaacagtacctgtcatgcagaattgttgggaggattgataatttagatgtttatacatgtaatgtacttagatcagtgtctgctcttttcacttgatatccagtactatgtaagatagaaggtgcatgtcttctgtattctgtatttcccatttcttttgcgtgcagtctttgattcgtacaatagaaggaacacgtagaatgtatatttgtacattcatgtcaacatagtatttgaaattgctaccaaactcatttaatttggcataagactaacagatgaagtctctcatttgcttgaagatattttacaaaataccaactgttctatatttctttagaaaaagattatagttattaatattgatacctctgataatattttattcttaaatcttcagtgattccttttactatagattcatgacagctaattagtactaactgatttagaggtttcctttcccatcatatggaatgatgtaaagaaatcagatacaaactactgcaattagaaaataaaatatgaacaactttcaacaatgtaaaaa

SEQ ID NO: 180 - protein, 145 aa, Homo sapien [sequence omitted]

SEQ ID NO: 181 - DNA, 1439 bp, Homo sapien
cggggaggacggtctgcatactcgctgcccgccggctccctcccccgcgtccctgcgaccgccgcggcgaagatggcctcaggagtgcaagtagctgatgaagtatgtcgcattttttatgacatgaaagttcgtaaatgctccacaccagaagaaatcaagaaaagaaagaaggctgtcattttttgtctcagtgcagacaaaaagtgcatcattgtagaagaaggcaaagagatcttggttggagatgttggtgtaaccataactgatcctttcaagcattttgtgggaatgcttcctgaaaaagattgtcgctatgctttgtatgatgcaagctttgaaacaaaagaatccagaaaagaagagttgatgttttttttgtgggcaccagaactagcacctctgaaaagtaaaatgatctatgcaagctccaaggatgcaattaaaaagaaatttcaaggcataaaacatgaatgtcaagcaaatggaccagaagatctcaatcgggcttgtattgctgaaaagttaggtggatccttaattgtagcctttgaaggatgccctgtgtagattattcagtgccacaaattgaaagcttccatgtttaatgttatcctcttgctatataaataaagcaaatatatttaggccagggtctcactgagggggagctgtcttgtcatcttttagagtaaactattctataaacatatgcaaacagccctaaataaatctaaagtctaaagttttattgatgtgaaattaaattcttattggccaaatgcctgttttgatgagttgatttataaagatttttgttaagctcaggattttaaattacacagttcacaaacagtaaaggccatgtgaagagaattattacatctttattaacctcagcatttactttgtttcttttgcttaggaaattgctcataatctggttataattttggtccaaattctttattcttccttgagctaagcagaataatggaatataatatgtcttcataatataacaacactaatacactaatagtaagattaagttaggcagtcttctaccaaatgtgtaatggagattgcctcaaaattgtgtccacataatccacgctcatcttgcaaagcgctatttcaggcacatcattggaatacaggaagtagccctgcacctgccagtgagctcgccattcactgattggaagagtgacctggcatcttggaaatcattgtgtgtcttcaggagaatgtgcagtgtcttgtaacaactaattaataatgcaaattagggctacattgtaatctgctttgttaatgaaaatgataaaacagaatattgacaagctaggacacctgtggtatctttaattgtatctccttcagaagtttgcttcttatggtataataaagtatggaagaataaaaaaaaaaaaaaa

SEQ ID NO: 182 - protein, 165 aa, Homo sapien
MASGVQVADEVCRIFYDMKVRKCSTPEEIKKRKKAVIFCLSADKKCIIVEEGKEILVGDVGVTITDPFKHFVGMLPEKDCRYALYDASFETKESRKEELMFFLWAPELAPLKSKMIYASSKDAIKKKFQGIKHECQANGPEDLNRACIAEKLGGSLIVAFEGCPV

SEQ ID NO: 183 - DNA, 2310 bp, Homo sapien
acttccgtttttgctgggtaggcgacccggacggagggccggcgaggtgcggggtctggtgatgcgagctgcgcctctcggcaagatttcgcgctgcccatcccgggccctttcatcagtaatcggtagtggatcactctgccaagcggcaggaagaattaaggaaacgacaaggagacgctcggctctctcccgcttggctccttgcggcctcctcttcccttcgctccggcccggtgaaactgaacttataatcgtcactggattgtaagtacccgaggcgaagagagctcgctgagccctgattttttgagtgtctttgttccgggagagtttgtgagttgaaagtatctctgctgggctttctgggccgaaaaccgttccgggggagccgccatttgctttcctgttccctagctagctagctagctctctccgcgttgtccggcagcggcacctagaggttgggacttggcattgcatctgatttaatgaacttaagtctgtgaataagcctttgtgttaacgactggtattcggtcacagcatatttagagaaaagacttggagcttaaataaaaactaaggcaaaatagacgcttagctgctgatctacagagaacttcttgtaattaaaagatttcaattcatagcaaactggtgttttaaactattgcagtagctggaactttttagtgtaaccagcatttattggagaagtgaatcacaaggaaataaagatgagtaaaagcaaagatgatgctcctcacgaactggagagccagtttatcttacgtctgcctccagaatatgcctctactgtgagaagggcagtacagtctggtcatgtcaacctcaaggacagactgacaattgagttacatcctgatgggcgtcatggaatcgtcagagtggaccgtgttccattggcctcaaaattagtagacctgccctgtgttatggaaagcttgaaaaccattgataaaaaaactttttacaagacagctgatatctgtcagatgcttgtatccacagttgatggtgatctctatcctcctgtggaggagccagttgctagcactgatcctaaagcaagcaagaaaaaggataaggacaaagagaaaaagtttatctggaaccacggaattactctgcctctaaagaatgtcaggaagagaaggttccggaagacagcaaagaagaaatatattgaatctccagatgttgaaaaagaagtgaaacgattgctgagtacagatgctgaagctgttagtactcggtgggaaataattgccgaagatgaaacaaaggaggcagaaaatcaaggcctggatatctcttctccaggaatgtctggtcacaggcagggccatgactcattagaacatgatgagcttcgggagatattcaatgacctcagcagcagcagtgaggatgaagatgagacccagcatcaagatgaagaagatataaacatcattgacacggaggaagatctggagagacagctacaggacaagctaaatgaatcagatgaacagcaccaggaaaatgaaggaaccaatcagctggttatgggaattcagaagcagattgacaacatgaaaggcaagctccaagagacccaggacagggcaaaacgacaagaggatctcatcatgaaagtggaaaatctggctctcaagaacagatttcaggctgtactggatgagctcaaacaaaaggaagaccgagaaaaggagcaactcagctctttgcaagaggagctagaatcactcctagagaagtaaaaagaactgatatttaatttcagtcttcagactggtcagcattagaaaattcttggctttattgtactgggtattaagaccttgctcttcctagtccttttaatgctgtgtgttctgttaagttctttcatttgtttgtaattttgtttttcagcaaatttatattgttttgctaggtgttcatcctataagaagcaggattgtataggcagaaaaatgattgtaggaaagttgcaggattagcggaatgtatggttcaaccttaattatagcttcattgcaggactttactgtttctccattttctagaagctgctgttgctgctttgtgatgacgtgagatcaataagaagaacctagtctagagacaatgatgctagtttgcatatgttttcctatgcaataattgttttcccagttattcaaagcagctttctatatgtagagatgcaaattattaagttgtttccaatacaataaataaaagcatctgtttttcactttaaaaaaaaaaaaaaaa

SEQ ID NO: 184 - protein, 349 aa, Homo sapien
MSKSKDDAPHELESQFILRLPPEYASTVRRAVQSGHVNLKDRLTIELHPDGRHGIVRVDRVPLASKLVDLPCVMESLKTIDKKTFYKTADICQMLVSTVDGDLYPPVEEPVASTDPKASKKKDKDKEKKFIWNHGITLPLKNVRKRRFRKTAKKKYIESPDVEKEVKRLLSTDAEAVSTRWEIIAEDETKEAENQGLDISSPGMSGHRQGHDSLEHDELREIFNDLSSSSEDEDETQHQDEEDINIIDTEEDLERQLQDKLNESDEQHQENEGTNQLVMGIQKQIDNMKGKLQETQDRAKRQEDLIMKVENLALKNRFQAVLDELKQKEDREKEQLSSLQEELESLLEK

SEQ ID NO: 185 - DNA, 4170 bp, Homo sapien
cgcgggtctgtggagagccgggtgcgagcggcggcagcacgaggggaaaagagctgagcggagaccaaagtcagccgggagacagtgggtctgtgagagaccgaatagaggggctggggccacgagcgccattgacaagcaatggggaagaaacagaaaaacaagagcgaagacagcaccaaggatgacattgatcttgatgccttggctgcagaaatagaaggagctggtgctgccaaagaacaggagcctcaaaagtcaaaagggaaaaagaaaaaagagaaaaaaaagcaggactttgatgaagatgatatcctgaaagaactggaagaattgtctttggaagctcaaggcatcaaagctgacagagaaactgttgcagtgaagccaacagaaaacaatgaagaggaattcacctcaaaagataaaaaaaagaaaggacagaagggcaaaaaacagagttttgatgataatgatagcgaagaattggaagataaagattcaaaatcaaaaaagactgcaaaaccgaaagtggaaatgtactctgggagtgatgatgatgatgattttaacaaacttcctaaaaaagctaaagggaaagctcaaaaatcaaataagaagtgggatgggtcagaggaggatgaggataacagtaaaaaaattaaagagcgttcaagaataaattcttctggtgaaagtggtgatgaatcagatgaatttttgcaatctagaaaaggacagaaaaaaaatcagaaaaacaagccaggtcctaacatagaaagtgggaatgaagatgatgacgcctccttcaaaattaagacagtggcccaaaagaaggcagaaaagaaggagcgcgagagaaaaaagcgagatgaagaaaaagcgaaactgcggaagctgaaagaaaaagaagagttagaaacaggtaaaaaggatcagagtaaacaaaaggaatctcaaaggaaatttgaagaagaaactgtaaaatccaaagtgactgttgatactggagtaattcctgcctctgaagagaaagcagagactcccacagctgcagaagatgacaatgaaggagacaaaaagaagaaagataagaagaaaaagaaaggagaaaaggaagaaaaagagaaagagaagaaaaaaggacctagcaaagccactgttaaagctatgcaagaagctctggctaagcttaaagaggaagaagaaagacagaagagagaagaggaagaacgtataaaacggcttgaagaattagaagccaagcgtaaagaagaggaacgattggaacaagaaaaaagagaaaggaaaaagcaaaaagaaaaagaaagaaaagaacgcttgaaaaaagaagggaaacttttaactaaatcccagagagaagccagagccagagccgaagctactcttaaactgctacaagctcagggtgttgaagtgccatcaaaagactctttgccaaagaagaggccaatttatgaagataaaaagaggaaaaaaataccacagcagctagaaagtaaagaagtgtctgaatcaatggaattatgtgctgctgtagaagttatggaacaaggagtaccagaaaaggaagagacaccacctcctgttgaaccagaagaagaagaagatactgaggatgctggattggatgattgggaagctatggccagtgatgaggagacagaaaaagtagaaggaaacacagttcatatagaagtaaaagaaaaccctgaagaggaggaggaggaggaagaagaggaagaagaagatgaagaaagtgaagaagaggaggaagaggagggagaaagtgaaggcagtgaaggtgatgaggaagatgaaaaggtgtcagatgagaaggattcagggaagacattagataaaaagccaagtaaagaaatgagctcagattctgaatatgactctgatgatgatcggactaaagaagaaagggcttatgacaaagcaaaacggaggattgagaaacggcgacttgaacatagtaaaaatgtaaacaccgaaaagctaagagcccctattatctgcgtacttgggcatgtggacacagggaagacaaaaattctagataagctccgtcacacacatgtacaagacggtgaagcaggtggtatcacacaacaaatttgggccaccaatgttcctcttgaagctattaatgaacagactaagatgattaaaaattttgatagagagaatgtacggattccaggaatgctaattattgatactcctgggcatgaatctttcagtaatctgagaaatagaggaagctctctttgtgacattgccattttagttgttgatattatgcatggtttggagccccagacaattgagtctatcaaccttctcaaatctaaaaaatgtcccttcattgttgcactcaataagattgataggttatatgattggaaaaagagtcctgactctgatgtggctgctactttaaagaagcagaaaaagaatacaaaagatgaatttgaggagcgagcaaaggctattattgtagaatttgcacagcagggtttgaatgctgctttgttttatgagaataaagatccccgcacttttgtgtctttggtacctacctctgcacatactggtgatggcatgggaagtctgatctaccttcttgtagagttaactcagaccatgttgagcaagagacttgcacactgtgaagagctgagagcacaggtgatggaggttaaagctctcccggggatgggcaccactatagatgtcattttgatcaatgggcgtttgaaggaaggagatacaatcattgttcctggagtagaagggcccattgtaactcagattcgaggcctcctgttacctcctcctatgaaggaattacgagtgaagaaccagtatgaaaagcataaagaagtagaagcagctcagggggtaaagattcttggaaaagacctggagaaaacattggctggtttacccctccttgtggcttataaagaagatgaaatccctgttcttaaagatgaattgatccatgagttaaagcagacactaaatgctatcaaattagaagaaaaaggagtctatgtccaggcatctacactgggttctttggaagctctactggaatttctgaaaacatcagaagtgccctatgcaggaattaacattggcccagtgcataaaaaagatgttatgaaggcttcagtgatgttggaacatgaccctcagtatgcagtaattttggccttcgatgtgagaattgaacgagatgcacaagaaatggctgatagtttaggagttagaatttttagtgcagaaattatttatcatttatttgatgcctttacaaaatatagacaagactacaagaaacagaaacaagaagaatttaagcacatagcagtatttccctgcaagataaaaatcctccctcagtacatttttaattctcgagatccgatagtgatgggggtgacggtggaagcaggtcaggtgaaacaggggacacccatgtgtgtcccaagcaaaaattttgttgacatcggaatagtaacaagtattgaaataaaccataaacaagtggatgttgcaaaaaaaggacaagaagtttgtgtaaaaatagaacctatccctggtgagtcacccaaaatgtttggaagacattttgaagctacagatattcttgttagtaagatcagccggcagtccattgatgcactcaaagactggttcagagatgaaatgcagaagagtgactggcagcttattgtggagctgaagaaagtatttgaaatcatctaattttttcacatggagcaggaactggagtaaatgcaatactgtgttgtaatatcccaacaaaaatcagacaaaaaatggaacagacgtatttggacactgatggacttaagtatggaaggaagaaaaataggtgtataaaatgttttccatgagaaaccaagaaacttacactggtttgacagtggtcagttacatgtccccacagttccaatgtgcctgttcactcacctctcccttccccaacccttctctacttggctgctgttttaaagtttgcccttccccaaatttggatttttattacagagtctaaagctctttcgattttatactgattaaatcagtactgcagtatttgattaacca

SEQ ID NO: 186 - protein, 1220 aa, Homo sapien
MGKKQKNKSEDSTKDDIDLDALAAEIEGAGAAKEQEPQKSKGKKKKEKKKQDFDEDDILKELEELSLEAQGIKADRETVAVKPTENNEEEFTSKDKKKKGQKGKKQSFDDNDSEELEDKDSKSKKTAKPKVEMYSGSDDDDDFNKLPKKAKGKAQKSNKKWDGSEEDEDNSKKIKERSRINSSGESGDESDEFLQSRKGQKKNQKNKPGPNIESGNEDDDASFKIKTVAQKKAEKKERERKKRDEEKAKLRKLKEKEELETGKKDQSKQKESQRKFEEETVKSKVTVDTGVIPASEEKAETPTAAEDDNEGDKKKKDKKKKKGEKEEKEKEKKKGPSKATVKAMQEALAKLKEEEERQKREEEERIKRLEELEAKRKEEERLEQEKRERKKQKEKERKERLKKEGKLLTKSQREARARAEATLKLLQAQGVEVPSKDSLPKKRPIYEDKKRKKIPQQLESKEVSESMELCAAVEVMEQGVPEKEETPPPVEPEEEEDTEDAGLDDWEAMASDEETEKVEGNTVHIEVKENPEEEEEEEEEEEEDEESEEEEEEEGESEGSEGDEEDEKVSDEKDSGKTLDKKPSKEMSSDSEYDSDDDRTKEERAYDKAKRRIEKRRLEHSKNVNTEKLRAPIICVLGHVDTGKTKILDKLRHTHVQDGEAGGITQQIWATNVPLEAINEQTKMIKNFDRENVRIPGMLIIDTPGHESFSNLRNRGSSLCDIAILVVDIMHGLEPQTIESINLLKSKKCPFIVALNKIDRLYDWKKSPDSDVAATLKKQKKNTKDEFEERAKAIIVEFAQQGLNAALFYENKDPRTFVSLVPTSAHTGDGMGSLIYLLVELTQTMLSKRLAHCEELRAQVMEVKALPGMGTTIDVILINGRLKEGDTIIVPGVEGPIVTQIRGLLLPPPMKELRVKNQYEKHKEVEAAQGVKILGKDLEKTLAGLPLLVAYKEDEIPVLKDELIHELKQTLNAIKLEEKGVYVQASTLGSLEALLEFLKTSEVPYAGINIGPVHKKDVMKASVMLEHDPQYAVILAFDVRIERDAQEMADSLGVRIFSAEIIYHLFDAFTKYRQDYKKQKQEEFKHIAVFPCKIKILPQYIFNSRDPIVMGVTVEAGQVKQGTPMCVPSKNFVDIGIVTSIEINHKQVDVAKKGQEVCVKIEPIPGESPKMFGRHFEATDILVSKISRQSIDALKDWFRDEMQKSDWQLIVELKKVFEII

SEQ ID NO: 187 - DNA, 1877 bp, Homo sapien
cgcccccagagtctggctttccgcggctgcccgcctcgcgcgtcttccctgcccgggtctcctcgctgtcgccgccgctgccacaccatggccttcgtcaccaggcagttcatgcgttccgtgtcctcctcgtccaccgcctcggcctcggccaagaagataatcgtcaagcacgtgacggtcatcggcggcgggctgatgggcgccggcattgcccaggttgctgcagcaactggtcacacagtagtgttggtagaccagacagaggacatcctggcaaaatccaaaaagggaattgaggaaagccttaggaaagtggcaaagaagaagtttgcagaaaaccctaaggccggcgatgaatttgtggagaagaccctgagcaccatagcgaccagcacggatgcagcctccgttgtccacagcacagacttggtggtggaagccatcgtggagaatctgaaggtgaaaaacgagctcttcaaaaggctggacaagtttgctgctgaacatacaatctttgccagcaacacttcctccttgcatattacaagcatagctaatgccaccaccagacaagaccgattcgctggcctccatttcttcaacccagtgcctgtcatgaaacttgtggaggtcattaaaacaccaatgaccagccagaagacatttgaatctttggtagactttagcaaagccctaggaaagcatcctgtttcttgcaaggacactcctgggtttattgtgaaccgcctcctggttccatacctcatggaagcaatcaggctgtatgaacgaggtgacgcatccaaagaagacattgacactgctatgaaattaggagccggttaccccatgggcccatttgagcttctagattatgtcggactggatactacgaagttcatcgtggatgggtggcatgaaatggatgcagagaacccattacatcagcccagcccatccttaaataagctggtagcagagaacaagttcggcaagaagactggagaaggattttacaaatacaagtgatgtgcagcttctccggctctgagaagaacacctgagagcgctttccagccagtgccccgagtgcctgtgggaatgctctttggtcagacattccctcacacagtacagtttaataaatgtgcattttgattgtaatctatcgaagtgattattacaccagttacagcagtaatagattctccattaagaaataattcccttttttagtctgttcatttctgtgtattttctaaacagctttacacccttggtgccttggagcaaacatgttttttgaaccttgtcatttttgtgaagaattgcctagattccttctctcatcaacgggaaagtacttcctctgagagtgcgagtgcaccatgctcactgttgctgcgtgggagagtcacaagccactggcaagcaagtggtatagtctgtgaagcactgcagcgagcagcacctggatcttgcctttataagaacattttactacctgcagctttgagtcttgccctacattttgggcatgacataagatgtgtctttattcagctcgtcgtgaagatgctgctgctgaatgggtcagcatatctctgtttgcatggtttgcaggaggtcggttttcatggtcattcagttccacagatctgaatgattactgtctgtctgtgtcttttttccatgagaaatcactgttgcaaattgcctataaattgactctactaaaataacaatgtttcagtctgaaaatttgaattgaaaaaaatgtataatataaaattgtaatacactcaaatgattataaaagtaaaagttggtaatttaggcaaaaaaaaaaaaaaaaaaaaaaaaaaaaaaaaaaa

SEQ ID NO: 188 - protein, 314 aa, Homo sapien
MAFVTRQFMRSVSSSSTASASAKKIIVKHVTVIGGGLMGAGIAQVAAATGHTVVLVDQTEDILAKSKKGIEESLRKVAKKKFAENPKAGDEFVEKTLSTIATSTDAASVVHSTDLVVEAIVENLKVKNELFKRLDKFAAEHTIFASNTSSLHITSIANATTRQDRFAGLHFFNPVPVMKLVEVIKTPMTSQKTFESLVDFSKALGKHPVSCKDTPGFIVNRLLVPYLMEAIRLYERGDASKEDIDTAMKLGAGYPMGPFELLDYVGLDTTKFIVDGWHEMDAENPLHQPSPSLNKLVAENKFGKKTGEGFYKYK

SEQ ID NO: 189 - DNA, 2015 bp, Homo sapien
tcgctgcgaaggacatttgggctgtgtgtgcgacgcgggtcggaggggcagtcgggggaaccgcgaagaagccgaggagcccggagccccgcgtgacgctcctctctcagtccaaaagcggcttttggttcggcgcagagagacccgggggtctagcttttcctcgaaaagcgccgccctgcccttggccccgagaacagacaaagagcaccgcagggccgatcacgctgggggcgctgaggccggccatggtcatggaagtgggcaccctggacgctggaggcctgcgggcgctgctgggggagcgagcggcgcaatgcctgctgctggactgccgctccttcttcgctttcaacgccggccacatcgccggctctgtcaacgtgcgcttcagcaccatcgtgcggcgccgggccaagggcgccatgggcctggagcacatcgtgcccaacgccgagctccgcggccgcctgctggccggcgcctaccacgccgtggtgttgctggacgagcgcagcgccgccctggacggcgccaagcgcgacggcaccctggccctggcggccggcgcgctctgccgcgaggcgcgcgccgcgcaagtcttcttcctcaaaggaggatacgaagcgttttcggcttcctgcccggagctgtgcagcaaacagtcgacccccatggggctcagccttcccctgagtactagcgtccctgacagcgcggaatctgggtgcagttcctgcagtaccccactctacgatcagggtggcccggtggaaatcctgccctttctgtacctgggcagtgcgtatcacgcttcccgcaaggacatgctggatgccttgggcataactgccttgatcaacgtctcagccaattgtcccaaccattttgagggtcactaccagtacaagagcatccctgtggaggacaaccacaaggcagacatcagctcctggttcaacgaggccattgacttcatagactccatcaagaatgctggaggaagggtgtttgtccactgccaggcaggcatttcccggtcagccaccatctgccttgcttaccttatgaggactaatcgagtcaagctggacgaggcctttgagtttgtgaagcagaggcgaagcatcatctctcccaacttcagcttcatgggccagctgctgcagtttgagtcccaggtgctggctccgcactgttcggcagaggctgggagccccgccatggctgtgctcgaccgaggcacctccaccaccaccgtgttcaacttccccgtctccatccctgtccactccacgaacagtgcgctgagctaccttcagagccccattacgacctctcccagctgctgaaaggccacgggaggtgaggctcttcacatcccattgggactccatgctccttgagaggagaaatgcaataactctgggaggggctcgagagggctggtccttatttatttaacttcacccgagttcctctgggtttctaagcagttatggtgatgacttagcgtcaagacatttgctgaactcagcacattcgggaccaatatatagtgggtacatcaagtccatctgacaaaatggggcagaagagaaaggactcagtgtgtgatccggtttctttttgctcgcccctgttttttgtagaatctcttcatgcttgacatacctaccagtattattcccgacgacacatatacatatgagaatataccttatttatttttgtgtaggtgtctgccttcacaaatgtcattgtctactcctagaagaaccaaatacctcaatttttgtttttgagtactgtactatcctgtaaatatatcttaagcaggtttgttttcagcactgatggaaaataccagtgttgggtttttttttagttgccaacagttgtatgtttgctgattatttatgacctgaaataatatatttcttcttctaagaagacattttgttacataaggatgacttttttatacaatggaataaattatggcatttctattg

SEQ ID NO: 190 - protein, 367 aa, Homo sapien
MVMEVGTLDAGGLRALLGERAAQCLLLDCRSFFAFNAGHIAGSVNVRFSTIVRRRAKGAMGLEHIVPNAELRGRLLAGAYHAVVLLDERSAALDGAKRDGTLALAAGALCREARAAQVFFLKGGYEAFSASCPELCSKQSTPMGLSLPLSTSVPDSAESGCSSCSTPLYDQGGPVEILPFLYLGSAYHASRKDMLDALGITALINVSANCPNHFEGHYQYKSIPVEDNHKADISSWFNEAIDFIDSIKNAGGRVFVHCQAGISRSATICLAYLMRTNRVKLDEAFEFVKQRRSIISPNFSFMGQLLQFESQVLAPHCSAEAGSPAMAVLDRGTSTTTVFNFPVSIPVHSTNSALSYLQSPITTSPSC

SEQ ID NO: 191 - DNA, 1136 bp, Homo sapien
cgggtgctgggggctcgagaaccgagcggagctggttgagccttcaaagtcctaaaacgcgcggccgtgggttcggggtttattgattgaattccgccggcgcgggagcctctgcagagagagagcgcgagagatggagatgggcagacggattcatttagagctgcggaacaggacgccctctgatgtgaaagaacttgtcctggacaacagtcggtcgaatgaaggcaaactcgaaggcctcacagatgaatttgaagaactggaattcttaagtacaatcaacgtaggcctcacctcaatcgcaaacttaccaaagttaaacaaacttaagaagcttgaactaagcgataacagagtctcagggggcctggaagtattggcagaaaagtgtccgaacctcacgcatctaaatttaagtggcaacaaaattaaagacctcagcacaatagagccactgaaaaagttagaaaacctcaagagcttagaccttttcaattgcgaggtaaccaacctgaacgactaccgagaaaatgtgttcaagctcctcccgcaactcacatatctcgacggctatgaccgggacgacaaggaggcccctgactcggatgctgagggctacgtggagggcctggatgatgaggaggaggatgaggatgaggaggagtatgatgaagatgctcaggtagtggaagacgaggaggacgaggatgaggaggaggaaggtgaagaggaggacgtgagtggagaggaggaggaggatgaagaaggttataacgatggagaggtagatgacgaggaagatgaagaagagcttggtgaagaagaaaggggtcagaagcgaaaacgagaacctgaagatgagggagaagatgatgactaagtggaataacctattttgaaaaattcctattgtgatttgactgtttttacccatatcccctctcccccccccctccaatcctgccccctgaaacttatttttttctgattgtaacgttgctgtgggaacgagaggggaagagtgtactgggggttgcggggggagggatggcgggtgggggtggaataaaatactatttttactgccactctttaaaaaaaaaaaaaaaaaaaaaaaaaaaaaaaaaaaaaaa

SEQ ID NO: 192 - protein, 249 aa, Homo sapien
MEMGRRIHLELRNRTPSDVKELVLDNSRSNEGKLEGLTDEFEELEFLSTINVGLTSIANLPKLNKLKKLELSDNRVSGGLEVLAEKCPNLTHLNLSGNKIKDLSTIEPLKKLENLKSLDLFNCEVTNLNDYRENVFKLLPQLTYLDGYDRDDKEAPDSDAEGYVEGLDDEEEDEDEEEYDEDAQVVEDEEDEDEEEEGEEEDVSGEEEEDEEGYNDGEVDDEEDEEELGEEERGQKRKREPEDEGEDDD

SEQ ID NO: 193 - DNA, 2997 bp, Homo sapien
ggactgcggtctcgggcagcaatggccgagaagcgcgacacacgggactccgaagcccagcggctccccgactccttcaaggacagccccagtaagggccttggaccttgcggatggattttggtggcgttctcattcttattcaccgttataactttcccaatctcaatatggatgtgcataaagattataaaagagtatgaaagagccatcatctttagattgggtcgcattttacaaggaggagccaaaggacctggtttgttttttattctgccatgcactgacagcttcatcaaagtggacatgagaactatttcatttgatattcctcctcaggagatcctgacaaaggattcagtgacaattagcgtggatggtgtggtctattaccgcgttcagaatgcaaccctggctgtggcaaatatcaccaacgctgactcagcaacccgtcttttggcacaaactactctgaggaatgttctgggcaccaagaatctttctcagatcctctctgacagagaagaaattgcacacaacatgcagtctactctggatgatgccactgatgcctggggaataaaggtggagcgtgtggaaattaaggatgtgaaactacctgtgcagctccagagagctatggctgcagaagcagaagcgtcccgcgaggcccgcgccaaggttattgcagccgaaggagaaatgaatgcatccagggctctgaaagaagcctccatggtcatcactgaatctcctgcagcccttcagctccgatacctgcagacactgaccaccattgctgctgagaaaaactcaacaattgtcttccctctgcccatagatatgctgcaaggaatcataggggcaaaacacagccatctaggctagtgtagagatgagcgctagccttccaagcatgaagtcggggaccaaattagcctttaactcataaagagagggtagggcttttctttttccatatgtcaattgtggtgttcccagaatgtatagcagttataaaaataggtgaaagaattgttagcttgtaaatactgagagattggtgatttatataaggtaatctgttagtcttaaaatagttaaaagtttgtatttttagattattatgtagtaggttagatccctcttgttttgacttccactgactcattctgaaccccctaagcacccaggccacaggcaagaacctgggctgtaactgccacctgacaccgctgactggctaaatgctttgcagaaagtgatgaccttacaccacaaccagcttctccaggtcatatgtgccttacctccagaagtctttttttttttttttttctgagatggagtttcactcttgttgcccaggctggagtgcaatagcatgatctcggctcactgcaacctccgcctcctgggttcaagagattctcctgcctcagcctccccagtagctgggattacaggctcatgccaccatgcccagctaatttttgtattattattattgttttttagtagagacggggtttcaccatgttggccaggctagtcacgaactcctaacctcaggtgatccacccacctctgcctccaaagtgctggattacaggctgagctaccaccctggtttggagagtcttaattaattgaaatttccctaatgttcatttattttctaaatccagccgtgtttcagaataatccttacttgagagtagccattttcttgtgtacttgtcagaactagaggaaatagccaagactaatgaaaaacattactctaacccttaaaagacttttaaattcactactagagtggtcattttaaaaatacatccatgttttaacttattttgagcctttcttttatgagtaaatgattcctccttgttctgtctttcaaaccagctaaatatttgtcacaaaagtgacttttttctcactgttgcctattttcatatatcaggttttaaatagttttaattttttaataaaatttttctctacgttctatatgcaattgttatatatctatttgaatagctgaaggactaaaatacttttttaagagataacttcaggaaaccattatattttactatctgcatgctgttaactgtggtacactgtgaaatatgttgattacaaacccattcattacatagtataaggaattcacagtatattgactatatagtgtctaatgactgggcagatactgtcaacttacaatatctatatagagaggctttaaacttaccttactcattctctatgatgtatgacttgatgctgaaagaggaagctggtcagctcctcatggacaacaaattcttagtctataatattaggagacatctctagttttgcaaatgtctgtgaatctgagcaacctggacttctgcttactggccagaaagctggcgggtgacatttgtaacatttcctctttgagactctgagttcacctagagaagtctaagcataacagctttctttcccagcacgagcctttatagctctctttagctcaaccactctgtccatccagccaatggatgtccttccctgtacccaattcaagcttattttagggaagccttgaaactaccatgtatctggctctagctgagttattgaggattgagccagtgcaacgttaaactcagtgcacttacatttgatttaaatgatggttttatctgttgtgtgaagtggttcacccttgaggaccaggagcctccatatcctgactgaaaaccttttctgagacttagagtaacagtacttttggttccttgagttctcctgtctccagatacctaaatgaccttgacttttctgccttgtgaattcgtagtccaatcagctgaaattaaatcacttgggagggacgcatagaaggagctctaggaacacagtgccagtgcagaagtttctccaggtggcctccctttccaacaatgtacataataaagtgtatgcactttcact

SEQ ID NO: 194 - protein, 288 aa, Homo sapien
MAEKRDTRDSEAQRLPDSFKDSPSKGLGPCGWILVAFSFLFTVITFPISIWMCIKIIKEYERAIIFRLGRILQGGAKGPGLFFILPCTDSFIKVDMRTISFDIPPQEILTKDSVTISVDGVVYYRVQNATLAVANITNADSATRLLAQTTLRNVLGTKNLSQILSDREEIAHNMQSTLDDATDAWGIKVERVEIKDVKLPVQLQRAMAAEAEASREARAKVIAAEGEMNASRALKEASMVITESPAALQLRYLQTLTTIAAEKNSTIVFPLPIDMLQGIIGAKHSHLG

SEQ ID NO: 195 - DNA, 3065 bp, Homo sapien
gcagcctgaggaaaaaaagagaaaaagataaaaaaaatctgaaaacgcttcaaaatcctgaaaaaaaaaaggaaaagaaaaaacgaatcctcggagaacccgcggggaagtcactttcgtacgcttccggcctgccccgcgcccgccgccgcagcgcttggcgtccgtcggtctccgtccgtcggtccgggggtgagccgcccgcccggcccgccgtgccctccccccgctcgggccccgagccccgcgccccggcctgccccggcgcaccacgtgtccgtgctgcccttcgccgcccgcccggggtcgccgagtcggcgcccacaaagatttggtttccctctgcccggcggttgtaatcttaaaccgccggagcccgaggcctatatttatagagaaacgcgtgtccccgaggcccgccgtgggcagcgtccggtcgcctcttaaaggatttttacccttcggaaggggattccccgtttaatttttttcctactttgattttttgaaatttggagccttcgcaccaggaccgcggagaagtgcaaagtcgcggggagggccgtattgtgcggagagccttttgtctgcggtgctgcggccgtgggagccggcccccgcctcccgtttccgtcccgtctccaagcccgccgactccagctcgtcctcgccgcgccggtgccacctgtgagccggcgcgggcccgggctccggctccgaaggcgcccctttgtcctgcggcgggcccgataagaagtcctctggcggggctcggggtggtggggggcggggagatgaacgctgcggccagcagctaccccatggcctccctgtacgtgggcgacctgcattcggacgtcaccgaggccatgctgtacgaaaagttcagccccgcggggcctgtgctgtccatccgggtctgccgcgatatgatcacccgccgctccctgggctatgcctacgtcaacttccagcagccggccgacgctgagcgggctttggacaccatgaactttgatgtgattaagggaaagccaatccgcatcatgtggtctcagagggatccctctttgagaaaatctggtgtgggaaacgtcttcatcaagaacctggacaaatctatagataacaaggcactttatgatactttttctgcttttggaaacatactgtcctgcaaggtggtgtgtgatgagaacggctctaagggttatgcctttgtccacttcgagacccaagaggctgccgacaaggccatcgagaagatgaatggcatgctcctcaatgaccgcaaagtatttgtgggcagattcaagtctcgcaaagagcgggaagctgagcttggagccaaagccaaggaattcaccaatgtttatatcaaaaactttggggaagaggtggatgatgagagtctgaaagagctattcagtcagtttggtaagaccctaagtgtcaaggtgatgagagatcccaatgggaaatccaaaggctttggctttgtgagttacgaaaaacacgaggatgccaataaggctgtggaagagatgaatggaaaagaaataagtggtaaaatcatatttgtaggccgtgcacaaaagaaagtagaacggcaggcagagttaaaacggaaatttgaacagttgaaacaggagagaattagtcgatatcagggggtgaatctctacattaagaacttggatgacactattgatgatgagaaattaaggaaagaattttctccttttggatcaattaccagtgctaaggtaatgctggaggatggaagaagcaaagggtttggcttcgtctgcttctcatctcctgaagaagcaaccaaagcagtcactgagatgaatggacgcattgtgggctccaagccactatatgttgccctggcccagaggaaggaagagagaaaggctcacctgaccaaccagtatatgcaacgagtggctggaatgagagcacttcctgccaatgccatcttaaatcagttccagcctgcagcgggtggctactttgtgccagcagtcccacaggctcagggaaggcctccatattatacacctaaccagttagcacagatgaggcctaatccacgctggcagcaaggtgggagacctcaaggcttccaaggaatgccaagtgctatacgccagtctgggcctcgtccaactcttcgccatctggctccaactgggtctgagtgcccggaccgcttggctatggactttggtggggctggtgccgcccagcaagggctgactgacagctgccagtctggaggcgttcccacagctgtgcagaacttagcgccacgcgctgctgttgctgctgctgctccccgggctgttgccccctacaaatacgcctccagtgtccgcagccctcatcctgccatacagcctctgcaggcaccccagcctgcggtccatgtgcaggggcaggagccactgactgcctccatgctggctgcagcacccccccaggaacagaagcagatgctgggagaacgcttgttcccactcatccaaacaatgcattcaaatctggctgggaagatcacgggaatgctgctggagatagacaactctgagctgctgcacatgttagagtcccccgagtctctccgctccaaggtggatgaagctgtagcagttctacaggctcatcatgccaagaaagaagctgcccagaaggtgggcgctgttgctgctgctacctcttagacaaggaaaaaccgattcaaaagccaaataaccccttatggaattcaactcaaggtttgaagacttcctagcttgtcctatggacctcaacaccaaggattacaaattgcaaatttaataggtcattttgtatcaaaaggtcaattatgaagcacctagaatttttcaattatacgaatatgttctttgggttctgctgtggcccagacagtgttaactttttttttattgtgggttttgattttttcccccagaaattggttttatttgatgtacccaagtcttacgtttcccaataaagaaaaaaaatctccataaaaaaagtcgagcggccgc

SEQ ID NO: 196 - protein, 644 aa, Homo sapien
MNAAASSYPMASLYVGDLHSDVTEAMLYEKFSPAGPVLSIRVCRDMITRRSLGYAYVNFQQPADAERALDTMNFDVIKGKPIRIMWSQRDPSLRKSGVGNVFIKNLDKSIDNKALYDTFSAFGNILSCKVVCDENGSKGYAFVHFETQEAADKAIEKMNGMLLNDRKVFVGRFKSRKEREAELGAKAKEFTNVYIKNFGEEVDDESLKELFSQFGKTLSVKVMRDPNGKSKGFGFVSYEKHEDANKAVEEMNGKEISGKIIFVGRAQKKVERQAELKRKFEQLKQERISRYQGVNLYIKNLDDTIDDEKLRKEFSPFGSITSAKVMLEDGRSKGFGFVCFSSPEEATKAVTEMNGRIVGSKPLYVALAQRKEERKAHLTNQYMQRVAGMRALPANAILNQFQPAAGGYFVPAVPQAQGRPPYYTPNQLAQMRPNPRWQQGGRPQGFQGMPSAIRQSGPRPTLRHLAPTGSECPDRLAMDFGGAGAAQQGLTDSCQSGGVPTAVQNLAPRAAVAAAAPRAVAPYKYASSVRSPHPAIQPLQAPQPAVHVQGQEPLTASMLAAAPPQEQKQMLGERLFPLIQTMHSNLAGKITGMLLEIDNSELLHMLESPESLRSKVDEAVAVLQAHHAKKEAAQKVGAVAAATS

SEQ ID NO: 197 - DNA, 1273 bp, Homo sapien
caagatggcggcagctgcggcttcgcttcgcggggtagtgttgggcccgcggggcgcggggctcccgggcgcgcgtgcccggggtctgctgtgcagcgcgcggcccgggcagctcccgctacggacacctcaggcagtggccttgtcgtcgaagtctggcctttcccgaggccggaaagtgatgctgtcagcgctgggcatgctggcggcagggggtgcggggctggccgtggctctgcattcggctgtgagtgccagtgacctggagctgcacccccccagctatccgtggtctcaccgtggcctcctctcttccttggaccacaccagcatccggaggggtttccaggtatataagcaggtgtgcgcctcctgccacagcatggacttcgtggcctaccgccacctggtgggcgtgtgctacacggaggatgaagctaaggagctggctgcggaggtggaggttcaagacggccccaatgaagatggggagatgttcatgcggccagggaagctgttcgactatttcccaaaaccataccccaacagtgaggctgctcgagctgccaacaacggagcattgccccctgacctcagctacatcgtgcgagctaggcatggtggtgaggactacgtcttctccctgctcacgggctactgcgagccacccaccggggtgtcactgcgggaaggtctctacttcaacccctactttcctggccaggccattgccatggcccctcccatctacacagatgtcttagagtttgacgatggcaccccagctaccatgtcccagatagccaaggatgtgtgcaccttcctgcgctgggcatctgagccagagcacgaccatcgaaaacgcatggggctcaagatgttgatgatgatggctctgctggtgcccctggtctacaccataaagcggcacaagtggtcagtcctgaagagtcggaagctggcatatcggccgcccaagtgaccctgtccagtgtctgcttgccatcctgccagaacaggccctcaagcccaagagccatcccaggcctgttcaggcctcagctaagcctctcttcatctggaagaagaggcaagggggcaggagaccaggctctagctctgggccctccttcagcccccatcatgggaataaattaattttctcaatgtaaaaaaaaaaaaaaaaaaaaaaaaaaaaaaaaaaaaaaaaaaaaaaaaaaaaaaaaaaaaaaaaaaaaaaaaaaaaaaaaaaaaaaaaaaaaaaaaaaaaaaa

SEQ ID NO: 198 - protein, 325 aa, Homo sapien
MAAAAASLRGVVLGPRGAGLPGARARGLLCSARPGQLPLRTPQAVALSSKSGLSRGRKVMLSALGMLAAGGAGLAVALHSAVSASDLELHPPSYPWSHRGLLSSLDHTSIRRGFQVYKQVCASCHSMDFVAYRHLVGVCYTEDEAKELAAEVEVQDGPNEDGEMFMRPGKLFDYFPKPYPNSEAARAANNGALPPDLSYIVRARHGGEDYVFSLLTGYCEPPTGVSLREGLYFNPYFPGQAIAMAPPIYTDVLEFDDGTPATMSQIAKDVCTFLRWASEPEHDHRKRMGLKMLMMMALLVPLVYTIKRHKWSVLKSRKLAYRPPK

SEQ ID NO: 199 - DNA, 2391 bp, Homo sapien
cgcaaccggaactagccttctgggggccggcttggtttatctctggcggccttgtagtcgtctccgagactccccacccctccttccctcttgaccccctaggtttgattgccctttccccgaaacaactatcatgagcgcgaggctgccggtgttgtctccacctcggtggccgcggctgttgctgctgtcgctgctcctgctgggggcggttcctggcccgcgccggagcggcgctttctacctgcccggcctggcgcccgtcaacttctgcgacgaagaaaaaaagagcgacgagtgcaaggccgaaatagaactatttgtgaacagacttgattcagtggaatcagttcttccttatgaatacacagcgtttgatttttgccaagcatcagaaggaaagcgcccatctgaaaatcttggtcaggtactattcggggaaagaattgaaccttcaccatataagtttacgtttaataagaaggagacctgtaagcttgtttgtacaaaaacataccatacagagaaagctgaagacaaacaaaagttagaattcttgaaaaaaagcatgttattgaattatcaacatcactggattgtggataatatgcctgtaacgtggtgttacgatgttgaagatggtcagaggttctgtaatcctggatttcctattggctgttacattacagataaaggccatgcaaaagatgcctgtgttattagttcagatttccatgaaagagatacattttacatcttcaaccatgttgacatcaaaatatactatcatgttgttgaaactgggtccatgggagcaagattagtggctgctaaacttgaaccgaaaagcttcaaacatacccatatagataaaccagactgctcagggccccccatggacataagtaacaaggcttctggggagataaaaattgcctatacttactctgttagcttcgaggaagatgataagatcagatgggcgtctagatgggactatattctggagtctatgcctcatacccacattcagtggtttagcattatgaattccctggtcattgttctcttcttatctggaatggtagctatgattatgttacggacactgcacaaagatattgctagatataatcagatggactctacggaagatgcccaggaagaatttggctggaaacttgttcatggtgatatattccgtcctccaagaaaagggatgctgctatcagtctttctaggatccgggacacagattttaattatgacctttgtgactctatttttcgcttgcctgggatttttgtcacctgccaaccgaggagcgctgatgacgtgtgctgtggtcctgtgggtgctgctgggcacccctgcaggctatgttgctgccagattctataagtcctttggaggtgagaagtggaaaacaaatgttttattaacatcatttctttgtcctgggattgtatttgctgacttctttataatgaatctgatcctctggggagaaggatcttcagcagctattccttttgggacactggttgccatattggccctttggttctgcatatctgtgcctctgacgtttattggtgcatactttggttttaagaagaatgccattgaacacccagttcgaaccaatcagattccacgtcagattcctgaacagtcgttctacacgaagcccttgcctggtattatcatgggagggattttgccctttggctgcatctttatacaacttttcttcattctgaatagtatttggtcacaccagatgtattacatgtttggcttcctatttctggtgtttatcattttggttattacctgttctgaagcaactatacttctttgctatttccacctatgtgcagaggattatcattggcaatggcgttcattccttacgagtggctttactgcagtttatttcttaatctatgcagtacactacttcttttcaaaactgcagatcacgggaacagcaagcacaattctgtactttggttataccatgataatggttttgatcttctttctttttacaggaacaattggcttctttgcatgcttttggtttgttaccaaaatatacagtgtggtgaaggttgactgaagaagtccagtgtgtccagttaaaacagaaataaattaaactcttcatcaacaaagacctgtttttgtgactgccttgagttttatcagaattattggcctagtaatccttcagaaacaccgtaattctaaataaacctcttcccatacacctttcccccataagatctgtcttcaacactataaagcatttgtattgtgatttgattaagtatatatttggttgttctcaatgaagagcaaatttaaatattatgtgcatttgaa

SEQ ID NO: 200 - protein, 663 aa, Homo sapien
MSARLPVLSPPRWPRLLLLSLLLLGAVPGPRRSGAFYLPGLAPVNFCDEEKKSDECKAEIELFVNRLDSVESVLPYEYTAFDFCQASEGKRPSENLGQVLFGERIEPSPYKFTFNKKETCKLVCTKTYHTEKAEDKQKLEFLKKSMLLNYQHHWIVDNMPVTWCYDVEDGQRFCNPGFPIGCYITDKGHAKDACVISSDFHERDTFYIFNHVDIKIYYHVVETGSMGARLVAAKLEPKSFKHTHIDKPDCSGPPMDISNKASGEIKIAYTYSVSFEEDDKIRWASRWDYILESMPHTHIQWFSIMNSLVIVLFLSGMVAMIMLRTLHKDIARYNQMDSTEDAQEEFGWKLVHGDIFRPPRKGMLLSVFLGSGTQILIMTFVTLFFACLGFLSPANRGALMTCAVVLWVLLGTPAGYVAARFYKSFGGEKWKTNVLLTSFLCPGIVFADFFIMNLILWGEGSSAAIPFGTLVAILALWFCISVPLTFIGAYFGFKKNAIEHPVRTNQIPRQIPEQSFYTKPLPGIIMGGILPFGCIFIQLFFILNSIWSHQMYYMFGFLFLVFIILVITCSEATILLCYFHLCAEDYHWQWRSFLTSGFTAVYFLIYAVHYFFSKLQITGTASTILYFGYTMIMVLIFFLFTGTIGFFACFWFVTKIYSVVKVD

SEQ ID NO: 201 - DNA, 3595 bp, Homo sapien
aaaagttgcggggcatagacgagcgccccgggacgcagctagcgcgaccctgagccggcgcccgtggtccggccatggacgacctcgacgccctgctggcggacttggagtctaccacctcccacatctccaaacggcctgtgttcttgtcggaggagaccccctactcatacccaactggaaaccacacataccaggagattgccgtgccaccccccgtccccccacccccgtccagcgaggccctcaatggcacaatccttgaccccttagaccagtggcagcccagcggctcccgattcatccaccagcagcctcagtcctcatcacctgtgtacggctccagtgccaaaacttccagtgtctccaaccctcaggacagtgttggctctccgtgctcccgagtgggtgaggaggagcacgtctacagcttccccaacaagcagaaatcagctgagccttcacccaccgtaatgagcacgtccctgggcagcaacctttctgaactcgaccgcctgctgctggaactgaacgctgtacagcataacccgccaggcttccctgcagatgaggccaactcaagccccccgcttcctggggccctgagccccctctatggtgtcccagagactaacagccccttgggaggcaaagctgggcccctgacgaaagagaagcctaagcggaatgggggccggggcctggaggacgtgcggcccagtgtggagagtctcttggatgaactggagagctccgtgcccagccccgtccctgccatcactgtgaaccagggcgagatgagcagcccgcagcgcgtcacctccacccaacagcagacacgcatctcggcctcctctgccaccagggagctggacgagctgatggcttcgctgtcggatttcaagttcatggcccaggggaagacagggagcagctcaccccctggggggcccccgaagcccgggagccagctggacagcatgctggggagcctgcagtctgacctgaacaagctgggggtcgccacagtcgccaaaggagtctgcggggcctgcaagaagcccatcgccgggcaggttgtgaccgccatggggaagacgtggcaccccgagcacttcgtctgcacccactgccaggaggagatcggatcccggaacttcttcgagcgggatggacagccctactgtgaaaaggactaccacaacctcttctccccgcgctgctactactgcaacggccccatcctggataaagtggtgacagcccttgaccggacgtggcaccctgaacacttcttctgtgcacagtgtggagccttctttggtcccgaagggttccacgagaaggacggcaaggcctactgtcgcaaggactacttcgacatgttcgcacccaagtgtggcggctgcgcccgggccatcctggagaactatatctcagccctcaacacgctgtggcatcctgagtgctttgtgtgccgggaatgcttcacgccattcgtgaacggcagcttcttcgagcacgacgggcagccctactgtgaggtgcactaccacgagcggcgcggctcgctgtgttctggctgccagaagcccatcaccggccgctgcatcaccgccatggccaagaagttccaccccgagcacttcgtctgtgccttctgcctcaagcagctcaacaagggcaccttcaaggagcagaacgacaagccttactgtcagaactgcttcctcaagctcttctgctaggtgccctgcccctgtctctgccccccttccccagccagcatccccaactgcgactgtgacctagagacttcacccgggggtgaaggggtaaacccgactgaaactggaacccttgtcctccgctggtgcgggatggacagagggccgtgaggggtccccctgcttgtcttcacccctgccagagcctctgggccccctcctccctcctgtagctctccctaggctgcccactctccatcctccccaggggtagaggctgggggctccaccccagcccatgtacgtccccacgaactggcctggccagcaccccacactggagccatctcttcctcatatttcagcagtgcagccggggggcagggaagggcaggcagggtctgttggggtctctttttatccttattcctcccccgacctaattgtctttgttctgtgattattgggggacacccggctccctccagacaatgccagcataaatccatccatccaaaggcagagaaccaaaggggccatggaaggttctctgtgctcctcctacccttccagtgccctaggcctggcgactgcccctgccttttagacccgcactccccttttatacctgctcttgttctactgagaaaagcctctccagcaataatgttttctagtcacttcctccgtctccgggacggcgtgcctggacactgtccgactttgatagatttctacactgaggttgaattcatatcgcctgagatgttttacttctctatacaccatgattttgtagagatattaaagacgttcccttttgtatctcttcttcatcaccgccactgggccttcactgatggtgtctggtgtgtagattgctttgtctgtggggtggggtggggaagcaatatgtattttattgtttcttagcacaagcaggtgtgctgggagcagctctgtgactccccctctttcacttcatagctcccaggactgttttataaactgctgctatttggaaaccccttctttacttcccaggccagcaagccttcactgaaactggttgaagagtgttgcacccttttgggcctagaattctgaactttatctgttctgtttctgtgggaggagaaggggaagtatgttttggggggctgcttcctgtctgagtaagccctcaggagcctcttgctcccctgtgaacccctgaaccttctgagcccccctgcttctatggggctctctcttctgccttctcaggaaagctgtgtctgattttggccatcaggactctgacgtctctttggtcttgttgatttacctctgggcatatcccttccccagatctgctcctcccctttcacaggtgggatcggcactcagggggtctggaaagaaggtcataagggagcatgataggatttggggcagagggacaggctcctctggggaaaccccccagagctctttaccaaggatgaaagaggagccaggccttgggctcctgatgaccagaaaggggccaccggggtctaatggtgacagtccaaaccactccactggcctcctggcagaagccgagtgtgctggggtctccgaagagggtccctcctttttgggggaaggtcagcccagcccctccaaaggtctgatgtctccactttcacccgcaggccttaccgctctgtttatagtgacccaccctagatcttccccaagagggactggggtttctggggtccattctctgagtcagtggttatttgaaaatttgattttgattttattttttctctgtaaacttccaagctggcttttcccatttcaattcctgtgatttatgccaataaagtttgcccatg

SEQ ID NO: 202 - protein, 557 aa, Homo sapien
MDDLDALLADLESTTSHISKRPVFLSEETPYSYPTGNHTYQEIAVPPPVPPPPSSEALNGTILDPLDQWQPSGSRFIHQQPQSSSPVYGSSAKTSSVSNPQDSVGSPCSRVGEEEHVYSFPNKQKSAEPSPTVMSTSLGSNLSELDRLLLELNAVQHNPPGFPADEANSSPPLPGALSPLYGVPETNSPLGGKAGPLTKEKPKRNGGRGLEDVRPSVESLLDELESSVPSPVPAITVNQGEMSSPQRVTSTQQQTRISASSATRELDELMASLSDFKFMAQGKTGSSSPPGGPPKPGSQLDSMLGSLQSDLNKLGVATVAKGVCGACKKPIAGQVVTAMGKTWHPEHFVCTHCQEEIGSRNFFERDGQPYCEKDYHNLFSPRCYYCNGPILDKVVTALDRTWHPEHFFCAQCGAFFGPEGFHEKDGKAYCRKDYFDMFAPKCGGCARAILENYISALNTLWHPECFVCRECFTPFVNGSFFEHDGQPYCEVHYHERRGSLCSGCQKPITGRCITAMAKKFHPEHFVCAFCLKQLNKGTFKEQNDKPYCQNCFLKLFC

SEQ ID NO: 203 - DNA, 1976 bp, Homo sapien
gccacacggtctttgagctgagtcgaggtggaccctttgaacgcagtcgccctacagccgctgattccccccgcatcgcctcccgtggaagcccaggcccgcttcgcagctttctccctttgtctcataaccatgtccaccaacgagaatgctaatacaccagctgcccgtcttcacagattcaagaacaagggaaaagacagtacagaaatgaggcgtcgcagaatagaggtcaatgtggagctgaggaaagctaagaaggatgaccagatgctgaagaggagaaatgtaagctcatttcctgatgatgctacttctccgctgcaggaaaaccgcaacaaccagggcactgtaaattggtctgttgatgacattgtcaaaggcataaatagcagcaatgtggaaaatcagctccaagctactcaagctgccaggaaactactttccagagaaaaacagccccccatagacaacataatccgggctggtttgattccgaaatttgtgtccttcttgggcagaactgattgtagtcccattcagtttgaatctgcttgggcactcactaacattgcttctgggacatcagaacaaaccaaggctgtggtagatggaggtgccatcccagcattcatttctctgttggcatctccccatgctcacatcagtgaacaagctgtctgggctctaggaaacattgcaggtgatggctcagtgttccgagacttggttattaagtacggtgcagttgacccactgttggctctccttgcagttcctgatatgtcatctttagcatgtggctacttacgtaatcttacctggacactttctaatctttgccgcaacaagaatcctgcacccccgatagatgctgttgagcagattcttcctaccttagttcggctcctgcatcatgatgatccagaagtgttagcagatacctgctgggctatttcctaccttactgatggtccaaatgaacgaattggcatggtggtgaaaacaggagttgtgccccaacttgtgaagcttctaggagcttctgaattgccaattgtgactcctgccctaagagccatagggaatattgtcactggtacagatgaacagactcaggttgtgattgatgcaggagcactcgccgtctttcccagcctgctcaccaaccccaaaactaacattcagaaggaagctacgtggacaatgtcaaacatcacagccggccgccaggaccagatacagcaagttgtgaatcatggattagtcccattccttgtcagtgttctctctaaggcagattttaagacacaaaaggaagctgtgtgggccgtgaccaactataccagtggtggaacagttgaacagattgtgtaccttgttcactgtggcataatagaaccgttgatgaacctcttaactgcaaaagataccaagattattctggttatcctggatgccatttcaaatatctttcaggctgctgagaaactaggtgaaactgagaaacttagtataatgattgaagaatgtggaggcttagacaaaattgaagctctacaaaaccatgaaaatgagtctgtgtataaggcttcgttaagcttaattgagaagtatttctctgtagaggaagaggaagatcaaaacgttgtaccagaaactacctctgaaggctacactttccaagttcaggatggggctcctgggacctttaacttttagatcatgtagctgagacataaatttgttgtgtactacgtttggtattttgtcttattgtttctctactaagaactctttcttaaatgtggtttgttactgtagcactttttacactgaaactatacttgaacagttccaactgtacatacatactgtatgaagcttgtcctctgactaggtttctaatttctatgtggaatttcctatcttgcagcatcctgtaaataaacattcaagtccacccttaaaaaaaa

SEQ ID NO: 204 - protein, 529 aa, Homo sapien [sequence omitted]

SEQ ID NO: 205 - DNA, 526 bp, Homo sapien
atctctctcgggtggagtccttctgacagctggtgcgcctgcccgggaacatcctcctggactcaatcatggcttgtggtctggtcgccagcaacctgaatctcaaacctggagagtgccttcgagtgcgaggcgaggtggctcctgacgctaagagcttcgtgctgaacctgggcaaagacagcaacaacctgtgcctgcacttcaaccctcgcttcaacgcccacggcgacgccaacaccatcgtgtgcaacagcaaggacggcggggcctgggggaccgagcagcgggaggctgtctttcccttccagcctggaagtgttgcagaggtgtgcatcaccttcgaccaggccaacctgaccgtcaagctgccagatggatacgaattcaagttccccaaccgcctcaacctggaggccatcaactacatggcagctgacggtgacttcaagatcaaatgtgtggcctttgactgaaatcagccagcccatggcccccaataaaggcagctgcctctgctcccctg

SEQ ID NO: 206 - protein, 135 aa, Homo sapien
MACGLVASNLNLKPGECLRVRGEVAPDAKSFVLNLGKDSNNLCLHFNPRFNAHGDANTIVCNSKDGGAWGTEQREAVFPFQPGSVAEVCITFDQANLTVKLPDGYEFKFPNRLNLEAINYMAADGDFKIKCVAFD

SEQ ID NO: 207 - DNA, 1636 bp, Homo sapien
ggcacgaggcttctgtgcgctcgggctcctggtcccggctccccggttaccggggcgcgagtatgaccacaatggcggccgccaccctgctgcgcgcgacgccccacttcagcggtctcgccgccggccggaccttcctgctgcagggtctgttgcggctgctgaaagccccggcattgcctctcttgtgccgcggcctggccgtggaggccaagaagacttacgtgcgcgacaagccacatgtgaatgtgggtaccatcggccatgtggaccacgggaagaccacgctgactgcagccatcacgaagattctagctgagggaggtggggctaagttcaagaagtacgaggagattgacaatgccccggaggagcgagctcggggtatcaccatcaatgcggctcatgtggagtatagcactgccgcccgccactacgcccacacagactgcccgggtcatgcagattatgttaagaatatgatcacaggcactgcacccctcgacggctgcatcctggtggtagcagccaatgacggccccatgccccagacccgagagcacttattactggccagacagattggggtggagcatgtggtggtgtatgtgaacaaggctgacgctgtccaggactctgagatggtggaactggtggaactggagatccgggagctgctcaccgagtttggctataaaggggaggagaccccagtcatcgtaggctctgctctctgtgcccttgagggtcgggaccctgagttaggcctgaagtctgtgcagaagctactggatgctgtggacacttacatcccagtgcccgcccgggacctggagaagcctttcctgctgcctgtggaggcggtgtactccgtccctggccgtggcaccgtggtgacaggtacactagagcgtggcattttaaagaagggagacgagtgtgagctcctaggacatagcaagaacatccgcactgtggtgacaggcattgagatgttccacaagagcctggagagggccgaggccggagataacctcggggccctggtccgaggcttgaagcgggaggacttgcggcggggcctggtcatggtcaagccaggttccatcaagccccaccagaaggtggaggcccaggtttacatcctcagcaaggaggaaggtggccgccacaagccctttgtgtcccacttcatgcctgtcatgttctccctgacttgggacatggcctgtcggattatcctgcccccagagaaggagcttgccatgcccggggaggacctgaagttcaacctaatcttgcggcagccaatgatcttagagaaaggccagcgtttcaccctgcgagatggcaaccggactattggcaccggtctagtcaccaacacgctggccatgactgaggaggagaagaatatcaaatggggttgagtgtgcagatctctgctcagcttcccttgcgtttaaggcctgccctagccagggctccctcctgcttccagtaccctctcatggcataggctgcaacccagcagagggcagctagatggacatttcccctgctcggaagggttggcctgcctggctggggaggtcagtaaactttgaatagtaaaaaaaaaaaaaaaaaaaaaaaa

SEQ ID NO: 208 - protein, 452 aa, Homo sapien
MAAATLLRATPHFSGLAAGRTFLLQGLLRLLKAPALPLLCRGLAVEAKKTYVRDKPHVNVGTIGHVDHGKTTLTAAITKILAEGGGAKFKKYEEIDNAPEERARGITINAAHVEYSTAARHYAHTDCPGHADYVKNMITGTAPLDGCILVVAANDGPMPQTREHLLLARQIGVEHVVVYVNKADAVQDSEMVELVELEIRELLTEFGYKGEETPVIVGSALCALEGRDPELGLKSVQKLLDAVDTYIPVPARDLEKPFLLPVEAVYSVPGRGTVVTGTLERGILKKGDECELLGHSKNIRTVVTGIEMFHKSLERAEAGDNLGALVRGLKREDLRRGLVMVKPGSIKPHQKVEAQVYILSKEEGGRHKPFVSHFMPVMFSLTWDMACRIILPPEKELAMPGEDLKFNLILRQPMILEKGQRFTLRDGNRTIGTGLVTNTLAMTEEEKNIKWG

SEQ ID NO: 209 - DNA, 1299 bp, Homo sapien
ggcacgagggcggcggcggcggtagaggcggcggcggcggcggcagcgggctcggaggcagcggttgggctcgcggcgagcggacggggtcgagtcagtgcgttcgcgcgagttggaatcgaagcctcttaaaatggcagatgacttggacttcgagacaggagatgcaggggcctcagccaccttcccaatgcagtgctcagcattacgtaagaatggctttgtggtgctcaaaggccggccatgtaagatcgtcgagatgtctacttcgaagactggcaagcacggccacgccaaggtccatctggttggtattgacatctttactgggaagaaatatgaagatatctgcccgtcaactcataatatggatgtccccaacatcaaaaggaatgacttccagctgattggcatccaggatgggtacctatcactgctccaggacagcggggaggtacgagaggaccttcgtctccctgagggagaccttggcaaggagattgagcagaagtacgactgtggagaagagatcctgatcacggtgctgtctgccatgacagaggaggcagctgttgcaatcaaggccatggcaaaataactggctcccaggatggcggtggtggcagcagtgatcctctgaacctgcagaggccccctccccgagcctggcctggctctggcccggtcctaagctggactcctcctacacaatttatttgacgttttattttggttttccccaccccctcaatctgtcggggagcccctgcccttcacctagctcccttggccaggagcgagcgaagctgtggccttggtgaagctgccctcctcttctcccctcacactacagccctggtgggggagaagggggtgggtgctgcttgtggtttagtcttttttttttttttttttttttttttaaattcaatctggaatcagaaagcggtggattctggcaaatggtccttgtgccctccccactcatccctggtctggtcccctgttgcccatagccctttaccctgagcaccaccccaacagactggggaccagccccctcgcctgcctgtgtctctccccaaacccctttagatggggagggaagaggaggagaggggaggggacctgccccctcctcaggcatctgggagggccctgcccccatgggctttacccttccctgcgggctctctccccgacacatttgttaaaatcaaacctgaataaaactacaagtttaatatgaaaaaaaaaaaaaaaaaaaaaaaaaaaaaaaaaaaaaaaaaaaaaaaaaaa

SEQ ID NO: 210 - protein, 154 aa, Homo sapien
MADDLDFETGDAGASATFPMQCSALRKNGFVVLKGRPCKIVEMSTSKTGKHGHAKVHLVGIDIFTGKKYEDICPSTHNMDVPNIKRNDFQLIGIQDGYLSLLQDSGEVREDLRLPEGDLGKEIEQKYDCGEEILITVLSAMTEEAAVAIKAMAK

SEQ ID NO: 211 - DNA, 2937 bp, Homo sapien
gggttgcgccagggagccggaaagccgactcccgaagttggggtcctgggaaaacttgggtcctgggttgactgagaagcggcggggaaaggaggcgggccaggaggagggggcctggcggacgccggccggggggcggggcgcggcggggctgtcggtcacgcccctcagtccgccccgccccgccccgcctgccggggaagggccacgttgcccggcccggccgtccggccccggcgcgccgcagaaagggctggcgagtcgaaaggcgaggcggccgcggcagcgcttgggacgcgcctgggcaccgggctcgctccctgcgccccggagcaggccaagttcggggccaggacgtcgggaggacctggtgcatggctgcctcctaatcccatagtccagaggaggcatccctaggactgcgggcaagggagccgggcaagcccagggcagccttgaaccgtcccctggcctgccctccccggtgggggccaggatgctgaagaagcagtctgcagggcttgtgctgtggggcgctatcctctttgtggcctggaatgccctgctgctcctcttcttctggacgcgcccagcacctggcaggccaccctcagtcagcgctctcgatggcgaccccgccagcctcacccgggaagtgattcgcctggcccaagacgccgaggtggagctggagcggcagcgtgggctgctgcagcagatcggggatgccctgtcgagccagcgggggagggtgcccaccgcggcccctcccgcccagccgcgtgtgcctgtgacccccgcgccggcggtgattcccatcctggtcatcgcctgtgaccgcagcactgttcggcgctgcctggacaagctgctgcattatcggccctcggctgagctcttccccatcatcgttagccaggactgcgggcacgaggagacggcccaggccatcgcctcctacggcagcgcggtcacgcacatccggcagcccgacctgagcagcattgcggtgccgccggaccaccgcaagttccagggctactacaagatcgcgcgccactaccgctgggcgctgggccaggtcttccggcagtttcgcttccccgcggccgtggtggtggaggatgacctggaggtggccccggacttcttcgagtactttcgggccacctatccgctgctgaaggccgacccctccctgtggtgcgtctcggcctggaatgacaacggcaaggagcagatggtggacgccagcaggcctgagctgctctaccgcaccgactttttccctggcctgggctggctgctgttggccgagctctgggctgagctggagcccaagtggccaaaggccttctgggacgactggatgcggcggccggagcagcggcaggggcgggcctgcatacgccctgagatctcaagaacgatgacctttggccgcaagggtgtgagccacgggcagttctttgaccagcacctcaagtttatcaagctgaaccagcagtttgtgcacttcacccagctggacctgtcttacctgcagcgggaggcctatgaccgagatttcctcgcccgcgtctacggtgctccccagctgcaggtggagaaagtgaggaccaatgaccggaaggagctgggggaggtgcgggtgcagtatacgggcagggacagcttcaaggctttcgccaaggctctgggtgtcatggatgaccttaagtcgggggttccgagagctggctaccggggtattgtcaccttccagttccggggccgccgtgtccacctggcgcccccaccgacgtgggagggctatgatcctagctggaattagcacctgcctgtccttcctgggcccctccttgccacatcatgagctgaggtgggaccacagtccccaggctgcatcggcctgcctgtgtttccctcttaggtgcatttatctttttgatttttccgagtggcatttaagtgcacaaatgataacaagaggattattctcccgttctcaagggagtcagatcaggggaactattctagggtatgttgcggggtattaagcaggaaaccactgtgtggtggggggcactgggcttgttggggccagaaatgtccacgtcctgagctttctcctggagcatgtgcagagagtttggcaacgttcgctctcttgaccagaccccttctccctgacctggctcttccagccagggcacgagccctccttctatacctgctccccttcccccagtggggactgagttatgggagaaggggacatatttgtggccaaaatgatactaaccaaaggggcttccttgtcagggcctggtggagttggtgggtcatcggggctcactgcctcctgcccttctctcctgtctgacccccacttagcccttctctccttgcagcctagcagtttatagttctgagatggaaagttgaagggggcaagcaagacctctcctcagcccatgcccagctgtcaggagagaggtgcagggaggaaggccttgtgctgggacaacctctctcttgccttacctcagagagggactatgccctgacccctcctttctgaaaatcagtgccctccctgttgctctaggaggctcctgctggcttggtagaagacagaattcgatctgcctgtccctttttcccctggggtttgacacacaggctcctctcagcatgaggtggagcagtgaccaggtggagcagtgaccaggacgcctctggcccagtgctgcccagcctccccgcccgctcccaggcgccccatgtcctcacaggccaggacgccatggcaggatggagaggacttggtggatttttgtttcttgcctgacctcagtttcatgaaagaaagtggaagctacagaattattttctaaaataaaggctgaattgtctgaaaaaaaaaaaaaaaaa

SEQ ID NO: 212 - protein, 445 aa, Homo sapien
MLKKQSAGLVLWGAILFVAWNALLLLFFWTRPAPGRPPSVSALDGDPASLTREVIRLAQDAEVELERQRGLLQQIGDALSSQRGRVPTAAPPAQPRVPVTPAPAVIPILVIACDRSTVRRCLDKLLHYRPSAELFPIIVSQDCGHEETAQAIASYGSAVTHIRQPDLSSIAVPPDHRKFQGYYKIARHYRWALGQVFRQFRFPAAVVVEDDLEVAPDFFEYFRATYPLLKADPSLWCVSAWNDNGKEQMVDASRPELLYRTDFFPGLGWLLLAELWAELEPKWPKAFWDDWMRRPEQRQGRACIRPEISRTMTFGRKGVSHGQFFDQHLKFIKLNQQFVHFTQLDLSYLQREAYDRDFLARVYGAPQLQVEKVRTNDRKELGEVRVQYTGRDSFKAFAKALGVMDDLKSGVPRAGYRGIVTFQFRGRRVHLAPPPTWEGYDPSWN

SEQ ID NO: 213 - DNA, 2220 bp, Homo sapien
ggaaaattacccggtatcgttagagctacaccaaaattgcattgagccaaacttgccaccaagagcccaacaatcaccatgatgctgagcacggaaggcagggaggggttcgtggtgaaggtcaggggcctaccctggtcctgctcagccgatgaagtgatgcgcttcttctctgattgcaagatccaaaatggcacatcaggtattcgtttcatctacaccagagaaggcagaccaagtggtgaagcatttgttgaacttgaatctgaagaggaagtgaaattggctttgaagaaggacagagaaaccatgggacacagatacgttgaagtattcaagtctaacagtgttgaaatggattgggtgttgaagcatacaggtccgaatagccctgatactgccaacgatggcttcgtccggcttagaggactcccatttggctgtagcaaggaagagattgttcagttcttttcagggttggaaattgtgccaaatgggatgacactgccagtggactttcaggggcgaagcacaggggaagcctttgtgcagtttgcttcacaggagatagctgagaaggccttaaagaaacacaaggaaagaatagggcacaggtacattgagatcttcaagagtagccgagctgaagttcgaacccactatgatccccctcgaaagctcatggctatgcagcggccaggtccctatgataggccgggggctggcagagggtataatagcattggcagaggagctgggtttgaaaggatgaggcgtggtgcctatggtggagggtatggaggctatgatgactatggtggctataatgatggatatggctttgggtctgatagatttggaagagacctcaattactgtttttcaggaatgtctgatcatagatacggagatggtgggtccagtttccagagcaccacagggcactgtgtacacatgagggggttaccttacagagccactgagaatgatatttataatttcttctcacctcttaatcccatgagagtacatattgaaattggacccgatggcagagttaccggtgaggcagatgttgaatttgctactcatgaagatgctgtggcagctatggcaaaagacaaagctaatatgcaacacagatatgtggagctcttcttaaattctactgcaggaacaagtgggggtgcttacgatcacagctatgtagaactttttttgaattctacagcaggggcaagtggtggcgcttatggtagccaaatgatgggagggatgggcttatccaaccagtctagttatggaggtcctgctagccagcagctgagtggtggttatggaggtggttatggtggtcagagcagtatgagtggatatgaccaagttctgcaggaaaactccagtgactatcagtcaaaccttgcttaggtagagaaggagcactaaatagctactccagatataaaagctgtacatttgtgggagttgaatagaatgggagggatgtttagtatatccagtatgattggtaaatgggaaatataattgattctgatcactcttggtcagcttctctttctttatctttctttctccttttttaagaaaacgagttaagtttaacagttttgcattacaggcttgtgattcatgcttactgtaaagtggaagttgagattattttaaaacttcaagctcagtaattttgaacactgaaacattcatctaggacataataacaaagttcagtattgaccataactgttaaaacaatttttagctttcctcaagttagttatgttgtaggagtgtacctaagcagtaagcgtatttaggttaatgcagtttcacttatgttaaatgttgctcttataccacaaatacattgaaaacttcggatgcatgttgagaaacatgcctttctgtaaaactcaaatataggagctgtgtctacgattcaaagtgaaaacatttggcatgtttgttaattctagctttttggtttaatatcctgtaaggcacgtgagtgtacactttttttttttttaaggatacgggacaattttaagatgtaataccaatactttagaagtttggtcgtgtcgtttgtatgaaaatctgaggctttggtttaaatctttccttgtattgtgatttccatttagatgtattgtactaagtgaaacttgttaaataaatcttccttttaaaaactggaaa

SEQ ID NO: 214 - protein, 449 aa, Homo sapien
MMLSTEGREGFVVKVRGLPWSCSADEVMRFFSDCKIQNGTSGIRFIYTREGRPSGEAFVELESEEEVKLALKKDRETMGHRYVEVFKSNSVEMDWVLKHTGPNSPDTANDGFVRLRGLPFGCSKEEIVQFFSGLEIVPNGMTLPVDFQGRSTGEAFVQFASQEIAEKALKKHKERIGHRYIEIFKSSRAEVRTHYDPPRKLMAMQRPGPYDRPGAGRGYNSIGRGAGFERMRRGAYGGGYGGYDDYGGYNDGYGFGSDRFGRDLNYCFSGMSDHRYGDGGSSFQSTTGHCVHMRGLPYRATENDIYNFFSPLNPMRVHIEIGPDGRVTGEADVEFATHEDAVAAMAKDKANMQHRYVELFLNSTAGTSGGAYDHSYVELFLNSTAGASGGAYGSQMMGGMGLSNQSSYGGPASQQLSGGYGGGYGGQSSMSGYDQVLQENSSDYQSNLA

SEQ ID NO: 215 - DNA, 4765 bp, Homo sapien
gttctcgctccggagccgctgcacatttcggaatcttctgcggcttgtccatagtgtgaataaaaactaaatcacatctataattctactgaactggtcatacagacgctgccatatatgtcacagtacactgaaaaggagccagcagcaatggaccaagaatctggtaaggctgtctggcccaaaccagcaggagggtatcagacaattacaggcaggagatatggaagaagacatgcttatgtcagttttaaaccatgtatgaccagacatgaaagaagcttaggtcgggctggtgatgactatgaagtgttggaactagatgatgttccaaaggaaaattcctcaggttccagtcctttggatcaagttgattcttctttacccagtgaacctatatttgaaaaaagtgaaacagaaattcccacttgtggttcagcattgaatcaaaccactgagagcagtcaatcctttgttgcagtacatcacagtgaggaaggcagggataccttaggaagcagtacaaatcttcataatcactctgagggagagtatattccaggagcttgtagtgcttcaagtgtccaaaatggaattgcattggttcatacagactcttatgatccagatggcaaacatggagaagataatgaccatcttcaactttctgcagaagtcgtggaaggtagtagataccaggaatcattaggcaatacagtatttgagttggaaaacagagaggcagaggcatacactggtctttcaccaccagttccctcatttaactgtgaagtaagagatgagtttgaagagttagattctgtaccattagtgaaaagttctgctggtgatactgagtttgtccatcagaatagccaggaaattcagaggtcttctcaagatgaaatggttagtacgaaacaacaaaataatactagccaggaaagacagacagaacattcacctgaagatgcagcctgtggtccagggcatatttgtagtgaacgaaataccaatgatagggaaaagaaccatggaagttctcctgaacaggtagtgaggccaaaagttagaaaactgataagttcaagccaggtggaccaagaaacaggttttaataggcatgaggcgaaacaaagaagtgttcaaagatggagagaggctttggaagttgaggaaagtggctcagatgacctcttaataaaatgtgaagaatatgatggagagcatgactgtatgttcttggatccaccatactcaagagttattacacaaagggaaacagaaaataaccaaatgacatcagaaagtggagccacagcgggaaggcaagaagtggataacaccttttggaatggctgtggagattattaccaactctatgacaaagatgaagatagttctgaatgcagtgatggggaatggtctgcttctttgcctcatcgattttctggtacagaaaaagatcaatcctcaagtgatgaaagctgggagactctgccaggaaaagatgagaatgaacctgagctacaaagtgatagcagtggccctgaagaagaaaaccaagaattatctcttcaggaaggggaacagacatccttggaagagggagaaattccttggttacagtacaatgaagtcaatgaaagcagcagtgatgagggaaatgaacctgccaatgaatttgcacagccagctttcatgttggatggtaacaataacctggaggatgactccagtgtgagtgaagacttagatgtggattggagcctatttgatggctttgcagatggactaggagttgctgaagctatttcatatgtggatcctcagttccttacctacatggcactagaagaacgcttagcccaggctatggagactgctctggcccatttagagtctcttgcagtggatgttgaggtggccaatccaccagctagtaaggaaagcattgatggtcttccagagacccttgttcttgaagatcacactgctattggtcaggaacaatgctgtccaatctgttgcagtgagtatattaaggatgatatagcaacagagttgccctgtcaccatttctttcacaaaccttgtgtctcaatttggctacaaaagtcgggaacatgccctgtgtgccgccgtcatttcccacctgcggttattgaagcatctgcagctccttcctctgagcctgatcctgatgccccaccttcaaatgacagtattgcagaagcaccctaaaccttgacagttgaaatgagatcagtgtatcaaagtaaatctgcaaattccttctaaatttcatgtgcaaataattatatataaatatatttaaaaatgctatatatagtatatgccatagtttagaaagaatattaacctttctaaactaaatttaggtttgcagaaagtattaaacatttttaagctgaatgttgagacagtgcatccattttctttagttgaatatgtttgtattaattgtaaagccaagcttatcagttgactctctccagaataaataatcatctgtgtggcatacgttattggctttgtctgtaatactgccactaagtgattataattaagctgtcctgtttgcatcaaatgtaaagactgtgttcacaaccgtagtaaaatttggtttcattggaaatgaaacaaattctaaagtatgctttttcactagtccctttgattttgctatatcataacctcttggttcatatgctgagaaatttttcagaaagtccatttttgtttaaaattagaacttttcagaatgccaaatgaaggctaaaattttggccagaacattacaaaagttttaaatcgtagacgtaactccccctgaaataaagttaggtagtaaaatccttaatgaaaccagtggatgtgcttaacgtaaggttagtaaagcatacaaagaatctagtgtgctcagggcttggtacaatgagctgaattagatggccttatgaaactctttctaacctcttacccaacctgtttctccttggttaaaattatacttgaaggcccagaacactcatggcacatttgtttaatattgcttatagttagtttaaggtaattttgcttctacagtattttggaaggtctgaaaacttgcacagggtcatctttgtaattatataaccccaaactaagatgcacaatgtctccttcaggtgatcacacacagtggacgagtatgtgcaaacatggacataatagttcacttacaaatgtgatttgatgttaacactagagaatgatgactgtagaacatttgagcaagtaaaatagtaaagcacatagtgagtgtatgtccgtctaactggtacattgataatttagtttgggcacataaaaggaatatttatatggcttcccaaatgcagagttacatcttattcgtgtatttctctgagtatttatatcccgtctccttttttcattcttaaaaataaatgaattttcactgttggcacatatgaggcttaaatataaggaacataacacttgcattctaatttttgcatatattgtaaatgtgtctggtatttacagcaaaatactgtgtatccttttatgggtaaaacaaaagtgaacattgcatgcatgtaatgtgatgaatttgtaatttaggagttctttggggcttctgtgacttgggaaatgcttacattcaggccttaatgttgcattagctagcatgttttccctctgatgtatatagtcactgttgtataaactaatctttgcttgttttctactctgtgatctttccatatcatatttcattaatgatcagttagtgtcaaggagtcaaaacagattaaaattaatttcatgtgtatatggtggaaatttgtggctagtgtgatttttgtttgtttccttttaagtactgttgatcagttgtgacacttactggttaaacttacgttgctaaagatttctctataataagccacacattatatttagactatattaagggaccttggttttcttctagatagcagctgtcccaaagaaaatatttcttctttgtctgttaagatttagctattatctgccagttgttaagaggttttggttccaaactcaaccagcaatgttgagagctgaacttaagatagctgttgtactttttgctttccatctgttactgtccttcattcttggctccctactatctataaacagctgctgtgaagaagaaaagttgaataagagttggcttaaattttaaaaaagaaaaagaaaattgaggttttaggattttcatggtaacaagctctggtataagctaaggctggcaagttcagatactaaaatattatttgatcatatcttggatccttttgaaaaagttaagactatatgaaggtaaattagaaataagtatgaatattaataaaatagcatttatcttatttctctattttatgttgtgacttaacctaattttatttttttaacattttcttatttcttataatatgaatgctgatatttaaaggtagatctatgtggtattctttgtgtttcttaattgtttaactcttaagattatttgtgatctggatttatgtatttgttagatacatacgaattgttaaaatggaatgcaagtttttcaaaagcccaggtctaaatgtaatggttggtttattgttctataaccccagcccatcattttctgtgtaaatcataaacaataaacagaatatactcggtggtcatttctaat

SEQ ID NO: 216 - protein, 708 aa, Homo sapien [sequence omitted]

SEQ ID NO: 217 - DNA, 2992 bp, Homo sapien
ggcacgaggggcggccggtgagggggaagcaagtctggtctctgtgattgaagaagtcggctctgggctccagtgcgggaatcacacacatacctcagaatgccgggtctaagttgtagattttatcaacacaaatttcctgaggtggaagatgtagtgatggtgaatgtcagatccattgctgaaatgggggcttatgtcagcttgctggaatacaacaacattgaaggcatgattcttcttagtgaattatccagaaggcgtatccgttctatcaacaaactcatccgaattggcaggaatgagtgtgtggttgtcattagggtggacaaagaaaaaggatatattgatttgtcaaaaagaagagtttctccagaggaagcaatcaaatgtgaagacaaattcacaaaatccaaaactgtttatagcattcttcgtcatgttgctgaggtgttagaatacaccaaggatgagcagctggaaagcctattccagaggactgcctgggtctttgatgacaagtacaagagacctggatatggtgcctatgatgcatttaagcatgcagtctcagacccatctattttggatagtttagatttgaatgaagatgaacgggaagtactcattaataatattaataggcgcttgaccccacaggctgtcaaaattcgagcagatattgaagtggcttgttatggttatgaaggcattgatgctgtaaaagaagccctaagagcaggtttgaattgttctacagaaaacatgcccattaagattaatctaatagctcctcctcggtatgtaatgactacgacaaccctggagagaacagaaggcctttctgtcctcagtcaagctatggctgttatcaaagagaagattgaggaaaagaggggtgtgttcaatgttcaaatggagcccaaagtggtcacagatacagatgagactgaacttgcgaggcagatggagaggcttgaaagagaaaatgccgaagtggatggagatgatgatgcagaagaaatggaagccaaagctgaagattaactttgtgggaaacagagtccaatttaaggaacacagagcagcgcttcctggctgtaaatcctagacttgaaagttttccagtattgaaaacttcaaagctgaatattttttatttctaagtatttaaatgttctaacagatcagaacatgaaatgccctcctaaatgtcagctgttgtcacacagtagctccaacactttgagcatttttaagggagtggcctcatttcactagagacaaatctttaagaatagttctaaaattgggcttgtgatttccatttctgatgtctccagattggcacccctttctagttcaatgcctcacgagatttgccaggggcatccaaggcaaacaatcccaatctttctatataaaatgtattcaagcaaacatcaaataaatttctgggatatttaactataggcttcttccttcttgtcaccagttaaaagcattttaatactaagaccctaattcttttatctttattttagtcttgatgtggaactgtaggagcaggtgaataaaggatctctataacagatcctttcaaaagaagagttttagagaaaataaatttaactttaaccacagtgaaagttgacccttagcgggacaaagccttaaaatgcattgaaagaattagatcggttctgtgccttttatctatttgagattgatgacaacctgtgtgagagaatttatcacaccacgtccttattggaataataagctacttgccttgagtttataattcagggtggtaaagtatgtttttaaattttaaaaagcagctgcattttttatttagttggaatatcacccaattttttatttttattgctattaaaatatccactagatgccacctagagctccagttctttataacaaaacagggatctgtttgaacacttactgttgtttttttttttttacatgtttccatcatttctgtctttaagaactaattcgtacataataagtttcataggtaacacattatattctcttatgatacttgaggtaccagttgtatttaattttattcattatccctagatagctattaagatacttagattagacctaacccaccatagtcaatccaagactagactactcaatattaaagggtctggaaaatagaagagtgtgttgggcaggtagtttgtaccatttatgaaggtttgttcctttgttaaatttagcagcctgtactagcttttgaaatccagaagttttaacttccagtggctggtttctgagagagtgccatgattgctagccagcattccatattgggaatatgtagaggagaacctggatgtacttaagagtggcatataattttcacttctgtctgttgaggcaaaaaaaaaacaagtttagaaagctggcaacatgaagaatgcattcaaaatataacaggtgcttctttgttgtacgcagaggaattttttcttttgattttgtttactgaaatttgttatacttcaaaagccataacttgaaaaatactggtggcgtcgatggtgagtgatttttatcccacgtgggccttttgctcagttccatggcaattttgtaaattgaccctagccagagaatagatcagtatttcactgataccacgaggaaaagaacaaacaaaacttaaaagtattcatacaccttgctaacctaaaagacagcagggacaagatacatatgaggacaaggtatacacccagttctgaataacttgaagaacaggcttggcaaagaagtaagtttatccaaatcttgaatttctgccaggcatggtagctcatgcctgtaaccctggcacttaaggggccaaggcaggaggatcacttgaggccagtgagctgtgatcactccagtgcactcgagcctgggtgacagggcaagaccctgtctcaaaaaaaaaaaaaaaaaa

SEQ ID NO: 218 - protein, 315 aa, Homo sapien
MPGLSCRFYQHKFPEVEDVVMVNVRSIAEMGAYVSLLEYNNIEGMILLSELSRRRIRSINKLIRIGRNECVVVIRVDKEKGYIDLSKRRVSPEEAIKCEDKFTKSKTVYSILRHVAEVLEYTKDEQLESLFQRTAWVFDDKYKRPGYGAYDAFKHAVSDPSILDSLDLNEDEREVLINNINRRLTPQAVKIRADIEVACYGYEGIDAVKEALRAGLNCSTENMPIKINLIAPPRYVMTTTTLERTEGLSVLSQAMAVIKEKIEEKRGVFNVQMEPKVVTDTDETELARQMERLERENAEVDGDDDAEEMEAKAED

SEQ ID NO: 219 - DNA, 1449 bp, Homo sapien
cttttcctgtggcagcagccgggctgagaggagcgtggctgtctcctctctccgccatggcgtgtgctcgcccactgatatcggtgtactccgaaaagggggagtcatctggcaaaaatgtcactttgcctgctgtattcaaggctcctattcgaccagatattgtgaactttgttcacaccaacttgcgcaaaaacaacagacagccctatgctgtcagtgaattagcaggtcatcagactagtgctgagtcttggggtactggcagagctgtggctcgaattcccagagttcgaggtggtgggactcaccgctctggccagggtgcttttggaaacatgtgtcgtggaggccgaatgtttgcaccaaccaaaacctggcgccgttggcatcgtagagtgaacacaacccaaaaacgatacgccatctgttctgccctggctgcctcagccctaccagcactggtcatgtctaaaggtcatcgtattgaggaagttcctgaacttcctttggtagttgaagataaagttgaaggctacaagaagaccaaggaagctgttttgctccttaagaaacttaaagcctggaatgatatcaaaaaggtctatgcctctcagcgaatgagagctggcaaaggcaaaatgagaaaccgtcgccgtatccagcgcaggggcccgtgcatcatctataatgaggataatggtatcatcaaggccttcagaaacatccctggaattactctgcttaatgtaagcaagctgaacattttgaagcttgctcctggtgggcatgtgggacgtttctgcatttggactgaaagtgctttccggaagttagatgaattgtacggcacttggcgtaaagccgcttccctcaagagtaactacaatcttcccatgcacaagatgattaatacagatcttagcagaatcttgaaaagcccagagatccaaagagcccttcgagcaccacgcaagaagatccatcgcagagtcctaaagaagaacccactgaaaaacttgagaatcatgttgaagctaaacccatatgcaaagaccatgcgccggaacaccattcttcgccaggccaggaatcacaagctccgggtggataaggcagctgctgcagcagcggcactacaagccaaatcagatgagaaggcggcggttgcaggcaagaagcctgtggtaggtaagaaaggaaagaaggctgctgttggtgttaagaagcagaagaagcctctggtgggaaaaaaggcagcagctaccaagaaaccagcccctgaaaagaagcctgcagagaagaaacctactacagaggagaagaagcctgctgcataaactcttaaatttgattattccataaaggtcaaatcattttggacagcttcttttgaataaagacctgattatacaggcagtgagaaacatgaaaaaaaaaaaaaaaaaa

SEQ ID NO: 220 - protein, 427 aa, Homo sapien [sequence omitted]

SEQ ID NO: 221 - DNA, 4912 bp, Homo sapien
ggcacgaggctgctctcgcaactcaagatggcggacgagagtgagacagcagtgaagccgccggcacctccgctgccgcagatgatggaagggaacgggaacggccatgagcactgcagcgattgcgagaatgaggaggacaacagctacaaccggggtggtttgagtccagccaatgacactggagccaaaaagaagaaaaagaaacaaaaaaagaagaaagaaaaaggcagtgagacagattcagcccaggatcagcctgtgaagatgaactctttgccagcagagaggatccaggaaatacagaaggccattgagctgttctcagtgggtcagggacctgccaaaaccatggaggaggctagcaagcgaagctaccagttctgggatacgcagcccgtccccaagctgggcgaagtggtgaacacccatggccccgtggagcctgacaaggacaatatccgccaggagccctacaccctgccccagggcttcacctgggatgctttggacttgggcgatcgtggtgtgctaaaagaactgtacaccctcctgaatgagaactatgtggaagatgatgacaacatgttccgatttgattattccccggagtttcttttgtgggctctccggccacccggctggctcccccagtggcactgtggggttcgagtggtctcaagtcggaaattggttgggttcattagcgccatcccagcaaacatccatatctatgacacagagaagaagatggtagagatcaacttcctgtgtgtccacaagaagctgcgttccaagagggttgctccagttctgatccgagagatcaccaggcgggttcacctggagggcatcttccaagcagtttacactgccggggtggtactaccaaagcccgttggcacctgcaggtattggcatcggtccctaaacccacggaagctgattgaagtgaagttctcccacctgagcagaaatatgaccatgcagcgcaccatgaagctctaccgactgccagagactcccaagacagctgggctgcgaccaatggaaacaaaggacattccagtagtgcaccagctcctcaccaggtacttgaagcaatttcaccttacgcccgtcatgagccaggaggaggtggagcactggttctacccccaggagaatatcatcgacactttcgtggtggagaacgcaaacggagaggtgacagatttcctgagcttttatacgctgccctccaccatcatgaaccatccaacccacaagagtctcaaagctgcttattctttctacaacgttcacacccagacccctcttctagacctcatgagcgacgcccttgtcctcgccaaaatgaaagggtttgatgtgttcaatgcactggatctcatggagaacaaaaccttcctggagaagctcaagtttggcataggggacggcaacctgcagtattacctttacaattggaaatgccccagcatgggggcagagaaggttggactggtgctacaataaccagtcaccagtgcgattctggataaagccactgaaaattcgaaccaggaaatggaaccccaccactgttggtccaattttcacacacgtgagaatccctggcaaagggagcagaactgaaccggctttaccaaaccgccagcgaacttgacaattgtattgcgatggcgtgggctgcgtgacgtcacctccggtcgtgtctctggtctccgtgttttccagttaattacatcctcatgcagccgtgatcaagggaatgtaactgctgaaaactagctcgtgattggcatataatggagttaacgggtgaataataaaagtatatatatatattatatatatataaatattttaaatatctttcatgttccaaatgtacaaggatgtttggtctttaatgaaaagctgaatctagatcattcctcagaatgaggacccgaggacagtggcagacagacgcgttggcacagttcatggtttcctccagaggagacattggcttatcatggggaaaaagaggatctggagaacctcatccagctccccttctgaatcagctgggatgactggctttgagaaggaagggaagatggaacaggctcagatctcatgggatagcacgtggagctcttggctggggctgaccctgggcagggactttcctgcagggccagacctgcctgcattctgagacaaagcaatggacggtccgcagaagcagacctcattgattgagtcctttcttccatccccttggcctgctccctgtaggaagtcatcctgccaactgatttaaaagggctctttagccagttgttgccaaccttatagggatgagtcccctgtgagattttgcttttccactgcctgggatgatgcagtttgaagaggcccttggacctccttgtaacatcagggacctttggagaccattatcagtgtaagccctgcttagctcatcttagagcaaagagccagcaccctgatgtccctggggtggctaggcaggagtggcgtggggccaatacccagaccccttcagccaccagcccctggcctgtgccttccaacccattagccatttcttgttgtgcccctttccaagatacagcctgcaagtggtagcaagaagtgattagaggcagatctggacttggcaacagaagtggtttcccatctccattgtctgagtctgattttcgctgatgctgttttgtggatttttgtggtagtgatggttgtcagtgctgccagtttcccaaaacgtaatcaagcctctggtcacatggctgtcgatgtaggcattctggagtggtgttcagccaagtgaccgggcaaaattgggctgtgaaattgtacttccaggcttggatgtaatttttgctctagagagaagcaagtggtgggaaggaggtagcatgacgtgtggtgtgcgggtttccttgctgccgtcacctctccgctcatacaggaatgaagccttagccaggaggccaggctcagccctgtgccactcaccgaagccactttctacaggccagcaggggcttgttgcaggctgtgggttttggtgtggtttgtcagaggctaattctgcagagtttccaaaaccagaagacatcgtatgcttgggatgggggccgtgccacccgtgggaatgctgcccgctctgcagactgctgctagagccagcaactccactaaggtggattttcatcaggggcctgcagggccctcccttttcccattgttcctgcgctgcaaattgcaggccccagcaatcgtgactgacgtttgctccttgactccaagaaactgagaccaaagaagctgctgttcttagcaagatgcgcactgcattccacaggtgggaggagtcggagaggcaggggcttgctttgcagccccacagacaacagttgcacagtgcctcaagccccagagtggctcaccctgtccagacctttgaggatatcaaaggacaaagtgcccaagtctttcctaccttgggggaacctggaacttggaaaggctccctgtcctagtcttgatctgttctgggccaggtcccagcttgagctgcctctgagatttgggctgtgcggatctctggagtgagctctgtttcggttgacccaggtcatggaatggaaacggtgaggccccagtggctgttctggaagaaacagatctcctggcaaaggccccagcatctccctcactgaaaccaggtggccggctcctcggactctgctttatgttgcggtgagaactctgcccaggtgtgcagggtttggcttgtgggctgcttgctgctcatctgatttttgtcccagtagtccctgcgttcttcattcaaccccttctgggacttcagctcagagagcaccatcccgggggtcagggcctccccacaggagccctgcagtgtggtagcgccatggctgtctcaaaccaagcaaaggaaggaccctgaggccttcacgctaaccatcctcgagcaactgctgttggaaggcctccctgggcctggcccccaccctctgccacccagtcctcccagctgccatgtttcaaagacgacctttacctcctgcctttggattgactctgcatttgaccacggactccagtctgtgtgtagggagagagctgagtaggaggcctccactccggatcgaggcctgtatagggctcgtttccccacacatgcctatttctgaagaggcttctgtcttatttgaaggccagcccacacccagctactttaacaccaggtttatggaaaatgtcaggccttccccacaactcctgtctaactgctgtcgcccccctacttgctggctctcagaagcctaggggagtccctgtggtcctgaattctttccccaaagacgaccagcatttaaccaacctaagggcccaaaggccttggacaactgcatggagctgcactctaggagaaggaggggaaccagatgttagatcaggggagggagcaggagtgtccctcccgtcagtgcctacccacctgtgaggcagccttctgatggcctggcccaccttccccagaaccaggggaggcctgaggcttcagttttactctgctgcaaaatgaaggcgggcctgcaagccgactacacctacggaggctgttgaggacaatttcattccattaaattaaaaaatactgactggctggcaggcaggtgccatgtctgggaacagggacgggggagcttcacctttttgtcttggcttttctttgggctgtgggggggcatccatttccagggtcggggaggaaataccaaatgcattgttgttctgctcaatacatctcacttgtttctaataaagaaagcagctgaacaaaaaaaaaaaaaaaaaaaaa

SEQ ID NO: 222 - protein, 496 aa, Homo sapien
MADESETAVKPPAPPLPQMMEGNGNGHEHCSDCENEEDNSYNRGGLSPANDTGAKKKKKKQKKKKEKGSETDSAQDQPVKMNSLPAERIQEIQKAIELFSVGQGPAKTMEEASKRSYQFWDTQPVPKLGEVVNTHGPVEPDKDNIRQEPYTLPQGFTWDALDLGDRGVLKELYTLLNENYVEDDDNMFRFDYSPEFLLWALRPPGWLPQWHCGVRVVSSRKLVGFISAIPANIHIYDTEKKMVEINFLCVHKKLRSKRVAPVLIREITRRVHLEGIFQAVYTAGVVLPKPVGTCRYWHRSLNPRKLIEVKFSHLSRNMTMQRTMKLYRLPETPKTAGLRPMETKDIPVVHQLLTRYLKQFHLTPVMSQEEVEHWFYPQENIIDTFVVENANGEVTDFLSFYTLPSTIMNHPTHKSLKAAYSFYNVHTQTPLLDLMSDALVLAKMKGFDVFNALDLMENKTFLEKLKFGIGDGNLQYYLYNWKCPSMGAEKVGLVLQ

SEQ ID NO: 223 - DNA, 1931 bp, Homo sapien
gcccaagagcgagcgcgcagcacgaagctcgagccgcctccgccgcgcgaccccacctcggccgccgccgcctgcgccgcgagatccgccccggcctccccgagagcgagccccggccgccgcgaccaccagccgcgctaaccgccgaccaaccgccaccgaggcgcctgagcgagagcagaggaggaggaggcatgagtgaggcgggcgaggccaccaccaccaccaccaccaccctcccgcaggctccgacggaggcggccgccgcggctccccaggaccccgcgcccaagagcccggtgggcagcggtgcgccccaggccgcggccccggcgcccgccgcccacgtcgcaggaaaccccggtggggacgcggcccccgcagccacgggcaccgcggccgccgcctctttagccgccgccgccggcagcgaagacgcggagaaaaaagttctcgccaccaaagtccttggcactgtcaaatggttcaacgtcagaaatggatatggatttataaatcgaaatgacaccaaagaagatgtatttgtacatcagactgccatcaagaagaataacccacggaaatatctgcgcagtgtaggagatggagaaactgtagagtttgatgtggttgaaggagagaagggtgcagaagctgccaatgtgactggcccggatggagttcctgtggaagggagtcgttacgctgcagatcggcgccgttacagacgtggctactatggaaggcgccgtggccctccccggaattacgctggggaggaggaggaggaagggagcggcagcagtgaaggatttgacccccctgccactgataggcagttctctggggcccggaatcagctgcgccgcccccagtatcgccctcagtaccggcagcggcggttcccgccttaccacgtgggacagacctttgaccgtcgctcacgggtcttaccccatcccaacagaatacaggctggtgagattggagagatgaaggatggagtcccagagggagcacaacttcagggaccggttcatcgaaatccaacttaccgcccaaggtaccgtagcaggggacctcctcgcccacgacctgccccagcagttggagaggctgaagataaagaaaatcagcaagccaccagtggtccaaaccagccgtctgttcgccgtggatatcggcgtccctacaattaccggcgtcgcccgcgtcctcctaacgctccttcacaagatggcaaagaggccaaggcaggtgaagcaccaactgagaaccctgctccacccacccagcagagcagtgctgagtaacaccaggctcctcaggcaccttcaccatcggcaggtgacctaaagaattaatgaccattcagaaataaagcaaaaagcaggccacaaccttaaccaacaccaaagaaacatccaagcaataaagtggaagactaaccaagatttggacattggaatgtttactgttattctttaagaaacatctacaaaaagaaaatgtcaacaaatttttccagcaagctgagaacctgggaattcctgcacggaagacaagagagtagcctctccagtttcagcaaccgctaggtttctattttttttcctggtttttactgttttggtaatatatatattgaaacaagaaatattaataccacatggggagaaccccaaccaaagaaatctgaaatatatagtaaatgcttttttttccgtttttgttcattttggatgctggtgctaaacctccaagtgtcatgatttaaaaaaaaaaaaaatttatgtccttcttatttatttctaggatgaggggaggataacatttttgctttcttatgtgactctctttgaaaatgtgcagtaagaaattcctcaaaaataaaatttttacccttcagaggaaaaaaaaaaaaaaaaaaa

SEQ ID NO: 224 - protein, 372 aa, Homo sapien
MSEAGEATTTTTTTLPQAPTEAAAAAPQDPAPKSPVGSGAPQAAAPAPAAHVAGNPGGDAAPAATGTAAAASLAAAAGSEDAEKKVLATKVLGTVKWFNVRNGYGFINRNDTKEDVFVHQTAIKKNNPRKYLRSVGDGETVEFDVVEGEKGAEAANVTGPDGVPVEGSRYAADRRRYRRGYYGRRRGPPRNYAGEEEEEGSGSSEGFDPPATDRQFSGARNQLRRPQYRPQYRQRRFPPYHVGQTFDRRSRVLPHPNRIQAGEIGEMKDGVPEGAQLQGPVHRNPTYRPRYRSRGPPRPRPAPAVGEAEDKENQQATSGPNQPSVRRGYRRPYNYRRRPRPPNAPSQDGKEAKAGEAPTENPAPPTQQSSAE

SEQ ID NO: 225 - DNA, 2922 bp, Homo sapien
ggacaccgggccatgcacgcccccaactgaagctgcatctcaaagccgaagattccagcagcccaggggatttcaaagagctcagactcagaggaacatctgcggagagacccccgaagccctctccagggcagtcctcatccagacgctccgctagtgcagacaggagcgcgcagtggccccggctcgccgcgccatggagcggatccccagcgcgcaaccaccccccgcctgcctgcccaaagcaccgggactggagcacggagacctaccagggatgtaccctgcccacatgtaccaagtgtacaagtcaagacggggaataaagcggagcgaggacagcaaggagacctacaaattgccgcaccggctcatcgagaaaaagagacgtgaccggattaacgagtgcatcgcccagctgaaggatctcctacccgaacatctcaaacttacaactttgggtcacttggaaaaagcagtggttcttgaacttaccttgaagcatgtgaaagcactaacaaacctaattgatcagcagcagcagaaaatcattgccctgcagagtggtttacaagctggtgagctgtcagggagaaatgtcgaaacaggtcaagagatgttctgctcaggtttccagacatgtgcccgggaggtgcttcagtatctggccaagcacgagaacactcgggacctgaagtcttcgcagcttgtcacccacctccaccgggtggtctcggagctgctgcagggtggtacctccaggaagccatcagacccagctcccaaagtgatggacttcaaggaaaaacccagctctccggccaaaggttcggaaggtcctgggaaaaactgcgtgccagtcatccagcggactttcgctcactcgagtggggagcagagcggcagcgacacggacacagacagtggctatggaggagaatcggagaagggcgacttgcgcagtgagcagccgtgcttcaaaagtgaccacggacgcaggttcacgatgggagaaaggatcggcgcaattaagcaagagtccgaagaaccccccacaaaaaagaaccggatgcagctttcggatgatgaaggccatttcactagcagtgacctgatcagctccccgttcctgggcccacacccacaccagcctcctttctgcctgcccttctacctgatcccaccttcagcgactgcctacctgcccatgctggagaagtgctggtatcccacctcagtgccagtgctatacccaggcctcaacgcctctgccgcagccctctctagcttcatgaacccagacaagatctcggctcccttgctcatgccccagagactcccttctcccttgccagctcatccgtccgtcgactcttctgtcttgctccaagctctgaagccaatcccccctttaaacttagaaaccaaagactaaactctctaggggatcctgctgctttgctttccttcctcgctacttcctaaaaagcaacaaaaaagtttttgtgaatgctgcaagattgttgcattgtgtatactgagataatctgaggcatggagagcagattcagggtgtgtgtgtgtgtgtgtgtgtgtgtgtgtatgtgcgtgtgcgtgcacatgtgtgcctgcgtgttggtataggactttaaagctccttttggcatagggaagtcacgaaggattgcttgacatcaggagacttgggggggattgtagcagacgtctgggcttttccccacccagagaatagcccccttcgatacacatcagctggattttcaaaagcttcaaagtcttggtctgtgagtcactcttcagtttgggagctgggtctgtggctttgatcagaaggtactttcaaaagagggctttccagggctcagctcccaaccagctgttaggaccccacccttttgcctttattgtcgacgtgactcaccagacgtcggggagagagagcagtcagaccgagctttctgctaacatggggaggtagcaggcactggcatagcacggtagtggtttggggaggtttccgcaggtctgctccccacccctgcctcggaagaataaagagaatgtagttccctactcaggctttcgtagtgattagcttactaaggaactgaaaatgggccccttgtacaagctgagctgccccggagggagggaggagttccctgggcttctggcacctgtttctaggcctaaccattagtacttactgtgcagggaaccaaaccaaggtctgagaaatgcggacaccccgagcgagcaccccaaagtgcacaaagctgagtaaaaagctgcccccttcaaacagaactagactcagttttcaattccatcctaaaactccttttaaccaagcttagcttctcaaaggcctaaccaagccttggcaccgccagatcctttctgtaggctaattcctcttgcccaacggcatatggagtgtccttattgctaaaaaggattccgtctccttcaaagaagttttatttttggtccagagtacttgttttcccgatgtgtccagccagctccgcagcagcttttcaagatgcactatgcctgattgctgatcgtgttttaactttttcttttcctgtttttattttggtattaagtcgttgcctttatttgtaaagctgttataaatatatattatataaatatattaaaaaggaaaatgtttcagatgtttatttgtataattacttgattcacacagtgagaaaaaatgaatgtattcctgtttttgaagagaagaataatttttttttctctagggagaggtacagtgtttatattttggagccttcctgaaggtgtaaaattgtaaatatttttatctatgagtaaatgttaagtagttgttttaaaatacttaataaaataattcttttcctgtggaag

SEQ ID NO: 226 - protein, 412 aa, Homo sapien
MERIPSAQPPPACLPKAPGLEHGDLPGMYPAHMYQVYKSRRGIKRSEDSKETYKLPHRLIEKKRRDRINECIAQLKDLLPEHLKLTTLGHLEKAVVLELTLKHVKALTNLIDQQQQKIIALQSGLQAGELSGRNVETGQEMFCSGFQTCAREVLQYLAKHENTRDLKSSQLVTHLHRVVSELLQGGTSRKPSDPAPKVMDFKEKPSSPAKGSEGPGKNCVPVIQRTFAHSSGEQSGSDTDTDSGYGGESEKGDLRSEQPCFKSDHGRRFTMGERIGAIKQESEEPPTKKNRMQLSDDEGHFTSSDLISSPFLGPHPHQPPFCLPFYLIPPSATAYLPMLEKCWYPTSVPVLYPGLNASAAALSSFMNPDKISAPLLMPQRLPSPLPAHPSVDSSVLLQALKPIPPLNLETKD

SEQ ID NO: 227 - DNA, 2922 bp, Homo sapien; identical to SEQ ID NO: 225

SEQ ID NO: 228 - protein, 412 aa, Homo sapien; identical to SEQ ID NO: 226

SEQ ID NO: 229 - DNA, 849 bp, Homo sapien
gcggtcagctattgacacttcctggtgggatccgagtgaggcgacggggtaggggttggcgctcaggcggcgaccatggcgtatcacggcctcactgtgcctctcattgtgatgagcgtgttctggggcttcgtcggcttcttggtgccttggttcatccctaagggtcctaaccggggagttatcattaccatgttggtgacctgttcagtttgctgctatctcttttggctgattgcaattctggcccaactcaaccctctctttggaccgcaattgaaaaatgaaaccatctggtatctgaagtatcattggccttgaggaagaagacatgctctacagtgctcagtctttgaggtcacgagaagagaatgccttctagatgcaaaatcacctccaaaccagaccacttttcttgacttgcctgttttggccattagctgccttaaacgttaacagcacatttgaatgccttattctacaatgcagcgtgttttcctttgccttttttgcactttggtgaattacgtgcctccataacctgaactgtgccgactccacaaaacgattatgtactcttctgagatagaagatgctgttcttctgagagatacgttactctctccttggaatctgtggatttgaagatggctcctgccttctcacgtgggaatcagtgaagtgtttagaaactgctgcaagacaaacaagactccagtggggtggtcagtaggagagcacgttcagagggaagagccatctcaacagaatcgcaccaaactatactttcaggatgaatttcttctttctgccatcttttggaataaatattttcctcctttctatgga

SEQ ID NO: 230 - protein, 81 aa, Homo sapien [sequence omitted]

SEQ ID NO: 231 - DNA, 1333 bp, Homo sapien
tagagtcgttgggcccggcgcgacccgcaggagcgtagagagcgcgggactagagtgcagagctccgggacgtggatcggagccggcgcgatgggcggagagcaggaggaggagcggttcgacggcatgttgctggccatggctcagcagcacgagggcggcgtgcaggagcttgtgaacaccttcttcagcttccttcgacgcaaaacagactttttcattggaggagaagaagggatggcagagaagcttatcacacagactttcagccaccacaatcagctggcacagaagacccggcgggagaagagagcccggcaggaggccgagcggcgggagaaggcggagcgggcggccagactggccaaggaagccaagtcagagacctcagggccccagatcaaggagctaactgatgaagaggcagagaggctgcagctagagattgaccagaaaaaggatgcagagaatcatgaggcccagctcaagaacggcagccttgactccccagggaagcaggatactgaggaagatgaggaggaagatgagaaggacaaaggaaaactgaagcccaacctaggcaacggggcagacctgcccaattaccgctggacccagaccctgtcggagctggacctggcggtccctttctgtgtgaacttccggctgaaagggaaggacatggtggtggacatccagcggcggcacctccgggtggggctcaaggggcagccagcgatcattgatggggagctctacaatgaagtgaaggtggaggagagctcgtggctcattgaggacggcaaggtggtgactgtgcatctggagaagatcaataagatggagtggtggagccgcttggtgtccagtgaccctgagatcaacaccaagaagattaaccctgagaattccaagctgtcagacctggacagtgagactcgcagcatggtggaaaagatgatgtatgaccagcgacagaagtccatggggctgccaacttcagacgaacagaagaaacaggagattctgaagaagttcatggatcaacatccggagatggatttttccaaggctaaattcaactagcccctgttttttcctccctgaactcttggggctgagctgcaaccacccaactttctttcccactcttctctgggacttgtgggcctcagggcttggggcaggcatgggactggcccaggcacacaggtcccggggcatcaggagaaaggctgggtcttgggaccttgtcctccccagttggcctactgttacacattaaaacgatttgcccagctaaaaaaaaaaaaaaaaaaaaaaaaaaaaaaaa

SEQ ID NO: 232 - protein, 331 aa, Homo sapien
MGGEQEEERFDGMLLAMAQQHEGGVQELVNTFFSFLRRKTDFFIGGEEGMAEKLITQTFSHHNQLAQKTRREKRARQEAERREKAERAARLAKEAKSETSGPQIKELTDEEAERLQLEIDQKKDAENHEAQLKNGSLDSPGKQDTEEDEEEDEKDKGKLKPNLGNGADLPNYRWTQTLSELDLAVPFCVNFRLKGKDMVVDIQRRHLRVGLKGQPAIIDGELYNEVKVEESSWLIEDGKVVTVHLEKINKMEWWSRLVSSDPEINTKKINPENSKLSDLDSETRSMVEKMMYDQRQKSMGLPTSDEQKKQEILKKFMDQHPEMDFSKAKFN

SEQ ID NO: 233 - DNA, 4539 bp, Homo sapien
cggcgcgcacactgctcgctgggccgcggctcccgggtgtcccaggcccggccggtgcgcagagcatggcgggtgcgggcccgaagcggcgcgcgctagcggcgccggcggccgaggagaaggaagaggcgcgggagaagatgctggccgccaagagcgcggacggctcggcgccggcaggcgagggcgagggcgtgaccctgcagcggaacatcacgctgctcaacggcgtggccatcatcgtggggaccattatcggctcgggcatcttcgtgacgcccacgggcgtgctcaaggaggcaggctcgccggggctggcgctggtggtgtgggccgcgtgcggcgtcttctccatcgtgggcgcgctctgctacgcggagctcggcaccaccatctccaaatcgggcggcgactacgcctacatgctggaggtctacggctcgctgcccgccttcctcaagctctggatcgagctgctcatcatccggccttcatcgcagtacatcgtggccctggtcttcgccacctacctgctcaagccgctcttccccacctgcccggtgcccgaggaggcagccaagctcgtggcctgcctctgcgtgctgctgctcacggccgtgaactgctacagcgtgaaggccgccacccgggtccaggatgcctttgccgccgccaagctcctggccctggccctgatcatcctgctgggcttcgtccagatcgggaagggtgatgtgtccaatctagatcccaacttctcatttgaaggcaccaaactggatgtggggaacattgtgctggcattatacagcggcctctttgcctatggaggatggaattacttgaatttcgtcacagaggaaatgatcaacccctacagaaacctgcccctggccatcatcatctccctgcccatcgtgacgctggtgtacgtgctgaccaacctggcctacttcaccaccctgtccaccgagcagatgctgtcgtccgaggccgtggccgtggacttcgggaactatcacctgggcgtcatgtcctggatcatccccgtcttcgtgggcctgtcctgcttcggctccgtcaatgggtccctgttcacatcctccaggctcttcttcgtggggtcccgggaaggccacctgccctccatcctctccatgatccacccacagctcctcacccccgtgccgtccctcgtgttcacgtgtgtgatgacgctgctctacgccttctccaaggacatcttctccgtcatcaacttcttcagcttcttcaactggctctgcgtggccctggccatcatcggcatgatctggctgcgccacagaaagcctgagcttgagcggcccatcaaggtgaacctggccctgcctgtgttcttcatcctggcctgcctcttcctgatcgccgtctccttctggaagacacccgtggagtgtggcatcggcttcaccatcatcctcagcgggctgcccgtctacttcttcggggtctggtggaaaaacaagcccaagtggctcctccagggcatcttctccacgaccgtcctgtgtcagaagctcatgcaggtggtcccccaggagacatagccaggaggccgagtggctgccggaggagcatgcgcagaggccagttaaagtagatcacctcctcgaacccactccggttccccgcaacccacagctcagctgcccatcccagtccctcgccgtccctcccaggtcgggcagtggaggctgctgtgaaaactctggtacgaatctcatccctcaactgagggccagggacccaggtgtgcctgtgctcctgcccaggagcagcttttggtctccttgggccctttttcccttccctcctttgtttacttatatatatattttttttaaacttaaattttgggtcaacttgacaccactaagatgattttttaaggagctgggggaaggcaggagccttcctttctcctgccccaagggcccagaccctgggcaaacagagctactgagacttggaacctcattgctacgacagacttgcactgaagccggacagctgcccagacacatgggcttgtgacattcgtgaaaaccaaccctgtgggcttatgtctctgccttagggtttgcagagtggaaactcagccgtagggtggcactgggagggggtgggggatctgggcaaggtgggtgattcctcccaggaggtgcttgaggccccgatggactcctgaccataatcctagccccgagacaccatcctgagccagggaacagccccagggttggggggtgccggcatctcccctagctcaccaggcctggcctctgggcagtgtggcctcttggctatttctgttccagttttggaggctgagttctggttcatgcagacaaagccctgtccttcagtcttctagaaacagagacaagaaaggcagacacaccgcggccaggcacccatgtgggcgcccaccctgggctccacacagcagtgtcccctgccccagaggtcgcagctaccctcagcctccaatgcattggcctctgtaccgcccggcagccccttctggccggtgctgggttcccactcccggcctaggcacctccccgctctccctgtcacgctcatgtcctgtcctggtcctgatgcccgttgtctaggagacagagccaagcactgctcacgtctctgccgcctgcgtttggaggcccctgggctctcacccagtccccacccgcctgcagagagggaactagggcaccccttgtttctgttgttcccgtgaatttttttcgctatgggaggcagccgaggcctggccaatgcggcccactttcctgagctgtcgctgcctccatggcagcagccaaggacccccagaacaagaagacccccccgcaggatccctcctgagctcggggggctctgccttctcaggccccgggcttcccttctccccagccagaggtggagccaagtggtccagcgtcactccagtgctcagctgtggctggaggagctggcctgtggcacagccctgagtgtcccaagccgggagccaacgaagccggacacggcttcactgaccagcggctgctcaagccgcaagctctcagcaagtgcccagtggagcctgccgcccccacctgggcaccgggaccccctcaccatccagtgggcccggagaaacctgatgaacagtttggggactcaggaccagatgtccgtctctcttgcttgaggaatgaagacctttattcacccctgccccgttgcttcccgctgcacatggacagacttcacagcgtctgctcataggacctgcatccttcctggggacgaattccactcgtccaagggacagcccacggtctggaggccgaggaccaccagcaggcaggtggactgactgtgttgggcaagacctcttccctctgggcctgttctcttggctgcaaataaggacagcagctggtgccccacctgcctggtgcattgctgtgtgaatccaggaggcagtggacatcgtaggcagccacggccccgggtccaggagaagtgctccctggaggcacgcaccactgcttcccactggggccggcggggcccacgcacgacgtcagcctcttaccttcccgcctcggctaggggtcctcgggatgccgttctgttccaacctcctgctctgggaggtggacatgcctcaaggatacagggagccggcggcctctcgacggcacgcacttgcctgttggctgctgcggctgtgggcgagcatgggggctgccagcgtctgttgtggaaagtagctgctagtgaaatggctggggccgctggggtccgtcttcacactgcgcaggtctcttctgggcgtctgagctggggtgggagctcctccgcagaaggttggtggggggtccagtctgtgatccttggtgctgtgtgccccactccagcctggggaccccacttcagaaggtaggggccgtgtcccgcggtgctgactgaggcctgcttccccctccccctcctgctgtgctggaattccacagggaccagggccaccgcaggggactgtctcagaagacttgatttttccgtccctttttctccacactccactgacaaacgtccccagcggtttccacttgtgggcttcaggtgttttcaagcacaacccaccacaacaagcaagtgcattttcagtcgttgtgcttttttgttttgtgctaacgtcttactaatttaaagatgctgtcggcaccatgtttatttatttccagtggtcatgctcagccttgctgctctgcgtggcgcaggtgccatgcctgctccctgtctgtgtcccagccacgcagggccatccactgtgacgtcggccgaccaggctggacaccctctgccgagtaatgacgtgtgtggctgggaccttctttattctgtgttaatggctaacctgttacactgggctgggttgggtagggtgttctggcttttttgtggggtttttatttttaaagaaacactcaatcatcctag

SEQ ID NO: 234 - protein, 507 aa, Homo sapien
MAGAGPKRRALAAPAAEEKEEAREKMLAAKSADGSAPAGEGEGVTLQRNITLLNGVAIIVGTIIGSGIFVTPTGVLKEAGSPGLALVVWAACGVFSIVGALCYAELGTTISKSGGDYAYMLEVYGSLPAFLKLWIELLIIRPSSQYIVALVFATYLLKPLFPTCPVPEEAAKLVACLCVLLLTAVNCYSVKAATRVQDAFAAAKLLALALIILLGFVQIGKGDVSNLDPNFSFEGTKLDVGNIVLALYSGLFAYGGWNYLNFVTEEMINPYRNLPLAIIISLPIVTLVYVLTNLAYFTTLSTEQMLSSEAVAVDFGNYHLGVMSWIIPVFVGLSCFGSVNGSLFTSSRLFFVGSREGHLPSILSMIHPQLLTPVPSLVFTCVMTLLYAFSKDIFSVINFFSFFNWLCVALAIIGMIWLRHRKPELERPIKVNLALPVFFILACLFLIAVSFWKTPVECGIGFTIILSGLPVYFFGVWWKNKPKWLLQGIFSTTVLCQKLMQVVPQET

SEQ ID NO: 235 - DNA, 1989 bp, Homo sapien
gcggccgccgggactcttcctggagacaccgccatggccgggctatcccgcgggtccgcgcgcgcactgctcgccgccctgctggcgtcgacgctgttggcgctgctcgtgtcgcccgcgcggggtcgcggcggccgggaccacggggactgggacgaggcctcccggctgccgccgctaccaccccgcgaggacgcggcgcgcgtggcccgcttcgtgacgcacgtctccgactggggcgctctggccaccatctccacgctggaggcggtgcgcggccggcccttcgccgacgtcctctcgctcagcgacgggcccccgggcgcgggcagcggcgtgccctatttctacctgagcccgctgcagctctccgtgagcaacctgcaggagaatccatatgctacactgaccatgactttggcacagaccaacttctgcaagaaacatggatttgatccacaaagtcccctttgtgttcacataatgctgtcaggaactgtgaccaaggtgaatgaaacagaaatggatattgcaaagcattcgttattcattcgacaccctgagatgaaaacctggccttccagccataattggttctttgctaagttgaatataaccaatatctgggtcctggactactttggtggaccaaaaatcgtgacaccagaagaatattataatgtcacagttcagtgaagcagactgtggtgaatttagcaacacttatgaagtttcttaaagtggctcatacacacttaaaaggcttaatgtttctctggaaagcgtcccagaatattagccagttttctgtcacatgctggtttgtttgcttgcttgtttacttgcttgtttaccaatagagttgacctgttattggatttcctggaagatgtggtagctacttttttcctattttgaagccattttcgtagagaaatatccttcactataatcaaataagttttgtcccatcaattccaaagatgtttccagtggtgctcttgaagaggaatgagtaccagttttaaattgcccattggcatttgaaggtagttgagtatgtgttctttattcctagaagccactgtgcttggtagagtgcatcactcaccacagctgcctcctgagctgcctgagcctggtgcaaaaggattggcccccattatggtgcttctgaataaatcttgccaagatagacaaacaatgatgaaactcagatggagcttcctactcatgttgatttatgtctcacaatcctgggtattgttaattcaacatagggtgaaactatttctgataaagaacttttgaaaaactttttatactctaaagtgatactcagaacaaaagaaagtcataaaactcctgaatttaatttccccacctaagtcgagacagtattatcaaaacacatgtgcacacagattattttttggctccaaaactggattgcaaaagaaagaggagaagaatattttgtgtgttcctggtattcttttataagtaaagtttacccaggcatggaccagcttcagccagggacaaaatcccctcccaaaccactctccacagctttttaaaaatacttctactcttaacaattacctaaggcttcctcaactgccccaaatctcttaatagcttctagtgctgctacaatctaagtcaggtcaccagagggaagagaacatggcattaaaagaatcacatcttcagaagagaagacactaatattattacccatatacatgatttcagaagatgacataagattcctcttaaagaggaaatgtcaggaatcaagccactgaatccttaaagagaaaagttgaatatgagtcattgtgtctgaaaactgcaaagtgaacttaactgagatccagcaaacaggttctgtttaagaaaaataatttatactaaatttagtaaaatggacttcttattcaaagcatcaataattaaaagaattattttaaaaaaaaaaaaaaa

SEQ ID NO: 236 - protein, 220 aa, Homo sapien
MAGLSRGSARALLAALLASTLLALLVSPARGRGGRDHGDWDEASRLPPLPPREDAARVARFVTHVSDWGALATISTLEAVRGRPFADVLSLSDGPPGAGSGVPYFYLSPLQLSVSNLQENPYATLTMTLAQTNFCKKHGFDPQSPLCVHIMLSGTVTKVNETEMDIAKHSLFIRHPEMKTWPSSHNWFFAKLNITNIWVLDYFGGPKIVTPEEYYNVTVQ

SEQ ID NO: 237 - DNA, 1231 bp, Homo sapien
aggtctcagccggtcgtcgcgacgttcgcccgctcgctctgaggctcctgaagccgaaactagctagactttcctccttcccgcctgcctgtagcggcgttgttgccactccgccaccatgttcgaggcgcgcctggtccagggctccatcctcaagaaggtgttggaggcactcaaggacctcatcaacgaggcctgctgggatattagctccagcggtgtaaacctgcagagcatggactcgtcccacgtctctttggtgcagctcaccctgcggtctgagggcttcgacacctaccgctgcgaccgcaacctggccatgggcgtgaacctcaccagtatgtccaaaatactaaaatgcgccggcaatgaagatatcattacactaagggccgaagataacgcggataccttggcgctagtatttgaagcaccaaaccaggagaaagtttcagactatgaaatgaagttgatggatttagatgttgaacaacttggaattccagaacaggagtacagctgtgtagtaaagatgccttctggtgaatttgcacgtatatgccgagatctcagccatattggagatgctgttgtaatttcctgtgcaaaagacggagtgaaattttctgcaagtggagaacttggaaatggaaacattaaattgtcacagacaagtaatgtcgataaagaggaggaagctgttaccatagagatgaatgaaccagttcaactaacttttgcactgaggtacctgaacttctttacaaaagccactccactctcttcaacggtgacactcagtatgtctgcagatgtaccccttgttgtagagtataaaattgcggatatgggacacttaaaatactacttggctcccaagatcgaggatgaagaaggatcttaggcattcttaaaattcaagaaaataaaactaagctctttgagaactgcttctaagatgccagcatatactgaagtcttttctgtcaccaaatttgtacctctaagtacatatgtagatattgttttctgtaaataacctattttttttctctattctctccaatttgtttaaagaataaagtccaaagtctgatctggtctagttaacctagaagtatttttgtctcttagaaatacttgtgatttttataatacaaaagggtcttgactctaaatgcagttttaagaagtgtttttgaatttaaataaagttacttgaatttcaaac

SEQ ID NO: 238 - protein, 261 aa, Homo sapien
MFEARLVQGSILKKVLEALKDLINEACWDISSSGVNLQSMDSSHVSLVQLTLRSEGFDTYRCDRNLAMGVNLTSMSKILKCAGNEDIITLRAEDNADTLALVFEAPNQEKVSDYEMKLMDLDVEQLGIPEQEYSCVVKMPSGEFARICRDLSHIGDAVVISCAKDGVKFSASGELGNGNIKLSQTSNVDKEEEAVTIEMNEPVQLTFALRYLNFFTKATPLSSTVTLSMSADVPLVVEYKIADMGHLKYYLAPKIEDEEGS

SEQ ID NO: 239 - DNA, 3089 bp, Homo sapien
aaagattccgaggtgcagaagttgtctgagtgcgttggtcggcggcagtcgggccagacccaggactctgcgactttacatctttaaatggatgagatggctaccactcagatttccaaagatgagcttgatgaactcaaagaggcctttgcaaaagttgatctcaacagcaacggattcatttgtgactatgaacttcatgagctcttcaaggaagctaatatgccattaccaggatataaagtgagagaaattattcagaaactcatgctggatggtgacaggaataaagatgggaaaataagttttgacgaatttgtttatatttttcaagaggtaaaaagtagtgatattgccaagaccttccgcaaagcaatcaacaggaaagaaggtatttgtgctctgggtggaacttcagagttgtccagcgaaggaacacagcattcttactcagaggaagaaaaatatgcttttgttaactggataaacaaagctttggaaaatgatcctgattgtagacatgttataccaatgaaccctaacaccgatgacctgttcaaagctgttggtgatggaattgtgctttgtaaaatgattaacctttcagttcctgataccattgatgaaagagcaatcaacaagaagaaacttacacccttcatcattcaggaaaacttgaacttggcactgaactctgcttctgccattgggtgtcatgttgtgaacattggtgcagaagatttgagggctgggaaacctcatctggttttgggactgctttggcagatcattaagatcggtttgttcgctgacattgaattaagcaggaatgaagccttggctgctttactccgagatggtgagactttggaggaacttatgaaattgtctccagaagagcttctgcttagatgggcaaactttcatttggaaaactcgggctggcaaaaaattaacaactttagtgctgacatcaaggattccaaagcctatttccatcttctcaatcaaatcgcaccaaaaggacaaaaggaaggtgaaccacggatagatattaacatgtcaggtttcaatgaaacagatgatttgaagagagctgagagtatgcttcaacaagcagataaattaggttgcagacagtttgttacccctgctgatgttgtcagtggaaaccccaaactcaacttagctttcgtggctaacctgtttaataaatacccagcactaactaagccagagaaccaggatattgactggactctattagaaggagaaactcgtgaagaaagaaccttccgtaactggatgaactctcttggtgtcaatcctcacgtaaaccatctctatgctgacctgcaagatgccctggtaatcttacagttatatgaacgaattaaagttcctgttgactggagtaaggttaataaacctccatacccgaaactgggagccaacatgaaaaagctagaaaactgcaactatgctgttgaattagggaagcatcctgctaaattctccctggttggcattggagggcaagacctgaatgatgggaaccaaaccctgactttagctttagtctggcagctgatgagaagatataccctcaatgtcctggaagatcttggagatggtcagaaagccaatgacgacatcattgtgaactgggtgaacagaacgttgagtgaagctggaaaatcaacttccattcagagttttaaggacaagacgatcagctccagtttggcagttgtggatttaattgatgccatccagccaggctgtataaactatgaccttgtgaagagtggcaatctaacagaagatgacaagcacaataatgccaagtatgcagtgtcaatggctagaagaatcggagccagagtgtatgctctccctgaagaccttgtggaagtaaagcccaagatggtcatgactgtgtttgcatgtttgatgggcaggggaatgaagagagtgtaaaataaccaatctgaataaaacagccatgctcccaggtgcatgattcgcaggtcagctatttccaggtgaagtgcttatggcttaaggaactcttggccattcaaaggacttttcattttgattaacaggactagcttatcatgagagccctcaggggaaagggtttaagaaaaacaactcctctttcccatagtcagagttgaatttgtcaggcacgcctgaaatgtgctcatagccaaaacattttactctctcctcctagaatgctgcccttgacatttcccattgctgtatgttatttcttgctctgttatcttttgccctcttagaatgtccctctcttgggacttgcttagatgatgggatatgaatattattagacagtaattttgctttccatccagtatgctagttcttattcgagaactatggtcagagcgtatttggatatgagtatcctttgcttatctttgtagtactgaaaatttgccgaagtaactggctgtgcagaatgtaatagaagcttttcttattcttttattcttaagatcagtatctttttacagtattctttctacatgatccttttttgtacatttaagaatattttgattatattaaacaagactgctgattttgctactttttttaaggggtcttcaagtaagtaaaacatacatcgtagctagaagaaaaatgtaccttaaatttgcatcttccctctcatacccaagctgtaaacaattgaaatattttgtcttaaatcacttggttcaatacatgcttatttgttttaaaacctgtatcatcaaactctctctctaaatttaaaatgctgttgaatatgatacttttgaggagagagtgtgctcagaacttagacgggatttggtaggccaagtatgctaagtgtacaatatattttttaattttacacctgaaacaaagaaatgtggtcactaaaaataaaagtatatatgtaggaattaatgtactcttgctttgtcaagctgtttgctatagtttccaaggtattatgttactctaactctgaaaagtgatgtaatctggtagcaatgtagtagttcaaataaaggcatttacataat

SEQ ID NO: 240 - protein, 630 aa, Homo sapien
MDEMATTQISKDELDELKEAFAKVDLNSNGFICDYELHELFKEANMPLPGYKVREIIQKLMLDGDRNKDGKISFDEFVYIFQEVKSSDIAKTFRKAINRKEGICALGGTSELSSEGTQHSYSEEEKYAFVNWINKALENDPDCRHVIPMNPNTDDLFKAVGDGIVLCKMINLSVPDTIDERAINKKKLTPFIIQENLNLALNSASAIGCHVVNIGAEDLRAGKPHLVLGLLWQIIKIGLFADIELSRNEALAALLRDGETLEELMKLSPEELLLRWANFHLENSGWQKINNFSADIKDSKAYFHLLNQIAPKGQKEGEPRIDINMSGFNETDDLKRAESMLQQADKLGCRQFVTPADVVSGNPKLNLAFVANLFNKYPALTKPENQDIDWTLLEGETREERTFRNWMNSLGVNPHVNHLYADLQDALVILQLYERIKVPVDWSKVNKPPYPKLGANMKKLENCNYAVELGKHPAKFSLVGIGGQDLNDGNQTLTLALVWQLMRRYTLNVLEDLGDGQKANDDIIVNWVNRTLSEAGKSTSIQSFKDKTISSSLAVVDLIDAIQPGCINYDLVKSGNLTEDDKHNNAKYAVSMARRIGARVYALPEDLVEVKPKMVMTVFACLMGRGMKRV

SEQ ID NO: 241 - DNA, 1311 bp, Homo sapien
ctctaccggcgggatttgatggcgtgatgtctcacagaaagttctccgctcccagacatgggtccctcggcttcctgcctcggaagcgcagcagcaggcatcgtgggaaggtgaagagcttccctaaggatgacccgtccaagccggtccacctcacagccttcctgggatacaaggctggcatgactcacatcgtgcgggaagtcgacaggccgggatccaaggtgaacaagaaggaggtggtggaggctgtgaccattgtagagacaccacccatggtggttgtgggcattgtgggctacgtggaaacccctcgaggcctccggaccttcaagactgtctttgctgagcacatcagtgatgaatgcaagaggcgtttctataagaattggcataaatctaagaagaaggcctttaccaagtactgcaagaaatggcaggatgaggatggcaagaagcagctggagaaggacttcagcagcatgaagaagtactgccaagtcatccgtgtcattgcccacacccagatgcgcctgcttcctctgcgccagaagaaggcccacctgatggagatccaggtgaacggaggcactgtggccgagaagctggactgggcccgcgagaggcttgagcagcaggtacctgtgaaccaagtgtttgggcaggatgagatgatcgacgtcatcggggtgaccaagggcaaaggctacaaaggggtcaccagtcgttggcacaccaagaagctgccccgcaagacccaccgaggcctgcgcaaggtggcctgtattggggcatggcatcctgctcgtgtagccttctctgtggcacgcgctgggcagaaaggctaccatcaccgcactgagatcaacaagaagatttataagattggccagggctaccttatcaaggacggcaagctgatcaagaacaatgcctccactgactatgacctatctgacaagagcatcaaccctctgggtggctttgtccactatggtgaagtgaccaatgactttgtcatgctgaaaggctgtgtggtgggaaccaagaagcgggtgctcaccctccgcaagtccttgctggtgcagacgaagcggcgggctctggagaagattgaccttaagttcattgacaccacctccaagtttggccatggccgcttccagaccatggaggagaagaaagcattcatgggaccactgaagaaagaccgaattgcaaaggaagaaggagcttaatgccaggaacagattttgcagttggtggggtctcaataaaagttattttccactgaaaaaaaaaaaaaaaaaa

SEQ ID NO: 242 - protein, 403 aa, Homo sapien
MSHRKFSAPRHGSLGFLPRKRSSRHRGKVKSFPKDDPSKPVHLTAFLGYKAGMTHIVREVDRPGSKVNKKEVVEAVTIVETPPMVVVGIVGYVETPRGLRTFKTVFAEHISDECKRRFYKNWHKSKKKAFTKYCKKWQDEDGKKQLEKDFSSMKKYCQVIRVIAHTQMRLLPLRQKKAHLMEIQVNGGTVAEKLDWARERLEQQVPVNQVFGQDEMIDVIGVTKGKGYKGVTSRWHTKKLPRKTHRGLRKVACIGAWHPARVAFSVARAGQKGYHHRTEINKKIYKIGQGYLIKDGKLIKNNASTDYDLSDKSINPLGGFVHYGEVTNDFVMLKGCVVGTKKRVLTLRKSLLVQTKRRALEKIDLKFIDTTSKFGHGRFQTMEEKKAFMGPLKKDRIAKEEGA

SEQ ID NO: 243 - DNA, 2943 bp, Homo sapien
gagtcacgatgatggcggccaccatcctgtggtgagctagcggattccctgcttgtctcgccgaccccctcgcgccttctgcagactccgtggctggcgctcggcgcgtgaggaagcacggcggcccgagttcgcggggaaggccgcagtcgcggaggcagcggcgcggtccggggcacgggctgggggagaggccgctccgctgggcgaatgtgacaagcccccacccccaccgccttcctccccagagcgcgaggagcgcgggcgaccccggggccccgccaggccacagaccccgcccagcggccagcacccggcgcaggcccggcagccgagctgcgcggcggcaccatgcaggtcaccctgaagaccctccagcagcagaccttcaagatagacattgaccccgaggagacggtgaaagcactgaaagagaagattgaatctgaaaaggggaaagatgcctttccagtagcaggtcaaaaattaatttatgcaggcaaaatcctcaatgatgatactgctctcaaagaatataaaattgatgagaaaaactttgtggtggttatggtgaccaaacccaaagcagtgtccacaccagcaccagctacaactcagcagtcagctcctgccagcactacagcagttacttcctccaccaccacaactgtggctcaggctccaacccctgtccctgccttggcccccacttccacacctgcatccatcactccagcatcagcgacagcatcttctgaacctgcacctgctagtgcagctaaacaagagaagcctgcagaaaagccagcagagacaccagtggctactagcccaacagcaactgacagtacatcgggtgattcttctcggtcaaacctttttgaagatgcaacgagtgcacttgtgacgggtcagtcttacgagaatatggtaactgagatcatgtcaatgggctatgaacgagagcaagtaattgcagccctgagagccagtttcaacaaccctgacagagcagtggagtatcttttaatgggaatccctggagatagagaaagtcaggctgtggttgacccccctcaagcagctagtactggggctcctcagtcttcagcagtggctgcagctgcagcaactacgacagcaacaactacaacaacaagttctggaggacatccccttgaatttttacggaatcagcctcagtttcaacagatgagacaaattattcagcagaatccttccttgcttccagcgttactacagcagataggtcgagagaatcctcaattacttcagcaaattagccaacaccaggagcattttattcagatgttaaatgaaccagttcaagaagctggtggtcaaggaggaggaggtggaggtggcagtggaggaattgcagaagctggaagtggtcatatgaactacattcaagtaacacctcaggaaaaagaagctatagaaaggttaaaggcattaggatttcctgaaggacttgtgatacaagcgtattttgcttgtgagaagaatgagaatttggctgccaattttcttctacagcagaactttgatgaagattgaaagggacttttttatatctcacacttcacaccagtgcattacactaacttgttcactggattgtctgggatgacttgggctcatatccacaatacttggtataaggtagtagattgttgggggtggggagggagggatctaggatacagggcagggataaatacagtgcatgtctgcttcaattagcagatgccgcaactccacacagtgtgtaaaatatatacaaccaaaaatcagcttttgcaggtctttatttcttctgtaaaacagtaggtaacttttcctaggtttcactctttttagtgtactagatccagaaacttagtgtaatgccctgctttatatttctttgacttaacattggtttcagaaagaatcttagctacctagaatttacagtctctgtttcatggcaacactggataatggctttgtgaaatttaaaaaatttttgtagcgactgtaaacagaaatgccaaattgatggttaattgttgctgcttcaaaaataagtataaaattaatatgtaaggaagcccattctttcatgttaaatacttggggtgggaggggagaaagggaaccttttcttaaaatgaaaataattactgctattttaaaatttcttgatcattgaatgtgagacccttctaacatgatttgagaagctgtacaagtataggcagagttattttcctgtttacattttttttttgttttggggaaaaaattggtaggtgtctaattactgtttacttcattgttatattgcagtaaaagttttaaaacaaccattgcatgtttgcttttgatgtatccctttgtgaaattagcacttttggggccaatggagaaatgcagcattcactctccctgtcttttccccttccctcagcagaaacgtgtttatcagcaagtcgtgagtcaaactgctgccttttaaaaaacccacaaaatgctgattcagttcaaaattaatgcaaatgtttcaaaactgggtttctgatatttgtaaatgtgtttctttattagataagagtgtattaccattaaagtcattagtataatattgctttcaaaaagaaatggtagacaaaactataatccagcatcttttattgcattggaaagactggcaaagtcttttggatgggttgggagatgtggctggaaagtactttggaaaatatacaatcaagatatctcatggcatattaaaagaaaaatcttaatagcagtgttggcttttatttggattttttcatctcagttttttctgtggaatctccttcattggcattgttatttaatcataaacggggcagatgtctacttgttcagtttttcaaatctgttttcctg

SEQ ID NO: 244 - protein, 409 aa, Homo sapien
MQVTLKTLQQQTFKIDIDPEETVKALKEKIESEKGKDAFPVAGQKLIYAGKILNDDTALKEYKIDEKNFVVVMVTKPKAVSTPAPATTQQSAPASTTAVTSSTTTTVAQAPTPVPALAPTSTPASITPASATASSEPAPASAAKQEKPAEKPAETPVATSPTATDSTSGDSSRSNLFEDATSALVTGQSYENMVTEIMSMGYEREQVIAALRASFNNPDRAVEYLLMGIPGDRESQAVVDPPQAASTGAPQSSAVAAAAATTTATTTTTSSGGHPLEFLRNQPQFQQMRQIIQQNPSLLPALLQQIGRENPQLLQQISQHQEHFIQMLNEPVQEAGGQGGGGGGGSGGIAEAGSGHMNYIQVTPQEKEAIERLKALGFPEGLVIQAYFACEKNENLAANFLLQQNFDED

SEQ ID NO: 245 - DNA, 2718 bp, Homo sapien
cagggtaacgctgtcttgtggacccgcacttcccacccgagacctctcactgagcccgagccgcgcgcgacatgagccacgggaagggaaccgacatgctcccggagatcgccgccgccgtgggcttcctctccagcctcctgaggacccggggctgcgtgagcgagcagaggcttaaggtcttcagcggggcgctccaggaggcactcacagagcactacaaacaccactggtttcccgaaaagccgtccaagggctccggctaccgctgcattcgcatcaaccacaagatggaccccatcatcagcagggtggccagccagatcggactcagccagccccagctgcaccagctgctgcccagcgagctgaccctgtgggtggacccctatgaggtgtcctaccgcattggggaggacggctccatctgcgtcttgtacgaggaggccccactggccgcctcctgtgggctcctcacctgcaagaaccaagtgctgctgggccggagcagcccctccaagaactacgtgatggcagtctccagctaggcccttccgcccccgccctgggcgccgccgtgctcatgctgccgtgacaacaggccaccacatacctcaacctggggaactgtatttttaaatgaagagctatttatatatattatttttttttaagaaaggaggaaaagaaaccaaaagttttttttaagaaaaaaaatccttcaagggagctgcttggaagtggcctccccaggtgcctttggagagaactgttgcgtgcttgagtctgtgagccagtgtctgcctataggagggggagctgttagggggtagacctagccaaggagaagtgggagacgtttggctagcaccccaggaagatgtgagagggagcaagcaaggttagcaactgtgaacagagaggtcgggatttgccctgggggaggaagagaggccaagttcagagctctctgtctcccccagccagacacctgcatccctggctcctctattactcaggggcattcatgcctggacttaaacaatactatgttatcttttcttttatttttctaatgaggtcctgggcagagagtgaaaaggcctctcctgattcctactgtcctaagctgcttttcttgaaatcatgacttgtttctaattctaccctcaggggcctgtagatgttgctttccagccaggaatctaaagctttgggttttctgaggggggggaggagggaactggaggttattggggttaggatggaagggaactctgcacaaaacctttgctttgctagtgctgctttgtgtgtatgtgtggcaaataatttgggggtgatttgcaatgaaattttgggacccaaagagtatccactggggatgttttttggccaaaactcttccttttggaaccacatgaaagtcttgatgctgctgccatgatccctttgagaggtggctcaaaagctacagggaactccaggtcctttattactgccttcttttcaaaagcacaactctcctctaaccctcccctcccccttcccttctggtcgggtcatagagctaccgtattttctaggacaagagttctcagtcactgtgcaatatgccccctgggtcccaggagggtctggaggaaaactggctatcagaacctcctgatgccctggtgggcttagggaaccatctctcctgctctccttgggatgatggctggctagtcagccttgcatgtattccttggctgaatgggagagtgccccatgttctgcaagactacttggtattcttgtagggccgacactaaataaaagccaaaccttgggcactgttttttctccctggtgctcagagcacctgtgggaaaggttgctgtctgtctcagtacaatccaaatttgtcgtagacttgtgcaatatatactgttgtgggttggagaaaagtggaaagctacactgggaagaaactcccttccttcaatttctcagtgacattgatgaggggtcctcaaaagacctcgagtttcccaaaccgaatcaccttaagaaggacagggctagggcatttggccaggatggccaccctcctgctgttgccccttagtgaggaatcttcaccccacttcctctacccccaggttctcctccccacagccagtcccctttcctggatttctaaactgctcaattttgactcaaaggtgctatttaccaaacactctccctacccattcctgccagctctgcctccttttcaactctccacattttgtattgccttcccagacctgcttccagtctttattgctttaaagttcactttgggcccacagacccaagagctaattttctggtttgtgggttgaaacaaagctgtgaatcactgcaggctgtgttcttgcatcttgtctgcaaacaggtccctgcctttttagaagcagcctcatggtctcatgcttaatcttgtctctcttctcttctttatgatgttcactttaaaaacaacaaaacccctgagctggactgttgagcaggcctgtctctcctattaagtaaaaataaatagtagtagtatgtttgtaagctattctgacagaaaagacaaaggttactaattgtatgatagtgtttttatatggaagaatgtacagcttatggacaaatgtacacctttttgttactttaataaaaatgtagtaggataaaaaaaaa

SEQ ID NO: 246 - protein, 158 aa, Homo sapien
MSHGKGTDMLPEIAAAVGFLSSLLRTRGCVSEQRLKVFSGALQEALTEHYKHHWFPEKPSKGSGYRCIRINHKMDPIISRVASQIGLSQPQLHQLLPSELTLWVDPYEVSYRIGEDGSICVLYEEAPLAASCGLLTCKNQVLLGRSSPSKNYVMAVSS

SEQ ID NO: 247 - DNA, 2706 bp, Homo sapien
ctctgtagctgtgaccctgataccgcgtggtgtgctccgaacacatggtgcccagaacgaaggcggcgtccagaagccctaggtcccagaggtccgctcagcggcaggcgcataaggcggggccggcgcgggcctttccttccatcggaaccgttctcccggggctgagtccctgcccggactccgaacgccgaagaccaggggccggaagcgcgcgccgccactgccacgccgtgtcagtcgggagggagggagcgagcaggcgaagccgcggaggacggggtgaagatggcggccttctccgagatgggtgtaatgcctgagattgcacaagctgtggaagagatggattggctcctcccaactgatatccaggctgaatctatcccattgatcttaggaggaggtgatgtacttatggctgcagaaacaggaagtggcaaaactggtgcttttagtattccagttatccagatagtttatgaaactctgaaagaccaacaggaaggcaaaaaaggaaaaacaacaattaaaactggtgcttcagtgctgaacaaatggcagatgaacccatatgacagaggatctgcttttgcaattgggtcagatggtctttgttgtcaaagcagagaagtaaaggaatggcatgggtgtagagctactaaaggattaatgaaagggaaacactactatgaagtatcctgtcatgaccaagggttatgcagggtcgggtggtctaccatgcaggcctctttggacctaggtactgacaagtttggatttggctttggtggaacaggaaagaaatcccataacaaacaatttgataattatggagaggaattcactatgcatgataccattggatgttacctggatatagataagggacatgtcaagttctccaaaaatggaaaagatcttggtctggcatttgaaataccaccacatatgaaaaaccaagccctctttcctgcctgtgttttgaagaatgctgaactgaaatttaacttcggtgaagaggaatttaagtttccaccaaaagatggctttgttgctctttccaaggcaccggatggttacattgtcaaatcacagcactcaggtaatgcacaggtgacacaaacaaagtttctccccaatgctccgaaagctctcattgttgaaccttcccgggagttagctgaacaaactttgaacaacatcaagcagtttaagaaatacattgataatcctaaattaagggagcttctgataattggaggtgttgcagcccgggatcagctctctgttttggaaaatggagtagatatagttgtaggtactccgggaagactagatgacttggtgtcaactggaaagctgaacttatctcaagttagattcctggtcctggatgaagctgatgggcttctttctcaaggttattctgattttataaataggatgcacaatcagattcctcaggttacctctgatggaaaaagacttcaggtgattgtttgctctgccactttgcattctttcgatgtaaagaaactgtccgagaagataatgcattttcctacatgggttgacttaaaaggagaagactctgttccagatactgtacaccatgttgttgtcccagtaaatcccaaaactgacagactctgggaaaggcttggaaagagccacattagaactgatgatgtacatgcaaaagataacacaagacctggtgctaatagtccagagatgtggtctgaagctattaaaatcctgaaaggggagtatgctgtccgggcaatcaaggaacataagatggatcaagcaattatcttctgtagaaccaaaattgactgtgataacttggagcagtactttatacaacaaggaggaggacctgataaaaaaggacaccagttctcatgtgtttgtcttcatggtgacagaaagcctcatgagagaaagcaaaacttggaaagatttaagaaaggagatgtaagattcttgatttgcacagatgtagctgctagaggaattgatatccacggtgttccttatgttataaatgtcactctgcccgatgaaaagcaaaactacgtacatcgaattggcagagtaggaagagctgaaaggatgggtctggcaatttccctggtggcaacagaaaaagaaaaggtttggtaccatgtatgtagcagccgtggaaaagggtgttataacacaagactcaaggaagatggaggctgtaccatatggtacaacgagatgcagttactatctgagatagaagaacacctgaactgtaccatttctcaggttgagccggatataaaggtaccagtggatgaatttgatgggaaagttacctacggtcagaaaagggctgctggtggtggaagctataaaggccatgtggatattttggcacctactgttcaagagttggctgcccttgaaaaggaggcgcagacatctttcctgcatcttggctaccttcctaaccagctgttcagaaccttctgatttttacatttactgaataagatttgagtaatgaaagtctgtagtcttaaaactctaaaacagttgtactgcttccaagcagcagtatttatagtaacgtaagctattaatgctaactcttgcatgtcaagaaacattagtcttaggaattcttcaaaaaatggcatcccaatgaaaataaatttgatgactata

SEQ ID NO: 248 - protein, 740 aa, Homo sapien
MAAFSEMGVMPEIAQAVEEMDWLLPTDIQAESIPLILGGGDVLMAAETGSGKTGAFSIPVIQIVYETLKDQQEGKKGKTTIKTGASVLNKWQMNPYDRGSAFAIGSDGLCCQSREVKEWHGCRATKGLMKGKHYYEVSCHDQGLCRVGWSTMQASLDLGTDKFGFGFGGTGKKSHNKQFDNYGEEFTMHDTIGCYLDIDKGHVKFSKNGKDLGLAFEIPPHMKNQALFPACVLKNAELKFNFGEEEFKFPPKDGFVALSKAPDGYIVKSQHSGNAQVTQTKFLPNAPKALIVEPSRELAEQTLNNIKQFKKYIDNPKLRELLIIGGVAARDQLSVLENGVDIVVGTPGRLDDLVSTGKLNLSQVRFLVLDEADGLLSQGYSDFINRMHNQIPQVTSDGKRLQVIVCSATLHSFDVKKLSEKIMHFPTWVDLKGEDSVPDTVHHVVVPVNPKTDRLWERLGKSHIRTDDVHAKDNTRPGANSPEMWSEAIKILKGEYAVRAIKEHKMDQAIIFCRTKIDCDNLEQYFIQQGGGPDKKGHQFSCVCLHGDRKPHERKQNLERFKKGDVRFLICTDVAARGIDIHGVPYVINVTLPDEKQNYVHRIGRVGRAERMGLAISLVATEKEKVWYHVCSSRGKGCYNTRLKEDGGCTIWYNEMQLLSEIEEHLNCTISQVEPDIKVPVDEFDGKVTYGQKRAAGGGSYKGHVDILAPTVQELAALEKEAQTSFLHLGYLPNQLFRTF

SEQ ID NO: 249 - DNA, 2208 bp, Homo sapien
gaattcatgctaaattgctggaaggctgcgtctctgctgtggtgtcagttccggatgcctcatcgccaggggcgcgccgcagccacccaccctccggaccgcggcagctgctgacccgccatcgccatggcccgcgggaaagccaaggaggagggcagctggaagaaattcatctggaactcagagaagaaggagtttctgggcaggaccggtggcagttggtttaagatccttctattctacgtaatattttatggctgcctggctggcatcttcatcggaaccatccaagtgatgctgctcaccatcagtgaatttaagcccacatatcaggaccgagtggccccgccaggattaacacagattcctcagatccagaagactgaaatttcctttcgtcctaatgatcccaagagctatgaggcatatgtactgaacatagttaggttcctggaaaagtacaaagattcagcccagagggatgacatgatttttgaagattgtggcgatgtgcccagtgaaccgaaagaacgaggagactttaatcatgaacgaggagagcgaaaggtctgcagattcaagcttgaatggctgggaaattgctctggattaaatgatgaaacttatggctacaaagagggcaaaccgtgcattattataaagctcaaccgagttctaggcttcaaacctaagcctcccaagaatgagtccttggagacttacccagtgatgaagtataacccaaatgtccttcccgttcagtgcactggcaagcgagatgaagataaggataaagttggaaatgtggagtattttggactgggcaactcccctggttttcctctgcagtattatccgtactatggcaaactcctgcagcccaaatacctgcagcccctgctggccgtacagttcaccaatcttaccatggacactgaaattcgcatagagtgtaaggcgtacggtgagaacattgggtacagtgagaaagaccgttttcagggacgttttgatgtaaaaattgaagttaagagctgatcacaagcacaaatctttcccactagccatttaataagttaaaaaaagatacaaaaacaaaaacctactagtcttgaacaaactgtcatacgtatgggacctacacttaatctatatgctttacactagctttctgcatttaataggttagaatgtaaattaaagtgtagcaatagcaacaaaatatttattctactgtaaatgacaaaagaaaaagaaaaattgagccttgggacgtgcccatttttactgtaaattatgattccgtaactgaccttgtagtaagcagtgtttctggcccctaagtattgctgccttgtgtattttatttagtgtacagtactacaggtgcatactctggtcatttttcaagccatgttttattgtatctgttttctactttatgtgagcaaggtttgctgtccaaggtgtaaatattcaacgggaataaaactggcatggtaattttttttttttgtttgttttttgttttttggctctttcaaaggtaatggcccatcgatgagcatttttaacatactccatagtcttttcctgtggtgttaggtctttatttttatttttttcctgggggctggggtgggggtttgtcatgggggaactgccctttaaattttaagtgacactacagaaaaacacaaaaaggtgatgggttgtgttatgcttgtattgaatgctgtcttgacatctcttgccttgtcctccggtatgttctaaagctgtgtctgagatctggatctgcccatcactttggcctagggacagggctaattaatttgctttatacattttcttttactttccttttttcctttctggaggcatcacatgctggtgctgtgtctttatgaatgttttaaccattttcatggtggaagaattttatatttatgcagttgtacaattttatttttttctgcaagaaaaagtgtaatgtatgaaataaaccaaagtcacttgtttgaaaataaatctttattttgaactttataaaagcaatgcagtaccccatagactggtgttaaatgttgtctacagtgcaaaatccatgttctaacatatgtaataattgccaggagtacagtgctcttgttgatcttgtattcagtcaggttaaaacaacggacaataaaagaatgaaccgaattc

SEQ ID NO: 250 - protein, 303 aa, Homo sapien
MARGKAKEEGSWKKFIWNSEKKEFLGRTGGSWFKILLFYVIFYGCLAGIFIGTIQVMLLTISEFKPTYQDRVAPPGLTQIPQIQKTEISFRPNDPKSYEAYVLNIVRFLEKYKDSAQRDDMIFEDCGDVPSEPKERGDFNHERGERKVCRFKLEWLGNCSGLNDETYGYKEGKPCIIIKLNRVLGFKPKPPKNESLETYPVMKYNPNVLPVQCTGKRDEDKDKVGNVEYFGLGNSPGFPLQYYPYYGKLLQPKYLQPLLAVQFTNLTMDTEIRIECKAYGENIGYSEKDRFQGRFDVKIEVKS

SEQ ID NO: 251 - DNA, 2208 bp, Homo sapien; identical to SEQ ID NO: 249

SEQ ID NO: 252 - protein, 303 aa, Homo sapien; identical to SEQ ID NO: 250

SEQ ID NO: 253 - DNA, 2287 bp, Homo sapien
ggctgaggcagtggctccttgcacagcagctgcacgcgccgtggctccggatcttcttcgtctttgcagcgtagcccgagtcggtcagcgccagaggacctcagcagccatgtcgaagccccatagtgaagccgggactgccttcattcagacccagcagctgcacgcagccatggctgacacattcctggagcacatgtgccgcctggacattgattcaccacccatcacagcccggaacactggcatcatctgtaccattggcccagcttcccgatcagtggagacgttgaaggagatgattaagtctggaatgaatgtggctcgtctgaacttctctcatggaactcatgagtaccatgcggagaccatcaagaatgtgcgcacagccacggaaagctttgcttctgaccccatcctctaccggcccgttgctgtggctctagacactaaaggacctgagatccgaactgggctcatcaagggcagcggcactgcagaggtggagctgaagaagggagccactctcaaaatcacgctggataacgcctacatggaaaagtgtgacgagaacatcctgtggctggactacaagaacatctgcaaggtggtggaagtgggcagcaagatctacgtggatgatgggcttatttctctccaggtgaagcagaaaggtgccgacttcctggtgacggaggtggaaaatggtggctccttgggcagcaagaagggtgtgaaccttcctggggctgctgtggacttgcctgctgtgtcggagaaggacatccaggatctgaagtttggggtcgagcaggatgttgatatggtgtttgcgtcattcatccgcaaggcatctgatgtccatgaagttaggaaggtcctgggagagaagggaaagaacatcaagattatcagcaaaatcgagaatcatgagggggttcggaggtttgatgaaatcctggaggccagtgatgggatcatggtggctcgtggtgatctaggcattgagattcctgcagagaaggtcttccttgctcagaagatgatgattggacggtgcaaccgagctgggaagcctgtcatctgtgctactcagatgctggagagcatgatcaagaagccccgccccactcgggctgaaggcagtgatgtggccaatgcagtcctggatggagccgactgcatcatgctgtctggagaaacagccaaaggggactatcctctggaggctgtgcgcatgcagaacctgattgcccgtgaggcagaggctgccatctaccacttgcaattatttgaggaactccgccgcctggcgcccattaccagcgaccccacagaagccaccgccgtgggtgccgtggaggcctccttcaagtgctgcagtggggccataatcgtcctcaccaagtctggcaggtctgctcaccaggtggccagataccgcccacgtgcccccatcattgctgtgacccggaatccccagacagctcgtcaggcccacctgtaccgtggcatcttccctgtgctgtgcaaggacccagtccaggaggcctgggctgaggacgtggacctccgggtgaactttgccatgaatgttggcaaggcccgaggcttcttcaagaagggagatgtggtcattgtgctgaccggatggcgccctggctccggcttcaccaacaccatgcgtgttgttcctgtgccgtgatggaccccagagcccctcctccagcccctgtcccacccccttcccccagcccatccattaggccagcaacgcttgtagaactcactctgggctgtaacgtggcactggtaggttgggacaccagggaagaagatcaacgcctcactgaaacatggctgtgtttgcagcctgctctagtgggacagcccagagcctggctgccccatcatgtggccccacccaatcaagggaagaaggaggaatgctggactggaggcccctggagccagatggcaagagggtgacagcttcctttcctgtgtgtactctgtccagttcctttagaaaaaatggatgcccagaggactcccaaccctggcttggggtcaagaaacagccagcaagagttaggggccttagggcactgggctgttgttccattgaagccgactctggccctggcccttacttgcttctctagctctctaggcctctccagtttgcacctgtccccaccctccactcagctgtcctgcagcaaacactccaccctccaccttccattttcccccactactgcagcacctccaggcctgttgccgc

SEQ ID NO: 254 - protein, 531 aa, Homo sapien
MSKPHSEAGTAFIQTQQLHAAMADTFLEHMCRLDIDSPPITARNTGIICTIGPASRSVETLKEMIKSGMNVARLNFSHGTHEYHAETIKNVRTATESFASDPILYRPVAVALDTKGPEIRTGLIKGSGTAEVELKKGATLKITLDNAYMEKCDENILWLDYKNICKVVEVGSKIYVDDGLISLQVKQKGADFLVTEVENGGSLGSKKGVNLPGAAVDLPAVSEKDIQDLKFGVEQDVDMVFASFIRKASDVHEVRKVLGEKGKNIKIISKIENHEGVRRFDEILEASDGIMVARGDLGIEIPAEKVFLAQKMMIGRCNRAGKPVICATQMLESMIKKPRPTRAEGSDVANAVLDGADCIMLSGETAKGDYPLEAVRMQNLIAREAEAAIYHLQLFEELRRLAPITSDPTEATAVGAVEASFKCCSGAIIVLTKSGRSAHQVARYRPRAPIIAVTRNPQTARQAHLYRGIFPVLCKDPVQEAWAEDVDLRVNFAMNVGKARGFFKKGDVVIVLTGWRPGSGFTNTMRVVPVP

SEQ ID NO: 255 - DNA, 921 bp, Homo sapien
cgcgactcccacttccgcccttttggctctctgaccagcaccatggcggttggcaagaacaagcgccttacgaaaggcggcaaaaagggagccaagaagaaagtggttgatccattttctaagaaagattggtatgatgtgaaagcacctgctatgttcaatataagaaatattggaaagacgctcgtcaccaggacccaaggaaccaaaattgcatctgatggtctcaagggtcgtgtgtttgaagtgagtcttgctgatttgcagaatgatgaagttgcatttagaaaattcaagctgattactgaagatgttcagggtaaaaactgcctgactaacttccatggcatggatcttacccgtgacaaaatgtgttccatggtcaaaaaatggcagacaatgattgaagctcacgttgatgtcaagactaccgatggttacttgcttcgtctgttctgtgttggttttactaaaaaacgcaacaatcagatacggaagacctcttatgctcagcaccaacaggtccgccaaatccggaagaagatgatggaaatcatgacccgagaggtgcagacaaatgacttgaaagaagtggtcaataaattgattccagacagcattggaaaagacatagaaaaggcttgccaatctatttatcctctccatgatgtcttcgttagaaaagtaaaaatgctgaagaagcccaagtttgaattgggaaagctcatggagcttcatggtgaaggcagtagttctggaaaagccactggggacgagacaggtgctaaagttgaacgagctgatggatatgaaccaccagtccaagaatctgtttaaagttcagacttcaaatagtggcaaataaaaagtgctatttgtgatggtttgcttctgaaaaaaaaaaaaaaaaaaaaaaaaaaa

SEQ ID NO: 256 - protein, 264 aa, Homo sapien [sequence omitted]

SEQ ID NO: 257 - DNA, 2130 bp, Homo sapien
tgaaccgaggcaagggggcgcggcgcacgcagtatggcgcccaacatctacttggttcgccagcggatcagtcgactcggccagaggatgtccggcttccagatcaacctcaacccgctcaaggagccactcggcttcatcaaggtcctcgagtggattgcttctatctttgcttttgccacctgtggaggttttaagggccaaacagaaattcaagtgaattgtcctcctgcagttactgagaataaaactgttacagctacttttggttatccattcaggttgaatgaggcatcatttcagccacctccaggtgtaaacatatgtgatgtaaattggaaagattacgtcctcataggcgattactcttcttctgcacaattctatgttacctttgcagtctttgtgttcctgtactgcattgctgcccttctgctttatgttggctacacgagtctgtatctggatagtcgtaaacttcctatgatagactttgttgttacacttgttgccacttttttgtggttggtgagcacttcagcctgggctaaagctctgacagatattaaaatagctactggtcacaatattattgatgaacttccgccttgtaagaagaaagcagtactgtgttactttggctctgtgaccagtatgggatccctaaatgtatctgtgatatttggctttctaaatatgatactctggggaggaaatgcttggtttgtgtacaaggagaccagcctacacagtccatcaaatacatctgcccctcatagccaaggaggtattccacctcctaccggaatataattaaagggagaaatacactgtatgaagtatatgttgatactatgacatgttgccaacaccttgagaagcattatttgtttctaataaaagtaatggctttgtcaatatattggtgggtttaaaactttgctgcttttttacataaagcctgtgcctttcctagaaagttaagatgtaaatgtattctcacatgtaaatttgaaagttcaggggtctattatgaaatggattacacattttaaatgaacccataatttttttcactaaagctgtttgccctccaaagtgtttacacctaagcctaacatgtatcgctcattcagaaaactgttatattgtcataccatagtaggaagaaaaacctttatttggaatatacactactgtaagtttgtacagatcatatacctaccacctgtctttgcttaaagagccttgattacataaatatgtaggaaaaaacatattgagttcaaaatttatatctaacattgtttatgttatgattttttttaattgcaaagactaggtgtatatttttttctgtttttctaaatgacccgtggtacttaataggtgtactaaaattgtgttgggagcagggatttggaaatttctgagagatgtgtagttaattagtaattctgtttcatgagatatgatctgttatgctagtggtttaataggcttgctatgtaagtagaacgtggctcaactagatatcttatatgtatgggcattacctcttagtgatatttgtttcctgtcctttgttgctcatgctgtttaagtgcaggctgagacccagcctctttgtaagtacagtaaaataatccaccgttttttacagaccctagtcaaagggttaaaaaaattaagattgctttccatgtttgaaatttaccattgagagtcaatgaagttgctattttgagtttagcattgatattgtgaaaataagtgcaatttggatttcatgtttcttaatattcattcttgtttcacaaatgaatgattaaggaattatgcatcataaaggaacctaagtgaggtatatgatgagtgtattgtctttgcacacacatataggtatattctgaatacaagcttattcattttgcttcctaatctttttgttgtacagggattcaggtttcttattcttacaacatgattgtttatatgtgaagcacatcttgctgttgccttatttttgatgcttttattcatgacaagaattgtcaatataagaatgtatatctttgccgcaaccaatttaataaaggagttgaaagaaaaaaaaaaaaaaaaaaaaaa

SEQ ID NO: 258 - protein, 259 aa, Homo sapien
MAPNIYLVRQRISRLGQRMSGFQINLNPLKEPLGFIKVLEWIASIFAFATCGGFKGQTEIQVNCPPAVTENKTVTATFGYPFRLNEASFQPPPGVNICDVNWKDYVLIGDYSSSAQFYVTFAVFVFLYCIAALLLYVGYTSLYLDSRKLPMIDFVVTLVATFLWLVSTSAWAKALTDIKIATGHNIIDELPPCKKKAVLCYFGSVTSMGSLNVSVIFGFLNMILWGGNAWFVYKETSLHSPSNTSAPHSQGGIPPPTGI

SEQ ID NO: 259 - DNA, 2130 bp, Homo sapien; identical to SEQ ID NO: 257

SEQ ID NO: 260 - protein, 259 aa, Homo sapien; identical to SEQ ID NO: 258

SEQ ID NO: 261 - DNA, 2644 bp, Homo sapien
ccgaggccaagtcccgggcgctagcccacctcccacccgcctcttggctcctctcctctaggccgtcgctttcgggttctctcatcgcttcgtcgttcgccaatgtttgaggagaaggccagcagtccttcagggaagatgggaggcgaggagaagccgattggtgctggtgaagagaagcaaaaggaaggaggcaaaaagaagaacaaagaaggatctggagatggaggtcgagctgagttgaatccttggcctgaatatatttacacacgtcttgagatgtataatatactaaaagcagaacatgattccattctggcagaaaaggcagaaaaagatagcaagccaattaaagtcactttgcctgatggtaaacaggttgatgcggaatcttggaaaactacaccatatcaaattgcctgtggaattagtcaaggcctggccgacaacaccgttattgctaaagtaaataatgttgtgtgggacctggaccgccctctggaagaagattgtaccttggagcttctcaagtttgaggatgaggaagctcaggcagtgtattggcactctagtgctcacataatgggtgaaggcatggaaagagtctatggtggatgtttatgctacggtccgccaatagaaaatggattctattatgacatgtacctcgaagaagggggtgtgtctagcaatgatttctcttctctggaggctttgtgtaagaaaatcattaaagaaaaacaagcttttgaaagactggaagttaagaaagaaactttactggcaatgtttaagtacaacaagttcaaatgccggatattgaatgaaaaggtgaatactccaactaccacagtctatagatgtggccctttgatagatctctgccggggtcctcatgttagacacacgggcaaaattaaggctttaaaaatacacaaaaattcctccacgtactgggaaggcaaagcagatatggagactctccagagaatttatggcatttcattcccagatcctaaaatgttgaaagagtgggagaagttccaagaggaagctaaaaaccgagatcataggaaaattggcagggaccaagaactatatttctttcatgaactcagccctggaagttgcttttttctgccaaaaggagtctatatttataatgcacttattgaattcattaggagcgaatataggaaaagaggattccaggaggtagtcaccccaaacatcttcaacagccgactctggatgacctcgggccactggcagcactacagcgagaacatgttctcctttgaggtggagaaggagctgtttgccctgaaacccatgaactgcccaggacactcccttatgtttgatcatcggccaaggtcctggcgagaactgcctctgcggctagctgattttgggggtcttcataggaacgagctgtctggagcactcacaggactcacccgggtacgaagattccaacaggatgatgctcacatattctgtgccatggagcagattgaagatgaaataaaaggttgtttggattttctacgtacggtatatagcgtatttggattttcttttaaactaaacctttctactcgcccggaaaaattccttggagatatcgaagtatgggatcaagctgagaaacaacttgaaaacagtctgaatgaatttggtgaaaagtgggagttaaactctggagatggagctttctatggcccaaagattgacatacagattaaagatgcgattgggcggtaccaccagtgtgcaaccatccagctggatttccagttgcccatcagatttaatcttacttatgtaagccatgatggtgaggataagaaaaggccagtgattgttcatcgagccatcttgggatcagtggaaagaatgattgctatcctcacagaaaactatgggggcaaattggcccccttttggctgtcccctcgccaggtaatggtagttccagtgggaccaacctgtgatgaatatgcccaaaacgtacgacaacaattccacgatgccaaattcatggcagacattgatctggatccaggctgtacattgaataaaaagattcgaaatgcacagttagcacagtataacttcattttagttgttggtgaaaaagagaaaatcactggcactgttaatatccgcacaagagacaataaggtccacggggaacgcaccatttctgaaactatcgagcggctacagcagctcaaagagttccgcagcaaacaggcagaagaagaattttaatgaaaaaattacccagattggctccatggaaaaggaggaacagcgtttccgtaaaattgactttgtactcgaaaacgtcaatttatattgaacttggaggaggagtttggcaaagtctgaaataggtcaacctgcaggcgtaactatttttgacctagtcagtttttaaacaatgtgcatttgaaggagttaattaaaagagagccaataaaatgattttactcattcagtatctgagtactggaagtgaaacatgaggaatgctttagtgtaatgtgggagaacttttttgtaaatttaatgcaattgaaaaagttttcaaattcaattaagataactagaattggttatggtgtaacccgaattc

SEQ ID NO: 262 - protein, 712 aa, Homo sapien
MGGEEKPIGAGEEKQKEGGKKKNKEGSGDGGRAELNPWPEYIYTRLEMYNILKAEHDSILAEKAEKDSKPIKVTLPDGKQVDAESWKTTPYQIACGISQGLADNTVIAKVNNVVWDLDRPLEEDCTLELLKFEDEEAQAVYWHSSAHIMGEGMERVYGGCLCYGPPIENGFYYDMYLEEGGVSSNDFSSLEALCKKIIKEKQAFERLEVKKETLLAMFKYNKFKCRILNEKVNTPTTTVYRCGPLIDLCRGPHVRHTGKIKALKIHKNSSTYWEGKADMETLQRIYGISFPDPKMLKEWEKFQEEAKNRDHRKIGRDQELYFFHELSPGSCFFLPKGVYIYNALIEFIRSEYRKRGFQEVVTPNIFNSRLWMTSGHWQHYSENMFSFEVEKELFALKPMNCPGHSLMFDHRPRSWRELPLRLADFGGLHRNELSGALTGLTRVRRFQQDDAHIFCAMEQIEDEIKGCLDFLRTVYSVFGFSFKLNLSTRPEKFLGDIEVWDQAEKQLENSLNEFGEKWELNSGDGAFYGPKIDIQIKDAIGRYHQCATIQLDFQLPIRFNLTYVSHDGEDKKRPVIVHRAILGSVERMIAILTENYGGKLAPFWLSPRQVMVVPVGPTCDEYAQNVRQQFHDAKFMADIDLDPGCTLNKKIRNAQLAQYNFILVVGEKEKITGTVNIRTRDNKVHGERTISETIERLQQLKEFRSKQAEEEF

SEQ ID NO: 263 - DNA, 670 bp, Homo sapien
cggccacgaggcggaatcccttctgctctcccagcgcagcgccgccgcccggcccctccagcttcccggaccatggccaacctggagcgcaccttcatcgccatcaagccggacggcgtgcagcgcggcctggtgggcgagatcatcaagcgcttcgagcagaagggattccgcctcgtggccatgaagttcctccgggcctctgaagaacacctgaagcagcactacattgacctgaaagaccgaccattcttccctgggctggtgaagtacatgaactcagggccggttgtggccatggtctgggaggggctgaacgtggtgaagacaggccgagtgatgcttggggagaccaatccagcagattcaaagccaggcaccattcgtggggacttctgcattcaggttggcaggaacatcattcatggcagtgattcagtaaaaagtgctgaaaaagaaatcagcctatggtttaagcctgaagaactggttgactacaagtcttgtgctcatgactgggtctatgaataagaggtggacacaacagcagtctccttcagcacggcgtggtgtgtccctggacacagctcttcattccattgacttagaggcaacaggattgatcattcttttatagagcatatttgccaataaagcttttggaagccgg

SEQ ID NO: 264 - protein, 152 aa, Homo sapien
MANLERTFIAIKPDGVQRGLVGEIIKRFEQKGFRLVAMKFLRASEEHLKQHYIDLKDRPFFPGLVKYMNSGPVVAMVWEGLNVVKTGRVMLGETNPADSKPGTIRGDFCIQVGRNIIHGSDSVKSAEKEISLWFKPEELVDYKSCAHDWVYE

SEQ ID NO: 265 - DNA, 2493 bp, Homo sapien
aactgagggggtggctagcagcaaacaagtatggagctagcacaagagctaagaaataacctccatccctaccactcagcacacaacccctacggtcccagcacactgagccctggctcccaagggctgcctcctgacagctccgtcatggcactttttaacgcttcagcaacaaacaccaggcagctgttgccactggcctcctacccctactctggggcttgggggtcactccccccaggacttaccttccaaaacaaactttcttcactttgtattataggtacaagacagcgacttacgtatcttttctcctcctccctagtgttcctccccattttttcagaaaacacttctgactcctgtcccttccccttctgcttttggtcagtccctgttcttgagcctcttttctcctctccccaggatgcagaaagtggtgaacccaggaactgaggaaggaggtttccagttcatttacattaagggccctgggggagaataaagctcagagcaggagggagtaaggaaacatttcctttttgtttttatttggttggagtttctcatatttgaaaacattgcggtatccatgatttggccttgtggagggtgttcctaggtagaggtgagaatggggaggcaagatctcaggcaccaggcaggaggtgccttgtaagctaactgggcggaggtggaggtgcagtgtcaactgtggctctgtaactcttcaaaggcccagtttcccctcacgcagcctcttaggtagcgtttcccctaatcgtgggggttggaccccagagtcttccaaagaattttcactggttgcctgcatctttggctctgctgtgatctgattggaggagggacagtttctggtacccatcctctgatttatacatatgcattttttcccctctggcctttagatggcctcagccccagccaccatatacccctgcagtttgcactttaattgatggtagttcagttggggtacttgttttatggaagttttgattgatttacttgccctcccaccttctttttaattcaatgaaatctgaggttaatgcgaggttcgaggagaggttatagataaaactaccagtggcagctactcaagtcctatctccactgttagcttcctccaactctaattattaacctatattcttgccaagctaactattgactataggtttgcctttcctggagaattaattgagcaattgaggagtgtctcaggatagcacaggccaaggtaggggagtaaaaaggaggtcaggcaaaagggaggagttttctgtcctttcccaggtttcacactcaatttgatatccattaccatgtcttttctacttccttgtaaataggtatgatctttattcccactgtacagtctgttctatcctctgcctcccatcaggccctgtttctttgttcctttgttaatatcttgaatttagtccctccatccttaatccccccatccctccccatcatgcaaccagtggtttaatccatgtaccaataggggctagtaccacagaggcctcctgtggtgccctcgtatcataccacctgttcctgtggagagggaatgaccggcactgaaggtaccttacaactggctcatattatcagaggaccttggtcctttctaaatctctagtctctcttcatatccttcatcaggtgttttaagatgtctctgagaagccatcaaggcaaaagagaactttaagttccttgttccagcccggagttttgggaaagaaagaaaggaaaggtcacagtgacctaggattggaaccttcctgcccttttggcttgcagactgccttctatcccagaacagctgagaaatctatgaagctgagattctgaaggacccagcttaggttcttccacttaaggcctcaattcccttccttttccaaggggcagccttagttcccatggccctgaaacacacacatttcccccttcctttcccagaagccactggccccccatagcacccagtgcatcctttttacaagtggaagaactaggatggctttccaaagtcttctagaaatgaagttctttctctgtgcagctttcccccttggagcaggagtgaagatgtttcattatcttgggcctgggaaaccacttccccaggcttctccctccccccacccccataggaacaggatttggccttagcttcgtgggcctatcggctgccttccctctacttcctaccacctcttctgccttcctttgagctctgttgggcttggggatcttagttttcttttgtttatttcccagctcatttttttcttctggtcagtttttttaagggggggtgttgtggttttttgtttttgttttgcttctgagaaagcatttgcctttcttcctctcccaacataacaatcgtggtaacagaatgcgactgctgatttaccgatgtatttaatgtaagtaaaaaaaggaaaa

SEQ ID NO: 266 - protein, 141 aa, Homo sapien [sequence omitted]

SEQ ID NO: 267 - DNA, 1793 bp, Homo sapien
ggcaccgcgcgggacggagcttggctgttggtcggtgggttcccgtgcggcggcggccaaggaggaggagacacagttggagcagctccgtgggctgactggggcgaggcctcagcagcgcgagcttgagtgcggccgagcctgcggcgccttcccctgcgggtggggacgagcgggccccgcggcgtcatcggcggcgaggagccgccgcgcctcggcctagcatgtcggaagcgggcgaggagcagcccatggagacgacgggcgccaccgagaacggacatgaggccgtccccgaagcgagtcgcggccggggctggacgggcgccgcggcggggctggaggcgcgaccgccgcgcccccgagcgggaatcagaacggcgccgagggaccagatcaacgccagcaagaacgaggaggacgcgggaaaaatgttcgttggtggcctgagctgggatactagcaaaaaagatttaaaagactattttactaaatttggagaggtcgttgactgtacaataaaaatggatcccaacactggacggtcaagagggtttgggtttatcctgttcaaagatgcagccagtgtggagaaggtcctagaccagaaggagcacaggctggatggccgtgtcattgaccctaaaaaggccatggctatgaagaaggacccggtcaagaaaatcttcgttgggggtctgaatcctgaaagtcccactgaggaaaagatcagggagtactttggcgagtttggggagattgaggccattgaattgccaatggatccaaagttgaacaaaagacgaggttttgtgtttatcacctttaaagaagaagaacccgtgaagaaggttctggagaaaaagttccatactgtcagtggaagcaagtgtgagatcaaggtggcccagcccaaagaagtctatcagcagcagcagtatggctctgggggccgtggaaaccgcaaccgagggaaccgaggcagcggaggtggtggtggaggtggaggtcagagtcagagttggaatcagggctacggcaactactggaaccagggctacggctaccagcagggctacgggcctggctatggcggctacgactactcgccctatggctattacggctacggccccggctacgactacagtcagggtagtacaaactacggcaagagccagcgacgtggtggccatcagaataactacaagccatactgaggcggccaagggagcgaccaactgatcgcacacatgctttgtttggatatggagtgaacacaattatgtaccaaatttaacttggcaaactttctattgcctgtcccatgtgcatcttatttaaaatttcccccatggaaatcactctcctgttgactatttccagagctctaggtgtttaggcagcgtgtggtgtctgagaggccatagcgccatcatgggctgatttttattaccaggtcccccagaagcaggtgagaggctctgcttcctgctgccgctctgcagcctggacctgtggaccctggttgtaaagagtaaattgtatcttaggaaaccagtgtcacctttttttcaccttttaattttatattatttgcgtcatacatttcctgtaacggaagtgttaattttactgtactttttggtaccccttttgggaatctaatgtattgtaaggtattttacacgtgtcctgattttgccacaacctggatattgaagctatccaagcttttgaaataaaatttaaaaaccccaagcctgggtgagtgtgggaaaaaaaaaaaaaaa

SEQ ID NO: 268 - protein, 331 aa, Homo sapien
MSEAGEEQPMETTGATENGHEAVPEASRGRGWTGAAAGLEARPPRPRAGIRTAPRDQINASKNEEDAGKMFVGGLSWDTSKKDLKDYFTKFGEVVDCTIKMDPNTGRSRGFGFILFKDAASVEKVLDQKEHRLDGRVIDPKKAMAMKKDPVKKIFVGGLNPESPTEEKIREYFGEFGEIEAIELPMDPKLNKRRGFVFITFKEEEPVKKVLEKKFHTVSGSKCEIKVAQPKEVYQQQQYGSGGRGNRNRGNRGSGGGGGGGGQSQSWNQGYGNYWNQGYGYQQGYGPGYGGYDYSPYGYYGYGPGYDYSQGSTNYGKSQRRGGHQNNYKPY

SEQ ID NO: 269 - DNA, 3116 bp, Homo sapien
agcgctcagatacgcgacgcgtagcaggcggggaccgaacgggtgcctcagtgtccttcccctcccctcgcctggcctcgccgtcctctccccgcagccggaccggaactatgtgatcccggaagttccggggcctttgctgtgtgggataaacagtaatggcggaggctgcaactcccggaacaacagccacaacatcaggagcaggagcggcagcggcgacggcggcagcagcctcccccaccccgatccccacagtcaccgccccgtccctgggggcgggcggagggggcggcggcagcgacggcagcggcggcggctggactaaacaggtcacctgcaggtattttatgcatggggtttgtaaggaaggagacaactgtcgctactcgcatgacctctctgacagtccgtatagtgtagtgtgcaagtattttcagcgagggtactgtatttatggagaccgctgcagatatgaacatagcaaaccattgaaacaggaagaagcaactgctacagagctaactacaaagtcatcccttgctgcttcctcaagtctctcatcgatagttggaccacttgttgaaatgaatacaggcgaagctgagtcaagaaattcaaactttgcaactgtaggagcaggttcagaggactgggtgaatgctattgagtttgttcctgggcaaccctactgtggccgtactgcgccttcctgcactgaagcacccctgcagggctcagtgaccaaggaagaatcagagaaagagcaaaccgccgtggagacaaagaagcagctgtgcccctatgctgcagtgggagagtgccgatacggggagaactgtgtgtatctccacggagattcttgtgacatgtgtgggctgcagctcctgcatccaatggatgctgcccagagatcgcagcatatcaaatcgtgcattgaggcccatgagaaggacatggagctctcatttgccgtgcagcgcagcaaggacatggtgtgtgggatctgcatggaggtggtctatgagaaagccaaccccagtgagcgccgcttcgggatcctctccaactgcaaccacacctactgtctcaagtgcattcgcaagtggaggagtgctaagcaatttgagagcaagatcataaagtcctgcccagaatgccggatcacatctaactttgtcattccaagtgagtactgggtggaggagaaagaagagaagcagaaactcattctgaaatacaaggaggcaatgagcaacaaggcgtgcaggtattttgatgaaggacgtgggagctgcccatttggagggaactgtttttacaagcatgcgtaccctgatggccgtagagaggagccacagagacagaaagtgggaacatcaagcagataccgggcccaacgaaggaaccacttctgggaactcattgaggaaagagagaacagcaacccctttgacaacgatgaagaagaggttgtcacctttgagctgggcgagatgttgcttatgcttttggctgcaggtggggacgacgaactaacagactctgaagatgagtgggacttgtttcatgatgagctggaagatttttatgacttggatctatagcaaccttgcgtggcgtgtgaactggtctgctgacctcagacagcagctgtcccctgtggtggtgtggcagtgcctgtgttctctcctaggcaggcctctcaactccaggtgctgtcctaagaatttttacccagggcctgtcttctcaacccctcacctttccctgaggagtgtgttgttttccctgttgaaaaaagttacaaaaataaatcttaaagttagttttttgtaacacgaatttaactgtcagacagttagtgtaggtgtgttgcgtcatctgttttcaaccagattgcatttatggacttttcacacactcattttgaggaccccaggttcaaaagtaaaagcagtggccctgctttggggtccaagaataggagtgatgggtgaagggacctaagctggccaatagccctctgccccagacatgggatgtggatccttgaggtttctggtgaaatctgcacatctgtgtttttatatctgttccctaccctgtaatccctaccacgtgcacttgttctgtggttttggtctcttgtttaattgcacacaagtaatactactgggtaaccagaatcaggtgtgaatgtgttgagattttttactgttttgcatgataggaaaattgagaaagaatacgtataaaagatagagaggcataacatcaatgcagagttggaagttggctcccaagggctgacatggtgtgagtgtgtgggtgtgtgataagcttctcatccctgcatagatgcagtattcttagccttagtagaaaaacctggtttagtggtttaagccttgtgtggcagatagatcttaaagggcaaagcagtatattggtagttgtcaatatagcagtgctagctctgtctatataaatagagaaatggggttagccatagaggttaaaactacctggttatcccatataataacacaaactgggtcttggatacacagttgtatttaatgttttacgatctagcctttccagtacaggcactttctgagaaacctttgtcctcacttgaggcattttgttgtcgggtttttgtgtttgtttttgtgggtatttgcctcattccacccctgagctttcaggtagacagacgtgattcaaaactctgttctaaggtgtttattgtagtggagtaatgggtttgcagtgataagtcatacttttccaccgaaagggagggcttgggaatccctgagattagctaaagttaagttgttggaagaattccttgattggaaattgtacctttgtgttttgttgctctgtttcctgaaaataactcggggatgctcctggtttgtccatctactgctttgattccttggatcccacccattctttcactttaagaaaaaacaaataattgttgcagaggtctctgtattttgcagctgcccttttgtaagaagcacttttcccaaataaaacaattaaaaaaaaaaaaaaaaaaaaaaaaaaaaaaaaaaaaaaaaaaaaaaaaaaaa

SEQ ID NO: 270 - protein, 482 aa, Homo sapien
MAEAATPGTTATTSGAGAAAATAAAASPTPIPTVTAPSLGAGGGGGGSDGSGGGWTKQVTCRYFMHGVCKEGDNCRYSHDLSDSPYSVVCKYFQRGYCIYGDRCRYEHSKPLKQEEATATELTTKSSLAASSSLSSIVGPLVEMNTGEAESRNSNFATVGAGSEDWVNAIEFVPGQPYCGRTAPSCTEAPLQGSVTKEESEKEQTAVETKKQLCPYAAVGECRYGENCVYLHGDSCDMCGLQLLHPMDAAQRSQHIKSCIEAHEKDMELSFAVQRSKDMVCGICMEVVYEKANPSERRFGILSNCNHTYCLKCIRKWRSAKQFESKIIKSCPECRITSNFVIPSEYWVEEKEEKQKLILKYKEAMSNKACRYFDEGRGSCPFGGNCFYKHAYPDGRREEPQRQKVGTSSRYRAQRRNHFWELIEERENSNPFDNDEEEVVTFELGEMLLMLLAAGGDDELTDSEDEWDLFHDELEDFYDLDL

SEQ ID NO: 271 - DNA, 1249 bp, Homo sapien
ggcacgagccagggtttcctcttcaagtaggtctaaaacattttttttctcattgacttccttcctgttctaactgccagtactcagaagtcagagttgagagacagaggcaccccggacagagacgtgaagcactgaataaatagatcagaatgactgaaaaagccccagagccacatgtggaggaggatgacgatgatgagctggacagcaagctcaattataagcctccaccacagaagtccctgaaagagctgcaggaaatggacaaagatgatgagagtctaattaagtacaagaaaacgctgctgggagatggtcctgtggtgacagatccgaaagcccccaatgtcgttgtcacccggctcaccctggtttgtgagagtgccccgggaccaatcaccatggaccttactggagatctggaagccctcaaaaaggaaaccattgtgttaaaggaaggttctgaatatagagtcaaaattcacttcaaagtgaacagggatattgtgtcaggcctgaaatacgttcagcacacctacaggactggggtgaaagtggataaagcaacatttatggttggcagctatggacctcggcctgaggagtatgagttcctcactccagttgaggaggctcccaagggcatgctggcccgaggcacgtaccacaacaagtccttcttcaccgacgatgacaagcaagaccacctcagctgggagtggaacctgtcgattaagaaggagtggacagaatgaatgcatccaccccgttccccacccttgccacctggaagaattctctcaggcgtgttcagcaccctgtccctcctccctgtccacagctgggtccctcttcaacactgccacatttccttattgatcgatcttttcccaccctgtcactcaacgtggtccctagaacaagaggcttaaaaccgggctttcacccaacctgctccctctgatcctccatcagggccagatcttccacgtctccatctcagtacacaatcatttaatatttccctgtcttacccctattcaagcaactagaggccagaaaatgggcaaattatcactaacaggtctttgactcaggttccagtagttcattctaatgcctagattcttttgtggttgttgctggcccaatgagtccctagtcacatcccctgccagagggagttcttcttttgtgagagacactgtaaacgacacaagagaacaagaataaaacaataactgtg

SEQ ID NO: 272 - protein, 201 aa, Homo sapien
MTEKAPEPHVEEDDDDELDSKLNYKPPPQKSLKELQEMDKDDESLIKYKKTLLGDGPVVTDPKAPNVVVTRLTLVCESAPGPITMDLTGDLEALKKETIVLKEGSEYRVKIHFKVNRDIVSGLKYVQHTYRTGVKVDKATFMVGSYGPRPEEYEFLTPVEEAPKGMLARGTYHNKSFFTDDDKQDHLSWEWNLSIKKEWTE

SEQ ID NO: 273 - DNA, 5698 bp, Homo sapien
aggttcaagtggagctctcctaaccgacgcgcgtctgtggagaagcggcttggtcgggggtggtctcgtggggtcctgcctgtttagtcgctttcagggttcttgagccccttcacgaccgtcaccatggaagtgtcaccattgcagcctgtaaatgaaaatatgcaagtcaacaaaataaagaaaaatgaagatgctaagaaaagactgtctgttgaaagaatctatcaaaagaaaacacaattggaacatattttgctccgcccagacacctacattggttctgtggaattagtgacccagcaaatgtgggtttacgatgaagatgttggcattaactatagggaagtcacttttgttcctggtttgtacaaaatctttgatgagattctagttaatgctgcggacaacaaacaaagggacccaaaaatgtcttgtattagagtcacaattgatccggaaaacaatttaattagtatatggaataatggaaaaggtattcctgttgttgaacacaaagttgaaaagatgtatgtcccagctctcatatttggacagctcctaacttctagtaactatgatgatgatgaaaagaaagtgacaggtggtcgaaatggctatggagccaaattgtgtaacatattcagtaccaaatttactgtggaaacagccagtagagaatacaagaaaatgttcaaacagacatggatggataatatgggaagagctggtgagatggaactcaagcccttcaatggagaagattatacatgtatcacctttcagcctgatttgtctaagtttaaaatgcaaagcctggacaaagatattgttgcactaatggtcagaagagcatatgatattgctggatccaccaaagatgtcaaagtctttcttaatggaaataaactgccagtaaaaggatttcgtagttatgtggacatgtatttgaaggacaagttggatgaaactggtaactccttgaaagtaatacatgaacaagtaaaccacaggtgggaagtgtgtttaactatgagtgaaaaaggctttcagcaaattagctttgtcaacagcattgctacatccaagggtggcagacatgttgattatgtagctgatcagattgtgactaaacttgttgatgttgtgaagaagaagaacaagggtggtgttgcagtaaaagcacatcaggtgaaaaatcacatgtggatttttgtaaatgccttaattgaaaacccaacctttgactctcagacaaaagaaaacatgactttacaacccaagagctttggatcaacatgccaattgagtgaaaaatttatcaaagctgccattggctgtggtattgtagaaagcatactaaactgggtgaagtttaaggcccaagtccagttaaacaagaagtgttcagctgtaaaacataatagaatcaagggaattcccaaactcgatgatgccaatgatgcagggggccgaaactccactgagtgtacgcttatcctgactgagggagattcagccaaaactttggctgtttcaggccttggtgtggttgggagagacaaatatggggttttccctcttagaggaaaaatactcaatgttcgagaagcttctcataagcagatcatggaaaatgctgagattaacaatatcatcaagattgtgggtcttcagtacaagaaaaactatgaagatgaagattcattgaagacgcttcgttatgggaagataatgattatgacagatcaggaccaagatggttcccacatcaaaggcttgctgattaattttatccatcacaactggccctctcttctgcgacatcgttttctggaggaatttatcactcccattgtaaaggtatctaaaaacaagcaagaaatggcattttacagccttcctgaatttgaagagtggaagagttctactccaaatcataaaaaatggaaagtcaaatattacaaaggtttgggcaccagcacatcaaaggaagctaaagaatactttgcagatatgaaaagacatcgtatccagttcaaatattctggtcctgaagatgatgctgctatcagcctggcctttagcaaaaaacagatagatgatcgaaaggaatggttaactaatttcatggaggatagaagacaacgaaagttacttgggcttcctgaggattacttgtatggacaaactaccacatatctgacatataatgacttcatcaacaaggaacttatcttgttctcaaattctgataacgagagatctatcccttctatggtggatggtttgaaaccaggtcagagaaaggttttgtttacttgcttcaaacggaatgacaagcgagaagtaaaggttgcccaattagctggatcagtggctgaaatgtcttcttatcatcatggtgagatgtcactaatgatgaccattatcaatttggctcagaattttgtgggtagcaataatctaaacctcttgcagcccattggtcagtttggtaccaggctacatggtggcaaggattctgctagtccacgatacatctttacaatgctcagctctttggctcgattgttatttccaccaaaagatgatcacacgttgaagtttttatatgatgacaaccagcgtgttgagcctgaatggtacattcctattattcccatggtgctgataaatggtgctgaaggaatcggtactgggtggtcctgcaaaatccccaactttgatgtgcgtgaaattgtaaataacatcaggcgtttgatggatggagaagaacctttgccaatgcttccaagttacaagaacttcaagggtactattgaagaactggctccaaatcaatatgtgattagtggtgaagtagctattcttaattctacaaccattgaaatctcagagcttcccgtcagaacatggacccagacatacaaagaacaagttctagaacccatgttgaatggcaccgagaagacacctcctctcataacagactatagggaataccatacagataccactgtgaaatttgttgtgaagatgactgaagaaaaactggcagaggcagagagagttggactacacaaagtcttcaaactccaaactagtctcacatgcaactctatggtgctttttgaccacgtaggctgtttaaagaaatatgacacggtgttggatattctaagagacttttttgaactcagacttaaatattatggattaagaaaagaatggctcctaggaatgcttggtgctgaatctgctaaactgaataatcaggctcgctttatcttagagaaaatagatggcaaaataatcattgaaaataagcctaagaaagaattaattaaagttctgattcagaggggatatgattcggatcctgtgaaggcctggaaagaagcccagcaaaaggttccagatgaagaagaaaatgaagagagtgacaacgaaaaggaaactgaaaagagtgactccgtaacagattctggaccaaccttcaactatcttcttgatatgcccctttggtatttaaccaaggaaaagaaagatgaactctgcaggctaagaaatgaaaaagaacaagagctggacacattaaaaagaaagagtccatcagatttgtggaaagaagacttggctacatttattgaagaattggaggctgttgaagccaaggaaaaacaagatgaacaagtcggacttcctgggaaaggggggaaggccaaggggaaaaaaacacaaatggctgaagttttgccttctccgcgtggtcaaagagtcattccacgaataaccatagaaatgaaagcagaggcagaaaagaaaaataaaaagaaaattaagaatgaaaatactgaaggaagccctcaagaagatggtgtggaactagaaggcctaaaacaaagattagaaaagaaacagaaaagagaaccaggtacaaagacaaagaaacaaactacattggcatttaagccaatcaaaaaaggaaagaagagaaatccctggtctgattcagaatcagataggagcagtgacgaaagtaattttgatgtccctccacgagaaacagagccacggagagcagcaacaaaaacaaaattcacaatggatttggattcagatgaagatttctcagattttgatgaaaaaactgatgatgaagattttgtcccatcagatgctagtccacctaagaccaaaacttccccaaaacttagtaacaaagaactgaaaccacagaaaagtgtcgtgtcagaccttgaagctgatgatgttaagggcagtgtaccactgtcttcaagccctcctgctacacatttcccagatgaaactgaaattacaaacccagttcctaaaaagaatgtgacagtgaagaagacagcagcaaaaagtcagtcttccacctccactaccggtgccaaaaaaagggctgccccaaaaggaactaaaagggatccagctttgaattctggtgtctctcaaaagcctgatcctgccaaaaccaagaatcgccgcaaaaggaagccatccacttctgatgattctgactctaattttgagaaaattgtttcgaaagcagtcacaagcaagaaatccaagggggagagtgatgacttccatatggactttgactcagctgtggctcctcgggcaaaatctgtacgggcaaagaaacctataaagtacctggaagagtcagatgaagatgatctgttttaaaatgtgaggcgattattttaagtaattatcttaccaagcccaagactggttttaaagttacctgaagctcttaacttcctcccctctgaatttagtttggggaaggtgtttttagtacaagacatcaaagtgaagtaaagcccaagtgttctttagctttttataatactgtctaaatagtgaccatctcatgggcattgttttcttctctgctttgtctgtgttttgagtctgctttcttttgtctttaaaacctgatttttaagttcttctgaactgtagaaatagctatctgatcacttcagcgtaaagcagtgtgtttattaaccatccactaagctaaaactagagcagtttgatttaaaagtgtcactcttcctccttttctactttcagtagatatgagatagagcataattatctgttttatcttagttttatacataatttaccatcagatagaactttatggttctagtacagatactctactacactcagcctcttatgtgccaagtttttctttaagcaatgagaaattgctcatgttcttcatcttctcaaatcatcagaggccaaagaaaaacactttggctgtgtctataacttgacacagtcaatagaatgaagaaaattagagtagttatgtgattatttcagctcttgacctgtcccctctggctgcctctgagtctgaatctcccaaagagagaaaccaatttctaagaggactggattgcagaagactcggggacaacatttgatccaagatcttaaatgttatattgataaccatgctcagcaatgagctattagattcattttgggaaatctccataatttcaatttgtaaactttgttaagacctgtctacattgttatatgtgtgtgacttgagtaatgttatcaacgtttttgtaaatatttactatgtttttctattagctaaattccaacaattttgtactttaataaa

SEQ ID NO: 274 - protein, 1531 aa, Homo sapien
MEVSPLQPVNENMQVNKIKKNEDAKKRLSVERIYQKKTQLEHILLRPDTYIGSVELVTQQMWVYDEDVGINYREVTFVPGLYKIFDEILVNAADNKQRDPKMSCIRVTIDPENNLISIWNNGKGIPVVEHKVEKMYVPALIFGQLLTSSNYDDDEKKVTGGRNGYGAKLCNIFSTKFTVETASREYKKMFKQTWMDNMGRAGEMELKPFNGEDYTCITFQPDLSKFKMQSLDKDIVALMVRRAYDIAGSTKDVKVFLNGNKLPVKGFRSYVDMYLKDKLDETGNSLKVIHEQVNHRWEVCLTMSEKGFQQISFVNSIATSKGGRHVDYVADQIVTKLVDVVKKKNKGGVAVKAHQVKNHMWIFVNALIENPTFDSQTKENMTLQPKSFGSTCQLSEKFIKAAIGCGIVESILNWVKFKAQVQLNKKCSAVKHNRIKGIPKLDDANDAGGRNSTECTLILTEGDSAKTLAVSGLGVVGRDKYGVFPLRGKILNVREASHKQIMENAEINNIIKIVGLQYKKNYEDEDSLKTLRYGKIMIMTDQDQDGSHIKGLLINFIHHNWPSLLRHRFLEEFITPIVKVSKNKQEMAFYSLPEFEEWKSSTPNHKKWKVKYYKGLGTSTSKEAKEYFADMKRHRIQFKYSGPEDDAAISLAFSKKQIDDRKEWLTNFMEDRRQRKLLGLPEDYLYGQTTTYLTYNDFINKELILFSNSDNERSIPSMVDGLKPGQRKVLFTCFKRNDKREVKVAQLAGSVAEMSSYHHGEMSLMMTIINLAQNFVGSNNLNLLQPIGQFGTRLHGGKDSASPRYIFTMLSSLARLLFPPKDDHTLKFLYDDNQRVEPEWYIPIIPMVLINGAEGIGTGWSCKIPNFDVREIVNNIRRLMDGEEPLPMLPSYKNFKGTIEELAPNQYVISGEVAILNSTTIEISELPVRTWTQTYKEQVLEPMLNGTEKTPPLITDYREYHTDTTVKFVVKMTEEKLAEAERVGLHKVFKLQTSLTCNSMVLFDHVGCLKKYDTVLDILRDFFELRLKYYGLRKEWLLGMLGAESAKLNNQARFILEKIDGKIIIENKPKKELIKVLIQRGYDSDPVKAWKEAQQKVPDEEENEESDNEKETEKSDSVTDSGPTFNYLLDMPLWYLTKEKKDELCRLRNEKEQELDTLKRKSPSDLWKEDLATFIEELEAVEAKEKQDEQVGLPGKGGKAKGKKTQMAEVLPSPRGQRVIPRITIEMKAEAEKKNKKKIKNENTEGSPQEDGVELEGLKQRLEKKQKREPGTKTKKQTTLAFKPIKKGKKRNPWSDSESDRSSDESNFDVPPRETEPRRAATKTKFTMDLDSDEDFSDFDEKTDDEDFVPSDASPPKTKTSPKLSNKELKPQKSVVSDLEADDVKGSVPLSSSPPATHFPDETEITNPVPKKNVTVKKTAAKSQSSTSTTGAKKRAAPKGTKRDPALNSGVSQKPDPAKTKNRRKRKPSTSDDSDSNFEKIVSKAVTSKKSKGESDDFHMDFDSAVAPRAKSVRAKKPIKYLEESDEDDLF

SEQ ID NO: 275 - DNA, 5698 bp, Homo sapien; identical to SEQ ID NO: 273

SEQ ID NO: 276 - protein, 1531 aa, Homo sapien; identical to SEQ ID NO: 274

SEQ ID NO: 277 - DNA, 4243 bp, Homo sapien
agatatctccggcgccgcccgccattttgactccagtgtctcgtttgcagtcggcgctttaggggaactgtcttcctccgcaggcgcgaggctgggtacagggtctattgtctgtggttgactccgtactttggtctgaggccttcgggagctttcccgaggcagttagcagaagccgcagcggccgcccccgcccgtctcctctgtccctgggcccgggagggaccaacttggcgtcacgcccctcagcggtcgccactctcttctctgttgttgggtccgcatcgtattcccggaatcagacggtgccccatagatggccagctttcccccgagggtcaacgagaaagagatcgtgagattacgtactataggtgaacttttagctcctgcagctccttttgacaagaaatgtggtcgtgaaaattggactgttgcttttgctccagatggttcatactttgcttggtcacaaggacatcgcacagtaaagcttgttccgtggtcccagtgccttcagaactttctcttgcatggcaccaagaatgttaccaattcaagcagtttaagattgccaagacaaaatagtgatggtggtcagaaaaataagcctcgtgaacatattatagactgtggagatatagtctggagtcttgcttttgggtcatcagttccagaaaaacagagtcgctgtgtaaatatagaatggcatcgcttcagatttggacaagatcagctacttcttgctacagggttgaacaatgggcgtatcaaaatatgggatgtatatacaggaaaactcctccttaacttggtagatcatactgaagtggtcagagatttaacttttgctccagatggaagcttgatcctggtgtcagcttcaagagacaaaactctcagagtatgggacctgaaagatgatggaaacatgatgaaagtattgagggggcatcagaattgggtgtacagctgtgcattctctcctgactcttctatgctgtgttcagtcggagccagtaaagcagtggtggcagcaatattggtgtgattgaggttatgctggcaccactcgcacacaggcgcacaatggtgttagctgggcagaaagagtggcatctctggctaccgggctgggggcgacctttaccataggatgaagtaaccttgcattcggctgcaaggtgtactgtacgtacacaggtgctggtcgatgtccactttctgcttttctttctttctttttttcttttttaaagtaatttcccccacagtaaaatacactgactcctgagtaaattgattttccagttttatggaattgggagtctgacaagtgaaaccaatttaatgtaaagtatttggctttcaaatggtttctctgtgctattttttggaattctttcagattccagagatatcttacgtctttgattcaatttaaaatttgtacttattttcttttagaaataatgtattgtgtctgtgcagaaaaaaaaaaaaccaaaaaggattgctttactccaagaggagagattgtcttaggataaacctccaagctcacatttaatataacagactgaagtaaacattagaatcctgtttagagctattctgcacagttaactactgatctttagaatctaaaattgtatatgaacttattcttaaataattgaaccgttttatattcaaatgacttatgatcgtggttagtttgggaaaaataagatggttaaattttgatttattgaaatgtaattgtattattttcataaaatagcattttcattttgtaatgtggtttaacatccttgttgtttgccaaagaaatttcatttggctgtgaatattctatttgcttgcagtatctgtttctcttcctaggctcaagttggtgacccaagcctattgtaaacaagtgattatctcaaagggagatgccaatggagtaacaatttgttaaccttacgttttctgtctgtatatttttttaaaaatctggtagtttctggaaaaaaaagagaagggggtttgtagtacttaaccctatttatttccgtatattttagttaattagtttttggaataaatggatttcagtatagctttgtggttaaattgcattgcctttattttatgtttaggcttatttttaaattaacatttaacagaaacatttgaaatagaatttgcatgtctgccttaattaacttaaagactgattttaatctgactatgacactgagcatattctttaaattactcataatttataatgcttaatataatcttaattaaatttagcagttttagtataagatgtgccattttgtcctctgtatgtctgaatgaagctataacatttgcctttttattgcaggttttcctttggaatatggataaatacaccatgatacggaaactagaaggacatcaccatgatgtggtagcttgtgacttttctcctgatggagcattactggctactgcatcttatgatactcgagtatatatctgggatccacataatggagacattctgatggaatttgggcacctgtttcccccacctactccaatatttgctggaggagcaaatgaccggtgggtacgatctgtatcttttagccatgatggactgcatgttgcaagccttgctgatgataaaatggtgaggttctggagaattgatgaggattatccagtgcaagttgcacctttgagcaatggtctttgctgtgccttctctactgatggcagtgttttagctgctgggacacatgacggaagtgtgtatttttgggccactccacggcaggtccctagcctgcaacatttatgtcgcatgtcaatccgaagagtgatgcccacccaagaagttcaggagctgccgattccttccaagcttttggagtttctctcgtatcgtatttagaagattctgccttccctagtagtagggactgacagaatacacttaacacaaacctcaagctttactgacttcaattatctgtttttaaagacgtagaagatttatttaatttgatatgttcttgtactgcattttgatcagttgagcttttaaaatattatttatagacaatagaagtatttctgaacatatcaaatataaatttttttaaagatctaactgtgaaaacatacatacctgtacatatttagatataagctgctatatgttgaatggacccttttgcttttctgatttttagttctgacatgtatatattgcttcagtagagccacaatatgtatctttgctgtaaagtgcaaggaaattttaaattctgggacactgagttagatggtaaatactgacttacgaaagttgaattgggtgaggcgggcaaatcacctgaggtcagcagtttgagactagcctggcaaacatgatgaaaccctgtctctactaaaaatacaaaaaaaaaaaaaattagccaggcgtggtggtgcacacctgtagtcctagctacttgggaggctgaggcaggagaattgcttgaacccaggaggtggaggttgcagtaagccaagatcacaccactgcactccaacctggacaacagagcgagactccatctcaaaaaaaaaaaaaaattgtgttgcctcatacgaaatgtatttggttttgttggagagtgtcagactgatctggaagtgaaacacagtttatgtacagggaaaaggattttattatccttaggaatgtcatccaagacgtagagcttgaatgtgacgttatttaaaaacaacaacaaagaaggcagagccaggatataactagaaaaaggatgtctttttttttttttttactccccctctaaacactgctgctgccttaattttagaaagcagcttactagtttacccttgtggtataaagtattataaattgttgtgaatttgaagaatccgtctactgtattattgctaaatattttgtttatactaagggacaattattttaagaccatggatttaaaaaaaaaaaaaaaaactctgtttctgcaggggatgatattggtgagttgccaaagaagcaatacagcatatctgcttttgccttctgttgtttatcttacctgcagatattaagaatgtatgcattatgtaaaatgctcaattatatatttttgttgagttttttaattaaagacttgtaaaaaaaaaaaaaaaaaaaaaaaaaaaaaaaaaaaaaaaaaaaaaaaaaaaaaaa

SEQ ID NO: 278 - protein, 244 aa, Homo sapien
MASFPPRVNEKEIVRLRTIGELLAPAAPFDKKCGRENWTVAFAPDGSYFAWSQGHRTVKLVPWSQCLQNFLLHGTKNVTNSSSLRLPRQNSDGGQKNKPREHIIDCGDIVWSLAFGSSVPEKQSRCVNIEWHRFRFGQDQLLLATGLNNGRIKIWDVYTGKLLLNLVDHTEVVRDLTFAPDGSLILVSASRDKTLRVWDLKDDGNMMKVLRGHQNWVYSCAFSPDSSMLCSVGASKAVVAAILV

SEQ ID NO: 279 - DNA, 4212 bp, Homo sapien
gggcagtgtctcgtttgcagtcggcgctttaggggaactgtcttcctccgcaggcgcgaggctgggtacagggtctattgtctgtggttgactccgtactttggtctgaggccttcgggagctttcccgaggcagttagcagaagccgcagcggccgcccccgcccgtctcctctgtccctgggcccgggagggaccaacttggcgtcacgcccctcagcggtcgccactctcttctctgttgttgggtccgcatcgtattcccggaatcagacggtgccccatagatggccagctttcccccgagggtcaacgagaaagagatcgtgagattacgtactataggtgaacttttagctcctgcagctccttttgacaagaaatgtggtcgtgaaaattggactgttgcttttgctccagatggttcatactttgcttggtcacaaggacatcgcacagtaaagcttgttccgtggtcccagtgccttcagaactttctcttgcatggcaccaagaatgttaccaattcaagcagtttaagattgccaagacaaaatagtgatggtggtcagaaaaataagcctcgtgaacatattatagactgtggagatatagtctggagtcttgcttttgggtcatcagttccagaaaaacagagtcgctgtgtaaatatagaatggcatcgcttcagatttggacaagatcagctacttcttgctacagggttgaacagtgggcgtatcaaaatatgggatgtatatacaggaaaactcctccttaacttggtagatcatactggagtggtcagagatttaacttttgctccagatggaagcttgatcctggtgtcagcttcaagagacaaaactctcagagtatgggacctgagagatgatggaaacatgatgaaagtattgagggggcatcagaattgggtgtacagctgtgcattctctcctgactcttctatgctgtgttcagtcggagccagtaaagcagtggtggcagcaatattggtgtgattgaggttatgctggcaccactcgcacacaggcgcacaatggtgttagctgggcagaaagagtggcatctctggctaccgggctgggggcgacctttaccataggatgaagtaaccttgcattcggctgcaaggtgtactgtacgtacacaggtgctggtcgatgtccactttctgcttttctttctttctttttttcttttttaaagtaatttcccccacagtaaaatacactgactcctgagtaaattgattttccagttttatggaattgggagtctgacaagtgaaaccaatttaatgtaaagtatttggctttcaaatggtttctctgtgctattttttggaattctttcagattccagagatatcttacgtctttgattcaatttaaaatttgtacttattttcttttagaaataatgtattgtgtctgtgcagaaaaaaaaaaaaccaaaaaggattgctttactccaagaggagagattgtcttaggataaacctccaagctcacatttaatataacagactgaagtaaacattagaatcctgtttagagctattctgcacagttaactactgatctttagaatctaaaattgtatatgaacttattcttaaataattgaactgttttatattcaaatgacttatgatcgtggttagtttgggaaaaataagatggttaaattttgatttattgaaatgtaattgtattattttcataaaatagcattttcattttgtaatgtggtttaacatccttgttgtttgccaaagaaatttcatttggctgtgaatattctatttgcttgcagtatctgtttctcttcctaggctcaagttggtgacccaagcctattgtaaacaagtgattatctcaaagggagatgccaatggagtaacaatttgttaaccttacgttttctgtctgtatattttttaaaaatctggtagtttctggaaaaaaaaagagaagggggtttgtagtacttaaccctatttatttccgtatattttagttaattagtttttggaataaatggatttcagtatagctttgtggttaaattgcattgcctttattttatgtttaggcttatttttaaattaacatttaacagaaacatttgaaatagaatttgcatgtctgccttaattaacttaaagactgattttaatctgactatgacactgagcatattctttaaattactcataatttataatgcttaatataatcttaattaaatttagcagttttagtataagatgtgccattttgtcctctgtatgtctgaatgaagctataacattcgcctttttattgcaggttttcctttggaatatggataaatacaccatgatgcggaaactagaaggacatcaccatgatgtggtagcttgtgacttttctcctgatggagcattactggctactgcatcttatgatacttgagtatatatctgggatccacataatggagacattctgatggaatttgggcacctgtttcccccacctactccaatatttgctggaggagcaaatgaccggtgggtacgatctgtatcttttagccatgatggactgcatgttgcaagccttgctgatgataaaatgggtgaggttctggagaattgatgaggattatccagtgcaagttgcacctgtgagcaatggtctttgctgtgccttctctactgatggcagtgttttagctgctgggacacatgacggaagtgtgtatttttgggccactccacggcaggtccctagcctgcaacatttatgtcgcatgtcaatccgaagagtgatgcccacccaagaagttcaggagctgccgattccttccaagcttttggagtttctctcgtatcgtatttagaagattctgccttccctagtagtagggactgacagaatacacttaacacaaacctcaagctttactgacttcaattatctgtttttaaagacgtagaagatttatttaatttgatatgttcttgtactgcattttgatcagttgagcttttaaaatattatttatagacaatagaagtatttctgaacatatcaaatataaatttttttaaagatctaactgtgaaaacatacatacctgtacatatttagatataagctgctatatgttgaatggacccttttgcttttctgatttttagttctgacatgtatatattgcttcagtagagccacaatatgtatctttgctgtaaagtgcaaggaaattttaaattctgggacactgagttagatggtaaatactgacttacgaaagttgaattgggtgaggcgggcaaatcacctgaggtcagcagtttgagactagcctggcaaacatgatgaaaccctgtctctactaaaaatacaaaaaaaaaaaaattagccaggcgtggtggtgcacacctgtagtcctagctacttgggaggctgaggcaggagaattgcttgaacccaggaggtggaggttgcagtaagccaagatcacaccactgcactccaacctggacaacagagcgagactccatctcaaaaaaaaaaaaaaattgtgttgcctcatacgaaatgtatttggttttgttggagagtgtcagactgatctggaagtgaaacacagtttatgtacagggaaaaggattttattatccttaggaatgtcatccaagacgtagagcttgaatgtgacgttatttaaaaacaacaacaaagaaggcagagccaggatataactagaaaaaggatgtcttttttttttttttactccccctctaaacactgctgctgccttaattttagaaagcagcttactagtttacccttgtggtataaagtattataaattgttgtgaatttgaagaatccgtctactgtattattgctaaatattttgtttatactaagggacaattattttaagaccatggatttaaagaaaaaaaaaaaaactctgtttctgcaggggatgatattggtgagttgccaaagaagcaatacagcatatctgcttttgccttctgttgtttatcttacctgcagatattaagaatgtatgcattatgtaaaatgctcaattatatatttttgttgagttttttaattaaagacttgtaaaaaaaaaaaaaaaaaaaaaaaaaaaaaaaaaaaaaaaaaaaaaaaaagaaaaa

SEQ ID NO: 280 - protein, 112 aa, Homo sapien
MTGGYDLYLLAMMDCMLQALLMIKWVRFWRIDEDYPVQVAPVSNGLCCAFSTDGSVLAAGTHDGSVYFWATPRQVPSLQHLCRMSIRRVMPTQEVQELPIPSKLLEFLSYRI

SEQ ID NO: 281 - DNA, 1982 bp, Homo sapien
gcagaggaggagcgcacgccggcctcgaagaacttctgcttgggtggctgaactctgatcttgacctagagtcatggccatggcaaccaaaggaggtactgtcaaagctgcttcaggattcaatgccatggaagatgcccagaccctgaggaaggccatgaaagggctcggcaccgatgaagacgccattattagcgtccttgcctaccgcaacaccgcccagcgccaggagatcaggacagcctacaagagcaccatcggcagggacttgatagacgacctgaagtcagaactgagtggcaacttcgagcaggtgattgtggggatgatgacgcccacggtgctgtatgacgtgcaagagctgcgaagggccatgaagggagccggcactgatgagggctgcctaattgagatcctggcctcccggacccctgaggagatccggcgcataagccaaacctaccagcagcaatatggacggagccttgaagatgacattcgctctgacacatcgttcatgttccagcgagtgctggtgtctctgtcagctggtgggagggatgaaggaaattatctggacgatgctctcgtgagacaggatgcccaggacctgtatgaggctggagagaagaaatgggggacagatgaggtgaaatttctaactgttctctgttcccggaaccgaaatcacctgttgcatgtgtttgatgaatacaaaaggatatcacagaaggatattgaacagagtattaaatctgaaacatctggtagctttgaagatgctctgctggctatagtaaagtgcatgaggaacaaatctgcatattttgctgaaaagctctataaatcgatgaagggcttgggcaccgatgataacaccctcatcagagtgatggtttctcgagcagaaattgacatgttggatatccgggcacacttcaagagactctatggaaagtctctgtactcgttcatcaagggtgacacatctggagactacaggaaagtactgcttgttctctgtggaggagatgattaaaataaaaatcccagaaggacaggaggattctcaacactttgaatttttttaacttcatttttctacactgctattatcattatctcagaatgcttatttccaattaaaacgcctacagctgcctcctagaatatagactgtctgtattattattcacctataattagtcattatgatgctttaaagctgtacttgcatttcaaagcttataagatataaatggagattttaaagtagaaataaatatgtattccatgtttttaaaagattactttctactttgtgtttcacagacattgaatatattaaattattccatattttcttttcagtgaaaaattttttaaatggaagactgttctaaaatcacttttttccctaatccaatttttagagtggctagtagtttcttcatttgaaattgtaagcatccggtcagtaagaatgcccatccagttttctatatttcatagtcaaagccttgaaagcatctacaaatctctttttttaggttttgtccatagcatcagttgatccttactaagtttttcatgggagacttccttcatcacatcttatgttgaaatcactttctgtagtcaaagtataccaaaaccaatttatctgaactaaattctaaagtatggttatacaaaccatatacatctggttaccaaacataaatgctgaacattccatattattatagttaatgtcttaatccagcttgcaagtgaatggaaaaaaaaataagcttcaaactaggtattctgggaatgatgtaatgctctgaatttagtatgatataaagaaaacttttttgtgctaaaaatactttttaaaatcaattttgttgattgtagtaatttctatttgcactgtgcctttcaactccagaaacattctaagatgtacttggatttaattaaaaagttcactttgt

SEQ ID NO: 282 - protein, 321 aa, Homo sapien
MAMATKGGTVKAASGFNAMEDAQTLRKAMKGLGTDEDAIISVLAYRNTAQRQEIRTAYKSTIGRDLIDDLKSELSGNFEQVIVGMMTPTVLYDVQELRRAMKGAGTDEGCLIEILASRTPEEIRRISQTYQQQYGRSLEDDIRSDTSFMFQRVLVSLSAGGRDEGNYLDDALVRQDAQDLYEAGEKKWGTDEVKFLTVLCSRNRNHLLHVFDEYKRISQKDIEQSIKSETSGSFEDALLAIVKCMRNKSAYFAEKLYKSMKGLGTDDNTLIRVMVSRAEIDMLDIRAHFKRLYGKSLYSFIKGDTSGDYRKVLLVLCGGDD

SEQ ID NO: 283 - DNA, 1982 bp, Homo sapien; identical to SEQ ID NO: 281

SEQ ID NO: 284 - protein, 321 aa, Homo sapien; identical to SEQ ID NO: 282

SEQ ID NO: 285 - DNA, 1763 bp, Homo sapien
tagctggattccagccattgctgcagctgctccacagcccttttcaggacccaaacaaccgcagccgctgttcccaggatggtgatccgtgtatatattgcatcttcctctggctctacagcgattaagaagaaacaacaagatgtgcttggtttcctagaagccaacaaaataggatttgaagaaaaagatattgcagccaatgaagagaatcggaagtggatgagagaaaatgtacctgaaaatagtcgaccagccacaggttaccccctgccacctcagattttcaatgaaagccagtatcgcggggactatgatgccttctttgaagccagagaaaataatgcagtgtatgccttcttaggcttgacagccccacctggttcaaaggaagcagaagtgcaagcaaagcagcaagcatgaaccttaagcactgtgctttaagcatcctgaaaaatgagtctccattgcttttataaaatagcagaattagctttgcttcaaaagaaataggcttaatgttgaaataatagattagttgggttttcacatgcaaacattcaaaatgaatacaaaattaaaatttgaacattatggtgattatggtgaggagaatgggatattaacataaaattatattaataagtagatatcgtagaaatagtgttgttacctgccaagccatcctgtatacaccaatgattttacaaagaaaacacccttccctccttctgccattactatggcaacttaagtgtatctgcagctctacattaaaaaggagaaagagaaataacctgtctctcattcctaagttgcctcattaattttcatgaacaagaatatgtacctttttgatgctatattactgcgattaaaaaagttcttgcaggtaatgtttatgtatagttaaacgttgtaatttcttatcgtaattataacattcccattctttgtagatgaaactctacatatgaaccacagattttctgagcttctaaatgtagcctttcattgcacatttcagtgatcagaatagatatccttttacacgcacaaaagcaatagattcattcagtggacaagttccttgtttaactacacagctatgatggaatcatatatccaagttccttgcctcagtgaaatatgcatatgtatatcatgaagtgggatgccaagtaagcttaaaatgcattctctagcaaagagattagacttttaaataactcttataaaacaggttggcgatcatttcccaagattggtttcccttgagtttttgttaaaacaaatcttagtagttttgcccgtttaaaacaactcacaatcgtaaatgctactattcctaagatatcttacctttttatttcagtttagccatgtattgtatgagtgtattagtctaagcagtgagaatcttttctatgcctctattccagcaaaaagtagaagtatcaaataaaaagggcaacttttaaaatattaagcctgaagacttctaaaaagacaagaaacatggcctaaataaccaacatagatttacatagtaagtttcacactaccttattaccaaaagcaaacacctcttactttaaactacattatcatgtatatctattgtatgctggtctttactttttgccaaaatcaacatataatgaagagatgcctttgtttgatgagattcaaacttgatgctatgctttaaaataaactcagtacttttagaaacataaaaaaaaaaaaaaaaaaaaaaaaaa

SEQ ID NO: 286 - protein, 114 aa, Homo sapien
MVIRVYIASSSGSTAIKKKQQDVLGFLEANKIGFEEKDIAANEENRKWMRENVPENSRPATGYPLPPQIFNESQYRGDYDAFFEARENNAVYAFLGLTAPPGSKEAEVQAKQQA

SEQ ID NO: 287 - DNA, 1763 bp, Homo sapien; identical to SEQ ID NO: 285

SEQ ID NO: 288 - protein, 114 aa, Homo sapien; identical to SEQ ID NO: 286

SEQ ID NO: 289 - DNA, 905 bp, Homo sapien
caacacaggggcagtctccaggacctccacaccattaacaagatgagccttgtgctcccttgggctctagagaggaagcccctctgagccctcagcccctctttcctccctctcctaaagtaatttgatcctcaggaatttgttctgccctcatctggccctggccagctctgcatttgacaaatgccaggaagaggaaactgttgagaaaacggaactactggggaaagggagggctcactgagaaccatcccggtaacccgaccgccgctggtcaccatgaaccacattgtgcaaaccttctctcctgtcaacagcggccagcctcccaactacgagatgctcaaggaggagcaggaagtggctatgctgggggggccccacaaccctgctcccccgacgtccaccgtgatccacatccgcagcgagacctccgtgcctgaccatgtcgtctggtccctgttcaacaccctcttcatgaacacctgctgcctgggcttcatagcattcgcctactccgtgaagtctagggacaggaagatggttggcgacgtgaccggggcccaggcctatgcctccaccgccaagtgcctgaacatctgggccctgattttgggcatcttcatgaccattctgctcgtcatcatcccagtgttggtcgtccaggcccagcgatagatcaggaggcatcattgaggccaggagctctgcccgtgacctgtatcccacgtactctatcttccattcctcgccctgcccccagaggccaggagctctgcccttgacctgtattccacttactccaccttccattcctcgccctgtccccacagccgagtcctgcatcagccctttatcctcacacgcttttctacaatggcattcaataaagtgtatatgtttct

SEQ ID NO: 290 - protein, 132 aa, Homo sapien
MNHIVQTFSPVNSGQPPNYEMLKEEQEVAMLGGPHNPAPPTSTVIHIRSETSVPDHVVWSLFNTLFMNTCCLGFIAFAYSVKSRDRKMVGDVTGAQAYASTAKCLNIWALILGIFMTILLVIIPVLVVQAQR

SEQ ID NO: 291 - DNA, 1325 bp, Homo sapien
gcgattcggtggcacgtggagccacggcgtgggagtagggggctgaaggcaggcagcagcggccagggccgccctctgctagccgcttgggtctcgggataccccgtttcttcctgtaggtgtgggacgtgcgtgcggcgagatggacactcccccgctctcggattcggagtcggaatccgatgaatcccttgtcacagacagagagttgcaggatgcgttttcccgagggcttctgaagccaggcctcaatgtcgtgctagaggggccgaagaaggccgtgaacgacgtgaatggcctgaagcaatgtttggcagaattcaagcgggatctggaatgggttgaaaggctcgatgtgacactgggtccggtaccggagatcggtggatctgaggcgccagcacctcagaacaaggaccagaaagctgttgatccagaagacgacttccagcgagagatgagtttctatcgccaagcccaggccgcagtgcttgcagtcttaccccgcctccatcagctcaaagtccctacgaagcgacccactgattattttgcggaaatggccaaatctgatctgcaggtgcagaagattcgacagaagctgcagactaaacaggctgccatggagaggtctgaaaaagctaagcaactgcgagcacttaggaaatacgggaagaaggtgcaaacggaggttcttcagaagaggcagcaggagaaagcccatatgatgaatgctattaagaaatatcagaaaggcttctctgataaactggatttccttgagggagatcagaaacctctggcacagcgcaagaaggcaggagccaaaggccagcagatgaggaaggggcccagtgctaaacgacggtataaaaaccagaagtttggttttggtggaaagaagaaaggctcaaagtggaacactcgggagagctatgatgatgtatctagcttccgggccaagacagctcatggcagaggcctcaagaggcctggcaagaaagggtcaaataagagacctggaaaacgaacaagagagaagatgaagaacagaacacactaaatagcatctttgaatacaaagaaccaagaaaaaggaatgaagactcgcaatttcacgacacactttgatcccttctgttggtgtcatgttgtaaacatttctttcaataaactaaagaaaaattattaaaggaacacatacctttggttaaatagtctagactaaaagattgagaagttactttccattgctatctattgataatttagacattgagttcaaattgccttcattttatgataaataatgatttaactgaaaa

SEQ ID NO: 292 - protein, 306 aa, Homo sapien
MDTPPLSDSESESDESLVTDRELQDAFSRGLLKPGLNVVLEGPKKAVNDVNGLKQCLAEFKRDLEWVERLDVTLGPVPEIGGSEAPAPQNKDQKAVDPEDDFQREMSFYRQAQAAVLAVLPRLHQLKVPTKRPTDYFAEMAKSDLQVQKIRQKLQTKQAAMERSEKAKQLRALRKYGKKVQTEVLQKRQQEKAHMMNAIKKYQKGFSDKLDFLEGDQKPLAQRKKAGAKGQQMRKGPSAKRRYKNQKFGFGGKKKGSKWNTRESYDDVSSFRAKTAHGRGLKRPGKKGSNKRPGKRTREKMKNRTH

SEQ ID NO: 293 - DNA, 2786 bp, Homo sapien
agcactctccagcctctcaccgcaaaattacacaccccagtacaccagcagaggaaacttataacctcgggaggcgggtccttcccctcagtgcggtcacatacttccagaagagcggaccagggctgctgccagcacctgccactcagagcgcctctgtcgctgggacccttcagaactctctttgctcacaagttaccaaaaaaaaaagagccaacatgttggtattgctggctggtatctttgtggtccacatcgctactgttattatgctatttgttagcaccattgccaatgtctggttggtttccaatacggtagatgcatcagtaggtctttggaaaaactgtaccaacattagctgcagtgacagcctgtcatatgccagtgaagatgccctcaagacagtgcaggccttcatgattctctctatcatcttctgtgtcattgccctcctggtcttcgtgttccagctcttcaccatggagaagggaaaccggttcttcctctcaggggccaccacactggtgtgctggctgtgcattcttgtgggggtgtccatctacactagtcattatgcgaatcgtgatggaacgcagtatcaccacggctattcctacatcctgggctggatctgcttctgcttcagcttcatcatcggcgttctctatctggtcctgagaaagaaataaggccggacgagttcatggggatctggggggtggggaggaggaagccgttgaatctgggagggaagtggaggttgctgtacaggaaaaaccgagataggggaggggggagggggaagcaaaggggggaggtcaaatcccaaaccattactgaggggattctctactgccaagcccctgccctggggagaaagtagttggctagtactttgatgctcccttgatggggtccagagagcctccctgcagccaccagacttggcctccagctgttcttagtgacacacactgtctggggccccatcagctgccacaacaccagccccacttctgggtcatgcactgaggtccacagacctactgcactgagttaaaatagcggtacaagttctggcaagagcagatactgtctttgtgctgaatacgctaagcctggaagccatcctgcccttctgacccaaagcaaaacatcacattccagtctgaagtgcctactggggggctttggcctgtgagccattgtccctctttggaacagatatttagctctgtggaattcagtgacaaaatgggaggaggaaagagagtttgtaaggtcatgctggtgggttagctaaaccaagaaggagaccttttcacaatggaaaacctgggggatggtcagagcccagtcgagacctcacacacggctgtccctcatggagacctcatgccatggtctttgctaggcctcttgctgaaagccaaggcagctcttctggagtttctctaaagtcactagtgaacaattcggtggtaaaagtaccacacaaactatgggatccaaggggcagtcttgcaacagtgccatgttagggttatgtttttaggattcccctcaatgcagtcagtgtttcttttaagtatacaacaggagagagatggacatggctcattgtagcacaatcctattactcttcctctaacatttttgaggaagttttgtctaattatcaatattgaggatcagggctcctaggctcagtggtagctctggcttagacaccacctggagtgatcacctcttggggaccctgcctatcccacttcacaggtgaggcatggcaattctggaagctgattaaaacacacataaaccaaaaccaaacaacaggcccttgggtgaaaggtgctatataattgtgaagtattaagcctaccgtatttcagccatgataagaacagagtgcctgcattcccaggaaaatacgaaaatcccatgagataaataaaaatataggtgatgggcagatcttttctttaaaataaaaaagcaaaaactcttgtggtacctagtcagatggtagacgagctgtctgctgccgcaggagcacctctatacaggacttagaagtagtatgttattcctggttaagcaggcattgctttgccctggagcagctattttaagccatctcagattctgtctaaaggggttttttgggaagacgttttctttatcgccctgagaagatctaccccagggagaatctgagacatcttgcctacttttctttattagctttctcctcatccatttcttttatacctttcctttttggggagttgttatgccatgatttttggtatttatgtaaaaggattattactaattctatttctctatgtttattctagttaaggaaatgttgagggcaagccaccaaattacctaggctgaggttagagagattggccagcaaaaactgtgggaagatgaactttgtcattatgatttcattatcacatgattatagaaggctgtcttagtgcaaaaaacatacttacatttcagacatatccaaagggaatactcacattttgttaagaagttgaactatgactggagtaaaccatgtattcccttatcttttactttttttctgtgacatttatgtctcatgtaatttgcattactctggtggattgttctagtactgtattgggcttcttcgttaatagattatttcatatactataattgtaaatattttgatacaaatgtttataactctagggatataaaaacagattctgattcccttcaaaaaaaaaaaa

SEQ ID NO: 294 - protein, 157 aa, Homo sapien
MLVLLAGIFVVHIATVIMLFVSTIANVWLVSNTVDASVGLWKNCTNISCSDSLSYASEDALKTVQAFMILSIIFCVIALLVFVFQLFTMEKGNRFFLSGATTLVCWLCILVGVSIYTSHYANRDGTQYHHGYSYILGWICFCFSFIIGVLYLVLRKK

SEQ ID NO: 295 - DNA, 2786 bp, Homo sapien; identical to SEQ ID NO: 293

SEQ ID NO: 296 - protein, 157 aa, Homo sapien; identical to SEQ ID NO: 294

SEQ ID NO: 297 - DNA, 2562 bp, Homo sapien
gccgcgccggctctgggcactcagcatcgtttccttttcctccgctggagcagctatggcggcggtgaagaccctgaaccccaaggccgaggtggcccgagcgcaggcggcgctggcggtcaacatcagcgcagcgcggggtctgcaggacgtgctaaggaccaacctggggcccaagggcaccatgaagatgctcgtttctggcgctggagacatcaaacttactaaagacggcaatgtgctgcttcacgaaatgcaaattcaacacccaacagcttccttaatagcaaaggtagcaacagcccaggatgatataactggtgatggtacgacttctaatgtcctaatcattggagagctgctgaaacaggcggatctctacatttctgaaggccttcatcctagaataatcactgaaggatttgaagctgcaaaggaaaaggcccttcagtttttggaagaagtcaaagtaagcagagagatggacagggaaacacttatagatgtggccagaacatctcttcgtactaaagttcatgctgaacttgcagatgtcttaacagaggctgtagtggactccattttggccattaaaaagcaagatgaacctattgatctcttcatgattgagatcatggagatgaaacataaatctgaaactgatacaagcttaatcagagggcttgttttggaccacggagcacggcatcctgatatgaagaaaagggtggaggatgcatacatcctcacttgtaacgtgtcattagagtatgagaaaacagaagtgaattctggctttttttacaagagtgcagaagagagagaaaaactcgtgaaagctgaaagaaaattcattgaagatagggttaaaaaaataatagaactgaaaaggaaagtctgtggcgattcagataaaggatttgttgttattaatcaaaagggaattgaccccttttccttagatgctctttcaaaagaaggcatagtcgctctgcgcagagctaaaaggagaaatatggagaggctgactcttgcttgtggtggggtagccctgaattcttttgacgacctaagtcctgactgcttgggacatgcaggacttgtatatgagtatacattgggagaagagaagtttacctttattgagaaatgtaacaaccctcgttctgtcacattattgatcaaaggaccaaataagcacacactcactcagatcaaagatgcagtgagggacggcttgagggctgtcaaaaatgctattgatgatggctgtgtggttccaggtgctggtgccgtggaagtggcaatggcagaagccctgattaaacataagcccagtgtaaagggcagggcacagcttggagtccaagcatttgctgatgcattgctcattattcccaaggttcttgctcagaactctggttttgaccttcaggaaacattagttaaaattcaagcagaacattcagaatcaggtcagcttgtgggtgtggacctgaacacaggtgagccaatggtggcagcagaagtaggcgtatgggataactattgtgtaaagaaacagcttcttcactcctgcactgtgattgccaccaacattctcttggttgatgagatcatgcgagctggaatgtcttctctgaaaggttgaattgaagcttcctctgtatctgaatcttgaagactgcaaagtgatcctgaggattacagctgtggaatttttgtccaagcttcaaataattttgaaagaaattttcccatatgaaaaaaggagagaacactggcatctgttgaaatttggaagttctgaaattatagtatttttaaaaattgcactgaagtgtatacacataaagcaggtcttttatccagtgaacaggatgttttgctttagcagcagtgacataaaattccatgttagataagcatatgttacttaccttgttattaaatatttcttgaaaagcaaattttaatggttaattttatgtggacgtatgttaaattatccaaactaccctattgttaagcatttggttttaaaatttttatgctaatataaatgctcaagtaatttaaaatattgaaagcatccctgttggtataaatttctgagtaaatgcattggatcagttggactttgaacgccctttgaaatggctttgctaaaatgctcccgccacaaagttgtaggaaatgggaagaggagtcaactagaggcaagggagttgagagagctgcaactgtaaagggcaagaacaggcagaggtaaaaagatgatggaaggtgtggtgactaagggccacggttattgggtgaaatttgagatgtaggccaactgtattttcaagcttctgaacttaaggcaaaatattcatcgcaaagtctctagcgtcatatttttctcacccaaattacgtttccacgagttattatatatagttggtctatctctgcagtccttgaaggtgaagttgtgtgttactaggctgtgttttgggatgtcagcagtggcctgaagtgagttgtgcaataaatgttaagttgaaacctcaaaaaaaa

SEQ ID NO: 298 - protein, 531 aa, Homo sapien
MAAVKTLNPKAEVARAQAALAVNISAARGLQDVLRTNLGPKGTMKMLVSGAGDIKLTKDGNVLLHEMQIQHPTASLIAKVATAQDDITGDGTTSNVLIIGELLKQADLYISEGLHPRIITEGFEAAKEKALQFLEEVKVSREMDRETLIDVARTSLRTKVHAELADVLTEAVVDSILAIKKQDEPIDLFMIEIMEMKHKSETDTSLIRGLVLDHGARHPDMKKRVEDAYILTCNVSLEYEKTEVNSGFFYKSAEEREKLVKAERKFIEDRVKKIIELKRKVCGDSDKGFVVINQKGIDPFSLDALSKEGIVALRRAKRRNMERLTLACGGVALNSFDDLSPDCLGHAGLVYEYTLGEEKFTFIEKCNNPRSVTLLIKGPNKHTLTQIKDAVRDGLRAVKNAIDDGCVVPGAGAVEVAMAEALIKHKPSVKGRAQLGVQAFADALLIIPKVLAQNSGFDLQETLVKIQAEHSESGQLVGVDLNTGEPMVAAEVGVWDNYCVKKQLLHSCTVIATNILLVDEIMRAGMSSLKG

SEQ ID NO: 299 - DNA, 2562 bp, Homo sapien; identical to SEQ ID NO: 297

SEQ ID NO: 300 - protein, 531 aa, Homo sapien; identical to SEQ ID NO: 298

SEQ ID NO: 301 - DNA, 9501 bp, Homo sapien
ggccccaatgagtggcacacagtctactatcaccgacaggtttcccctcaaaaaacctataaggcatggaagtattttgaaccgagagtcaccaacagataagaagcagaaagttgagcgcattgcatcacatgattttgaccccacagatagctcctccaagaagacaaagtctagttcagaggagagtagatccgagatatatggtcttgttcagcgttgcgtaatcatccagaaagatgacaatggatttgggctgacggtcagtggagacaatccagtcttcgtacagtctgtcaaagaagatggagcagccatgcgggctggagtacagacaggtgatcgaatcatcaaggtgaatggaactctggtgactcattcaaatcatctggaggtggtgaagctaatcaaatctggttcctatgtagctctcactgttcagggacgcccacctgggtcgccccagattccacttgccgactctgaagtagagccgtcagtcattggacatatgtctcccatcatgacatctcctcattcacctggagcatctgggaatatggagagaatcactagtcctgtgctcatgggggaggaaaacaatgtggttcataaccagaaagtagaaattctgagaaaaatgttacagaaagaacaggaacggctacagttattgcaggaagattacaaccgaacacctgcccaaagattgctaaaagagatccaagaggccaagaaacacattcctcagctgcaagagcagttatccaaagccacaggctctgctcaggatggagctgtagttacaccctccagacctttaggggacaccctaacagtcagtgaggcagaaacagatcctggagatgtactgggcaggactgactgtagcagtggagatgcttctcggcccagtagtgacaatgcagatagtcccaagagtggcccaaaagagagaatttatctagaggaaaacccagagaaaagtgaaacaattcaggacactgacactcaatcacttgtcggaagtccctcaacccgtatagcacctcatattattggagcagaagatgatgattttggtactgaacatgaacagatcaatggacagtgcagctgtttccagagcattgaattactaaaatctcgcccggctcatttggctgttttcttacaccatgtagtttcacaatttgaccctgcgactttgctctgttatctctattcagacctgtataaacataccaattccaaagaaactcgtcgcatcttccttgagtttcatcagttctttctagatcgatcagcacacctgaaagtttctgttcctgatgaaatgtctgcagatctagaaaagagaagacctgagctcattcctgaggatctgcatcgccactatatccaaactatgcaagaaagagtccatccagaagttcaaaggcacttagaagattttcggcagaaacgtagtatgggactgaccttggctgaaagcgagctgactaaacttgatgcagagcgagacaaggaccgattgactttggagaaggagcggacatgtgcagaacagattgttgccaaaattgaagaagtattgatgactgctcaggctgtagaggaagataagagctccaccatgcagtatgttattctcatgtatatgaagcatttgggagtaaaagtgaaagagcctcgaaatttggagcacaaacggggtcggattggatttcttcccaaaatcaagcaaagtatgaagaaagataaagaaggggaagaaaaagggaagcgaagaggattccccagcatcctgggacccccacggagaccaagccgtcatgacaacagtgcaattggcagagccatggaactacagaaggcgcgccaccctaagcacttatccacaccctcatctgtgagtcctgaacctcaggactctgccaagttgcgccagagtgggttagcaaatgaaggaacagacgctggatacctgcctgccaattccatgtcttctgtagcttcaggggcctctttttcccaggaaggagggaaagagaatgatacaggatcaaagcaagttggagaaacatcagcacctggagacaccttagatggcacacctcgtactctcaatactgtctttgatttcccaccacctccattagaccaagtgcaggaggaggaatgtgaagtagaaagggtgactgaacatgggacaccaaagccctttcgaaagtttgacagtgtagcttttggagaaagtcaaagtgaggatgaacaatttgaaaatgacttagagacagacccacccaactggcagcagcttgttagtcgagaagtgttactgggactaaaaccttgtgaaatcaaaagacaggaagtgattaatgaattgttctacactgaaagagctcatgttcgaacactgaaggttcttgatcaagtgttctatcagcgagtatccagagaaggaattctgtcaccctcagagctacggaaaattttttcaaacttggaagatattcttcaacttcatattggattgaatgaacaaatgaaggctgttcgaaagagaaatgagacctctgttatcgatcagattggggaagatttgctgacatggttcagcggaccaggagaggagaaattgaaacatgctgctgctaccttttgcagtaaccaacctttcgccctggaaatgatcaaatctcgtcagaaaaaggattctcgatttcagacttttgtgcaagatgctgaaagtaatccactgtgtcgtcgtcttcaactgaaggatattattcccactcaaatgcaaaggcttactaagtacccacttctgttggataatattgccaaatacacagaatggccaacagaaagggagaaggtgaagaaagctgcagatcactgtcgtcagatcttaaattatgtaaatcaggctgtcaaggaggcagaaaacaagcagcgcctagaagattatcagcgtcgccttgatacctccagcctgaagttgtcagagtacccaaatgttgaagagctcaggaatttggatttaacaaaaaggaagatgattcatgaagggccattggtttggaaggtgaatagagataaaactattgatttatacacgttgctgctggaagacattcttgtattgttacaaaagcaggatgatagactggttttaaggtgtcatagtaagattctggcatctacagctgatagcaaacacacgtttagccctgtcattaagttgagtacagtgttggttcgacaagtggcaacagataacaaagctttattcgtcatttccatgtcagacaatggcgctcagatttatgaactggtggcacagacagtttctgaaaagactgtctggcaggacctaatctgtcggatggctgcatcagtgaaggagcaatccacaaagccaattccattaccacagtcaacacctggcgaaggagataatgatgaagaagatccttcaaaattaaaagaggagcagcatggcatttcagtcactggtttgcagagtccagacagagatttgggattagaatctaccttaatatcgtcaaaacctcagtctcattcactgagtacctctgggaaatcagaggtacgtgatctgtttgtggctgagagacagtttgcaaaggaacaacatacagatgggacactaaaggaagttggagaagattatcaaatcgcaatcccagattcacacctgcctgtctcagaagaacggtgggcattggatgcactaagaaatttgggtttgttgaagcagttgctggtgcaacagctaggtttgactgagaagagcgttcaggaagactggcaacatttcccaagatacagaacagcctctcaggggccgcagacagacagtgtcatccagaactctgaaaatattaaggcctatcattctggtgaaggacatatgccctttagaactggaactggtgacattgcaacttgttacagtccacggacttcaactgaatcttttgctccacgggattcagtgggactggcaccccaggatagccaggcaagtaacattttagtaatggaccacatgattatgaccccagagatgcctaccatggagccagaagggggtcttgatgacagtggagagcacttttttgatgcccgtgaagcacatagtgatgagaatccatcagaaggtgatggagcagttaacaaggaagagaaggatgttaatttacgcatctcaggaaactatttgatccttgatggctatgacccagtgcaggagagttccacagatgaggaggttgcttcctcacttaccctgcagcccatgacaggcatccctgctgtggaatccacccaccagcagcaacattctcctcagaatactcactccgatggggcaatttcaccattcacccccgaatttctggtccagcagcgctggggagctatggagtattcctgttttgagatccagagtccctcctcttgtgcagattcacagagccagatcatggagtacattcataagatagaggctgaccttgaacacttaaagaaggtggaggaaagttacaccattctttgccaaaggctggctggatcagccctcacagacaagcactcagataaaagttagagccgcatgtcctggaggtgactgcaggttgttggatttggagtatcggccgtgtctcaccacatcctggctccagtgtggatgcagagagagtgtgacagaggatctgcctgtgaaccacctgggattagtcaagtcccaaggtgcccagagtgggactagttcttcacagtgtggcagctgcactaatctgtttgtgagggaatatccattccctcactctactctcctcactatcggaaattcattttgattcagaataaaaaccaaatgtatagagctttgggtgtaggatatgaaattgtacttagatttaagaaaaagagaaaatcagatgtatttatttgacttcattccgtatttgaaagcacattttaatttttatttgccttgttttgttttaattgagtagtgagagttttagacctttgtctttagtacacccaaggatcaactgctcctgaagcaaagaggtcaggatggagtatgcagaagttgggtagagaggttaagaagaggaggaagtgagacggggaagggaggagcaccttgcttcactatacagtattccaagctctctgctgtccagtaggctgcttctctgagggtcacctcaaaggtatgctatgccgtgtggctcttatgtgcccaggtggtgtggtcagagagtggatgggcttcctcccgccctgaggcaagcacctcttctctgtagctgggatcaaccacaattaataggaatcctcaacatactaaatagcaggcacttgaaaatgggtgtgttttcttccattgtcgtcttttctattgagggttgggatttgggtgggagaggaaagcaaattttattttcttgactataaatttgttattcttggtatcatttcatttttataattatacattagacattggcacttgtgtaaaactgtccctgcagattgagcaggaagtaaaaacaaatggaaatgcttcggatagtggcaggggtgggggttgctaaggaaagggtgggatgggagtgggtaaagagtttgggaaggttatctaactgaatcactactgagttgaatcatggctatcattagccacaggtactgctgattataaggccagtaaaattttagtacctggaggtttgactctaatttttgcactgatggtgccaaagggccctgagtcaaaaggatagccaagggtggagtggaaaaagatatggtgaaggcagaactgctcacaccagctccagaagcacgtcctctgacttcactgccgcagctctttccacacggggccgtgattgaccctaaaaattgcagaccagcacatacactggacactgcaggcaaggtgttggtaactgcctgctctaggatgaatagtagcgttagcagcaccctacagagggtaagtttcagaattgtaatttgagaactccttcaattatattgactttctttggttttccttgtgcattaggtatatattttttgaagtatttttgccaactaaaatgaagtctgtaaattctgttaataaacaaggagttcatccgttgctcacatctttcattggtgccctctgaactctgtgggttgctaggatgtaattttaatgcttccctgcagtccaaagatgattttttcaccacaaatggtaagggatgcccacctacttttataaacaccactgcaacttaacaagtttatttatctatgtccagatttctgtttctgtcctaaattgatctgtgtttttaggtggatcaacttggatctttagacctcatctataaattgaaattatatttttagtcataagccaagtacaatctaactcagaatgggattaaaaattttagaagcagaagctaatatataaatgaagtttgggatttggaactttctgtatctcttaggaggaacaagtaaaaaccaaatggttacattgtgctgctagaaataatgtcattctcaattaaaagggttacacctgtagccacttgacactaacaccatcgagggcaattaatcaggagaaaagtaaatataaaaactttgctcttaacgtcacacactacagggtaattatgtaattctctagcactcaattaagaagcttgtaggttagcaaaatttcagtttctctagttcagccagtgtcttgtccttagtaattatttgctttccctgcagttcaatttctccttggaactctaacaggactaactggaaaaatactttgaccatagctctagtacttccaaataaattcatatctagattttcaaacaaagccccaagatgaagtctaattctgaaaatatctcacaatttttgaatgttctttttatcttaccgacctaacttctcttttccctcccaacttggcctcccacacgttccatttcattttggccattatagtcacatccgtttgactttggttgtgacatcttcctttcaggatgatggaattagatgcagtctgtctttgagtgagactggtcaccatcagaggagttttttctaagtgacgtgactagaagttgaaatctacttccctgctaaagggcacaggggtggtgtacaaagaaagctaccttcccagagcaagcaggctgcattttagctatggaagtgacctgctgtgacactgtgctctcttctgtgggcttaatggttcctttgctatgaagtggcaaattacatgtagagtgtctccttccttttcagagaacagttaatcaaggcaaatcagcaagcccccaaagtgctgtaatttaacatcatgattaccaccttcgaagctatatattttgcatactttaaaatcacctaacttggactgcttgaattacattggcttttagaaccgaaattgtaactatgtattgtatttcatgggaggtatattttatgagctttttggctttcttttttcccacagcaactgccaatgaaggatgaatcccctttttaaaaagttgttgttgttgttgtttatttgattttgagttaggagggataatagagaagtccatttaaaaattatttttagaagctaaagaaagtaattatgcttcctgtgaattgtcttttactggcatctttgttttcctctttgatgttagtaaatttggtgtaatacgtggggcttccatatttcaaagtggaagctttcttctctgaagtcgatatatggttttgaattactagagctttggtcagtatttccttccctatatgtcacagagggcaccactgagaactgcgtgcataggacctcaaaatacaaaattagcagggcctcacagtcagcttcctcatggctagtttttcccccttatattacaatttttgttttataagtcatttttttcctgatatttccaccacttttcagagtcatctacaaaatttttctttcctcaagaaaagagttccttttgccttattccttatgccttccccactggtattgagggttttgataataaattggtaggaaaaaaaagtacctcctagaaggaagccttccccaccatttccaggtgccaactgctaagcagatatattccaaaaatggtaactgtcatgtgcacactgttggttatttttaataagcctcttcctactagaacattttattttccttgttcaccatacaatcatgtactctttaacagaaattgcttttaaaaaatatctggaactatctttaaaaaaactttattaataatcatgtatttttactgatcacattttgaaatgcctaaaagactttattgttctaattatccagatgtacctttgtaaaatagctcttttatgaattagctgataaggctgtatgtttctggaacaaaatattggtcatctaaaaactttctgttttctggggtctgggaaaatagaaaataagatttcaaatattaaataagcttaaaggaaccaagcatgtgacttttactttgtattctggttgatttgtcttgtccaagttatattagaaaagttgaggagtcgaggagcctgtaattaattttcctgtcagtgactgtcagacatcttcctgcttattagagcatccctagcaacaaggctaaaccttcatgacagtgctggcaggtgggcttgccctagcatgtggggcaggtttgttgtttttttaatagctttattgagatattcacatatcatataattcatccatttaaagtgtataatcagatgggttttggtatattattgatttttaattgtggtgaaatatatatataacaaaatttgctattgtaactatttttaagtataaagttcagtgaggtaggccagcttttatgacgcacctgaagataactttggttttaatcctaccctaaatgaagcatatgcctctatttttcctgtccccagtgctgggcttcttcacataccaacatttctgtgcttttaccaacagcattttagctcagaaggctcgcttactttgggcatttgctgtattttggttttgaaatacttgtaatttgacttattcttgggataatattttagttttcagtcattcaagggcacatttggctgacggagctaataagcgtaataaaatgcttagtagtttataccatcttttagttaaacattttaaagattaagactattcaaatgtactttgcggaaattaacctgtttgtatgcctggctttgtttacaaacatatatctatatctatatatatagatacagatacagatacatatctggtggaacaaagaaatacctgtaccattcccacttgctctttgatagccacctcctaggaatggagacaataaaactctgtatttgcatgtg

SEQ ID NO: 302 - protein, 1544 aa, Homo sapien
MSGTQSTITDRFPLKKPIRHGSILNRESPTDKKQKVERIASHDFDPTDSSSKKTKSSSEESRSEIYGLVQRCVIIQKDDNGFGLTVSGDNPVFVQSVKEDGAAMRAGVQTGDRIIKVNGTLVTHSNHLEVVKLIKSGSYVALTVQGRPPGSPQIPLADSEVEPSVIGHMSPIMTSPHSPGASGNMERITSPVLMGEENNVVHNQKVEILRKMLQKEQERLQLLQEDYNRTPAQRLLKEIQEAKKHIPQLQEQLSKATGSAQDGAVVTPSRPLGDTLTVSEAETDPGDVLGRTDCSSGDASRPSSDNADSPKSGPKERIYLEENPEKSETIQDTDTQSLVGSPSTRIAPHIIGAEDDDFGTEHEQINGQCSCFQSIELLKSRPAHLAVFLHHVVSQFDPATLLCYLYSDLYKHTNSKETRRIFLEFHQFFLDRSAHLKVSVPDEMSADLEKRRPELIPEDLHRHYIQTMQERVHPEVQRHLEDFRQKRSMGLTLAESELTKLDAERDKDRLTLEKERTCAEQIVAKIEEVLMTAQAVEEDKSSTMQYVILMYMKHLGVKVKEPRNLEHKRGRIGFLPKIKQSMKKDKEGEEKGKRRGFPSILGPPRRPSRHDNSAIGRAMELQKARHPKHLSTPSSVSPEPQDSAKLRQSGLANEGTDAGYLPANSMSSVASGASFSQEGGKENDTGSKQVGETSAPGDTLDGTPRTLNTVFDFPPPPLDQVQEEECEVERVTEHGTPKPFRKFDSVAFGESQSEDEQFENDLETDPPNWQQLVSREVLLGLKPCEIKRQEVINELFYTERAHVRTLKVLDQVFYQRVSREGILSPSELRKIFSNLEDILQLHIGLNEQMKAVRKRNETSVIDQIGEDLLTWFSGPGEEKLKHAAATFCSNQPFALEMIKSRQKKDSRFQTFVQDAESNPLCRRLQLKDIIPTQMQRLTKYPLLLDNIAKYTEWPTEREKVKKAADHCRQILNYVNQAVKEAENKQRLEDYQRRLDTSSLKLSEYPNVEELRNLDLTKRKMIHEGPLVWKVNRDKTIDLYTLLLEDILVLLQKQDDRLVLRCHSKILASTADSKHTFSPVIKLSTVLVRQVATDNKALFVISMSDNGAQIYELVAQTVSEKTVWQDLICRMAASVKEQSTKPIPLPQSTPGEGDNDEEDPSKLKEEQHGISVTGLQSPDRDLGLESTLISSKPQSHSLSTSGKSEVRDLFVAERQFAKEQHTDGTLKEVGEDYQIAIPDSHLPVSEERWALDALRNLGLLKQLLVQQLGLTEKSVQEDWQHFPRYRTASQGPQTDSVIQNSENIKAYHSGEGHMPFRTGTGDIATCYSPRTSTESFAPRDSVGLAPQDSQASNILVMDHMIMTPEMPTMEPEGGLDDSGEHFFDAREAHSDENPSEGDGAVNKEEKDVNLRISGNYLILDGYDPVQESSTDEEVASSLTLQPMTGIPAVESTHQQQHSPQNTHSDGAISPFTPEFLVQQRWGAMEYSCFEIQSPSSCADSQSQIMEYIHKIEADLEHLKKVEESYTILCQRLAGSALTDKHSDKS

SEQ ID NO: 303 - DNA, 2528 bp, Homo sapien
gagttccagcagtccgcgagctgccgtcggctccgcggggggggcgggccgggcaccccggggcgcggaggagcgctcctcgcttctctccttcccccctgccgcactccgccggaccctcccgccggcccgcgccgctgcactcgccctctcctctcgccccccggcaaactttcggcccctccccgcccctcgcccgttattcgtcgtggctcaagcccggccacgccgccccaagggctcctcccgacctcccggcctgccgctccggccactgcgggatccagaaacatgtcgaccacacttctgtccgccttctacgatgtcgacttcttgtgcaagacagagaaatccctggccaacctcaacctgaacaacatgctggacaagaaggcggtggggacgcctgtggccgccgcccccagctcgggcttcgcgccgggattcctccgacggcactcggccagcaacctgcatgcactcgcccaccccgcgcccagccccggcagctgctcgcccaagttcccgggcgccgctaacggcagcagctgcggcagcgcggcggccggcggtccgacctcctacggcacccttaaggagccgtcggggggcggcggcacagccctgctcaacaaggagaacaaattccgggaccgctcgtttagcgagaacggcgatcgcagccagcacctcctgcacctgcagcagcagcagaaggggggcggcggctcccagatcaactccacgcgctacaagaccgagctgtgccggcccttcgaggagagcggcacgtgcaagtacggcgaaaagtgccagttcgcgcatggcttccacgagctgcgcagcctgactcgccatccgaagtacaagaccgagctgtgccgcacctttcataccatcggcttctgcccctatgggccgcgctgccacttcatccacaacgcggacgagcggcggcccgcgccgtcggggggcgcctccggggacctgcgtgcctttggcacgcgcgatgcgttgcacctgggcttcccgcgggagccgcggcccaagttgcaccacagcctcagcttctcgggcttcccgtcgggccaccatcagcccccgggcggcctcgagtcgccgctgctgctcgacagccccacgtcgcgcacgccgccgccgccctcctgctcttcggcctcgtcctgctcctcctccgcctcctcctgttcctcggcctccgcggcctccacgccctcgggcgccccgacatgctgcgcctccgcggcggccgcggctgcggccgctctgctgtacggcaccgggggcgccgaggacctgctggcgccgggggccccgtgcgcggcctgctcgtcggcctcgtgcgccaacaacgccttcgccttcggtccggagctcagcagcctcatcacgccgctcgccatccagacccacaactttgccgccgtggccgccgccgcctactaccgcagtcagcagcagcagcagcagcagggcctggcgccccccgcgcagccgccggcgccgcccagcgcgaccctccccgccggggccgccgcacctccctcgccgcccttcagcttccagctgccgcgccgcctgtccgactcgcccgtgttcgacgcgccccccagccccccggactcgctgtcggaccgcgacagctacctaagcggctccctgagctccggcagcctcagcggctctgagtctcccagcctcgaccctggccgccgcctgccaatcttcagccgcctctccatctccgacgactgaggcaagagggcgccagtgaggaggaagggaaggcggttcagagatgttggaggacacccctcgccatctcgcccttgctgggggcacgggagtggggggggtgacatgggccctaggcagactgcaagcccgaccgagcacttggactcgaactctgtgccgggaggggcccccacccctcctttttcggtttcctcttgtctttttttttttatttttattacgaagtttcattctttttgagcaaaaaagtcgaactttttctgttgaacaaaatattcacaacagggcagttgtgatacgaatagaacaaaaaaaaaaaaaaaacacttaaactttgttaggactccgatgagtttgggacttcaggaaaaatcaacccagcaccagcagctaccaaccaccattccatctcttcacttgaacagcattagttaagtccagatgtgggaacccttctcttggaagaagttcctaattgtgtctcagaccggtgtaaacaaaccagccagccgccaccttgctaaacctataagctttttaaaatccaatatattctgccaagaatatgccttgatagttagccctcagcccataggtgttttttgttttttaacagaattatatatgtctgggggtgaaaaaacccttgcattccaaaggtccatactggttacttggtttcattgccaccacttagtggatgttcagtttagaaccattttgtctgctccctctggaagccttgcgca

SEQ ID NO: 304 - protein, 494 aa, Homo sapien
MSTTLLSAFYDVDFLCKTEKSLANLNLNNMLDKKAVGTPVAAAPSSGFAPGFLRRHSASNLHALAHPAPSPGSCSPKFPGAANGSSCGSAAAGGPTSYGTLKEPSGGGGTALLNKENKFRDRSFSENGDRSQHLLHLQQQQKGGGGSQINSTRYKTELCRPFEESGTCKYGEKCQFAHGFHELRSLTRHPKYKTELCRTFHTIGFCPYGPRCHFIHNADERRPAPSGGASGDLRAFGTRDALHLGFPREPRPKLHHSLSFSGFPSGHHQPPGGLESPLLLDSPTSRTPPPPSCSSASSCSSSASSCSSASAASTPSGAPTCCASAAAAAAAALLYGTGGAEDLLAPGAPCAACSSASCANNAFAFGPELSSLITPLAIQTHNFAAVAAAAYYRSQQQQQQQGLAPPAQPPAPPSATLPAGAAAPPSPPFSFQLPRRLSDSPVFDAPPSPPDSLSDRDSYLSGSLSSGSLSGSESPSLDPGRRLPIFSRLSISDD

SEQ ID NO: 305 - DNA, 5533 bp, Homo sapien
  Unsure 95, 99, 108: Unknown base
cagatttacgaggttctgttctagtgccaaaggctcttggtagtaaatagtgagcaaaatagatacctgtctcctgatggatcttgccagccccntccntattttttnttaagttatttattaaaaccacacacaccttgcaaagaaaaagggaaactggcagtctctgtagaggaagccggtggcatcgctcagagccacaaactgtatttctaaacagccctttccctggttccctctctcctgccccactttttttaaaatccagactgtaaaaaacacatctactgacactcactttactttaaaaaaagaagagaaaaagtaaagcgttacaagactttcctcctggaaactataaactgaaaaaaaaatccataaaagattaaatcctggcgggttgtggggtggcgggggccggcggggagggggcgcggagtggagattggctctctgaggtggtcaggggccctgtgacagcttgggactttcagcacctggtttggggtcatttatctgctcaactgtcaggaccccccacccccaaaccccagccaccaacacaaccatcgtagaagggaacacaacacagagggtcttttttcatttttttaaaaaatcggtttggttgtgtttttgttttccatgggggagctttaaaactcattattgcaacactagttccatttttcgccagggttccaataacacggcatcataaaggcaacgcaacccacagttctcaagacatttaccacggtcactacatccggcagcggggtggcccctagctcctgctgcccccccgccctttctccccgcccgcccccggagctcagccgatttctgaggctccaactctacccactccctccccgggccgccgccgccgcgccttcccccattcttactccctcgaggagagccacaggttgcaaatccaaccaacctcgcaatctatttttgcaaaatcactcacaaagatctccctttcgcgcccgcgcccgctcctcccgcgccgggtcccctcagccacggccacaaagtgcccttctctcctcctgagtcttgcacataaggaacgcgggctggggctctgttcgtctttctcctcgcccaaggtaaggacctcgggaatctgaagcctggcgtccactacgctcaggcccgcagttccctttttacagagcttgcaccatgggaaaaaataaaataaaatttaggaaagggaggcaacagccattgggagccaacacagagtcacgcagcgcccaaaatacaaacaccgcagcggccagaaatcccgccacctttctcgttctcccaggctgtcctgtcgaggttccctgagtccccccgcacactgaaaggcatcgcaggtgcagtgcgcacccctttcccacccaccccaagaagccctgtcccgccatcagtctctctcctcgggatgagcagggagagcgcgcggaggttcccgactccctcgactacaaccaagaaagaataattttcaaagtgttcaacatccccgcccccaagctccccaaaacacaggggcagggaacaccaaaacactcggctctcgttaggaagatcacggctctgaaaggaaatagtagacacgatacttcatctcatctggatttatgaccaaaaaaacaaaaacaaaaacccaaagagttcgcttgcattttttccttccaaatctcggttcggctcgaaggcagggaatctaaaagaccgaggccgatggaagagagccagcggggcgagcgagcgggcagcctccctttttgcctcccggagtcacccgttattcgtcgtggctcaagcccggccacgccgccccaagggctcctcccgacctcccggcctgccgctccggccactgcgggatccagaaacatgtcgaccacacttctgtccgccttctacgatgtcgacttcttgtgcaagacagagaaatccctggccaacctcaacctgaacaacatgctggacaagaaggcggtggggacgcctgtggccgccgcccccagctcgggcttcgcgccgggattcctccgacggcactcggccagcaacctgcatgcactcgcccaccccgcgcccagccccggcagctgctcgcccaagttcccgggcgccgctaacggcagcagctgcggcagcgcggcggccggcggtccgacctcctacggcacccttaaggagccgtcggggggcggcggcacagccctgctcaacaaggagaacaaattccgggaccgctcgtttagcgagaacggcgatcgcagccagcacctcctgcacctgcagcagcagcagaaggggggcggcggctcccagatcaactccacgcgctacaagaccgagctgtgccggcccttcgaggagagcggcacgtgcaagtacggcgaaaagtgccagttcgcgcatggcttccacgagctgcgcagcctgactcgccatccgaagtacaagaccgagctgtgccgcacctttcataccatcggcttctgcccctatgggccgcgctgccacttcatccacaacgcggacgagcggcggcccgcgccgtcggggggcgcctccggggacctgcgtgcctttggcacgcgcgatgcgttgcacctgggcttcccgcgggagccgcggcccaagttgcaccacagcctcagcttctcgggcttcccgtcgggccaccatcagcccccgggcggcctcgagtcgccgctgctgctcgacagccccacgtcgcgcacgccgccgccgccctcctgctcttcggcctcgtcctgctcctcctccgcctcctcctgttcctcggcctccgcggcctccacgccctcgggcgccccgacatgctgcgcctccgcggcggccgcggctgcggccgctctgctgtacggcaccgggggcgccgaggacctgctggcgccgggggccccgtgcgcggcctgctcgtcggcctcgtgcgccaacaacgccttcgccttcggtccggagctcagcagcctcatcacgccgctcgccatccagacccacaactttgccgccgtggccgccgccgcctactaccgcagtcagcagcagcagcagcagcagggcctggcgccccccgcgcagccgccggcgccgcccagcgcgaccctccccgccggggccgccgcacctccctcgccgcccttcagcttccagctgccgcgccgcctgtccgactcgcccgtgttcgacgcgccccccagccccccggactcgctgtcggaccgcgacagctacctaagcggctccctgagctccggcagcctcagcggctctgagtctcccagcctcgaccctggccgccgcctgccaatcttcagccgcctctccatctccgacgactgaggcaagagggcgccagtgaggaggaagggaaggcggttcagagatgttggaggacacccctcgccatctcgcccttgctgggggcacgggagtggggggggtgacatgggccctaggcagactgcaagcccgaccgagcacttggactcgaactctgtgccgggaggggcccccacccctcctttttcggtttcctcttgtctctttttttttatttttattacgaagtttcattctttttgagcaaaaaagtcgaactttttctgttgaacaaaatattcacaacagggcagttgtgatacgaatagaacaaaaaagaaaaaaaaaacacttaaactttgttaggactccgatgagtttgggacttcaggaaaaatcaacccagcaccagcagctaccaaccaccattccatctcttcacttgaacagcattagttaagtccagatgtgggaacccttctcttggaagaagttcctaattgtgtctcagaccggtgtaaacaaaccagccagccgccaccttgctaaacctataagctttttaaaatccaatatattctgccaagaatatgccttgatagttagccctcagcccataggtgttttttgttttttaacagaattatatatgtctgggggtgaaaaaacccttgcattccaaaggtccatactggttacttggtttcattgccaccacttagtggatgttcagtttagaaccattttgtctgctccctctggaagccttgcgcagagcttactttgtaattgttggagaataactgctgaatttttagctgttttgagttgattcgcaccactgcaccacaactcaatatgaaaactatttaacttatttattatcttgtgaaaagtatacaatgaaaattttgttcatactgtatttatcaagtatgatgaaaagcaatagatatatattcttttattatgttaaattatgattgccattattaatcggcaaaatgtggagtgtatgttcttttcacagtaatatatgccttttgtaacttcacttggttattttattgtaaatgagtacaaaattcttaatttaagagattgtatgtaatatttatttcattaatttctttccttgtttacgtaaattttgaaagattgcatgatttcttgacagaaatcgatcttgatgctgtggaagtagtttgaggaacatcctatgagttttcttagaatgtataaaggttgtagcccatccaacttcaaagaaaaaaatgaccacatactttgcaatcaggctgaaatgtggcatgcttttctaattccaactttataaactagcaaaaaagtgtttgcttattccaccagttctactgtgacatactcgagtataaagacatgtagcaataacggggagtggggggggagtctcacagtgcctttggaagggcccgaacttgccttaaatcttcctcaaccaaataagtattttattagtgcttgagagaatctgaatgtaggatgggttcaactgcacaaaaggaaaagatttttaccactttttttatatagatataaagtgaagcaaccgccttagtgctgaaatatgtagtacatgaatatgccttgtttaattacagaaaattccaaaacttgtactattttttttttccatgtagaaaggcaggaatgtctcctaagctttcctggacagcagatgaatgagcggtagctttagtttgtacgtaggtacagttggagcactatatgtactctctggactactttggacagaagtaggtttttgaatgtaacaagataagtcaacttgagttgtaatatattttggggaatcagctcactacaaattgtgactgtaaacattgtactgtaaatgttttgtagttttcccccaataaaatttttgggaaaaaaaggtattaacatgtaagagctttctttttaaacaggaatgtcttagctttctagcttcccagctaaccatgtctgccattccccaggtcttggcatggtgggggaggacttggagagctggcagagccagagttcagaagagcctgcgtcctctcagcccgtatatattttataagcaagttcttctaatgaaagaaagtaattatttggactgtcaagggcattagtt

SEQ ID NO: 306 - protein, 546 aa, Homo sapien
  Unsure 95, 99, 108: Unknown amino acid
MEESQRGERAGSLPFCLPESPVIRRGSSPATPPQGLLPTSRPAAPATAGSRNMSTTLLSAFYDVDFLCKTEKSLANLNLNNMLDKKAVGTPVAAAPSSGFAPGFLRRHSASNLHALAHPAPSPGSCSPKFPGAANGSSCGSAAAGGPTSYGTLKEPSGGGGTALLNKENKFRDRSFSENGDRSQHLLHLQQQQKGGGGSQINSTRYKTELCRPFEESGTCKYGEKCQFAHGFHELRSLTRHPKYKTELCRTFHTIGFCPYGPRCHFIHNADERRPAPSGGASGDLRAFGTRDALHLGFPREPRPKLHHSLSFSGFPSGHHQPPGGLESPLLLDSPTSRTPPPPSCSSASSCSSSASSCSSASAASTPSGAPTCCASAAAAAAAALLYGTGGAEDLLAPGAPCAACSSASCANNAFAFGPELSSLITPLAIQTHNFAAVAAAAYYRSQQQQQQQGLAPPAQPPAPPSATLPAGAAAPPSPPFSFQLPRRLSDSPVFDAPPSPPDSLSDRDSYLSGSLSSGSLSGSESPSLDPGRRLPIFSRLSISDD

SEQ ID NO: 307 - DNA, 2528 bp, Homo sapien; identical to SEQ ID NO: 303

SEQ ID NO: 308 - protein, 494 aa, Homo sapien; identical to SEQ ID NO: 304

SEQ ID NO: 309 - DNA, 2435 bp, Homo sapien
gcagcgccgcgactcgtgcgggtaggcgtctgcgctcggtttgagggctcggcgcggggtttcctgttcctccttctgcgcggctgcagctcgggacttcggcctgacccagcccccatggcttcagaagagctacagaaagatctagaagaggtaaaggtgttgctggaaaaggctactaggaaaagagtacgtgatgcccttacagctgaaaaatccaagattgagacagaaatcaagaacaagatgcaacagaaatcacagaagaaagcagaacttcttgataatgaaaaaccagctgctgtggttgctcccattacaacgggctatacggtgaaaatcagtaattatggatgggatcagtcagataagtttgtgaaaatctacattaccttaactggagttcatcaagttcccactgagaatgtgcaggtgcatttcacagagaggtcatttgatcttttggtaaagaatctaaatgggaagagttactccatgattgtgaacaatctcttgaaacccatctctgtggaaggcagttcaaaaaaagtcaagactgatacagttcttatattgtgtagaaagaaagtggaaaacacaaggtgggattacctgacccaggttgaaaaggagtgcaaagaaaaagagaagccctcctatgacactgaaacagatcctagtgagggattgatgaatgttctaaagaaaatttatgaagatggagacgatgatatgaagcgaaccattaataaagcctgggtggaatcaagagagaagcaagccaaaggagacacggaattttgagactttaaagtcgttttgggaactgtgatgtgatgtggaaatactgatgtttccagtaagggaatattggtgagctgcatatataaatttgacagatagctatttacatagccttctaagtaaaggcaatgaattctccatttcctactggaggatttatttaaataaaatatgcttattaaacactcctgcaaagatggttttattagtaccctggtcattttgttcaaggaagggttatattgcattctcacgtgaaatataaaaagcaagtcttgcccaataaaaacgctacattgtgtgtattttttgttcagctaagaattggaaaagtatttgcttgccttttaagttactgacatcagcttccaccagtgtaaaaattgagtaaaacctgaagttttgcataaaatgcaaatcggtgcctgtgcttgaaggttgctgtagagcatctgaccccttattaccaccttaagcaatgtatatgccatgcattaccatgcactaattcaatcacaggtgtttctatctagatttaaatatatttgtcaatgaatgtggaatagaaaatctaaacatgacaataatagacatatctttgtatggtaccagttagttttgccgtggatcagatggtttataaaagtaataaccataaagcaaaaaataatttgaaagcccgtctattcctatgctcaataaagttaagtttttcttcattagaacagttttatgatttatttgtctaggagtatgtcagaaaaatcaggcttttagtaggaattactcctattccccctgaagtcaggaccagtgcctgtgatctccattactttattttcctggaggtattagccaacacagttagatcagagaaagcaattgaagccaggcatgaaggctggcgcccgtaatcccagctactaaggctggaggatcacttcagcccaggagtttaaggctgcagtgagctatgatgatgccactgtactgcagcttgggtaacagattgagaacctgtctcattaaaaaaaaaaaaaaaaaaaaagccgttagacacacaggaaaaatccagaagggtaaactaaactaaagctacaattaatatgggaatttggaagaagtggtaggatttaaaatacagaaacagtttatgtataggatagctataagtaaatactgaaacacattatgcctctgtaattggggttgacacatgaacagaatagcagacacaatgcatatgaaagttacagaatatggtaaaagtggggtaaagatgggtttttaatgatactaagataactgaaaataggcatatagatatattccaagccgcctgacgatctaattgtaaaaagtaaagcatacaaatactagaagaaaatggaggaaaacgacattatatgtgacttaaaacctagaagaaataaataaaactattgatcaattttaactacataaaaatgtttataggacaagaaaaaccccaccataacccaaggcaaacaatgtattgacaggattccaataattaagaatacttcatacaaaaagaaatgtaaatgacctttaacatgtaaagatgctcaccttgttcagaagagaataaaccagtgtttttacctttc

SEQ ID NO: 310 - protein, 228 aa, Homo sapien
MASEELQKDLEEVKVLLEKATRKRVRDALTAEKSKIETEIKNKMQQKSQKKAELLDNEKPAAVVAPITTGYTVKISNYGWDQSDKFVKIYITLTGVHQVPTENVQVHFTERSFDLLVKNLNGKSYSMIVNNLLKPISVEGSSKKVKTDTVLILCRKKVENTRWDYLTQVEKECKEKEKPSYDTETDPSEGLMNVLKKIYEDGDDDMKRTINKAWVESREKQAKGDTEF

SEQ ID NO: 311 - DNA, 2174 bp, Homo sapien
agaaggcccagcgccgggaaggggtttgcagctgctccgtcatcgtgcggcccgacgctatctcgcgctcgtgtgcaggcccggctcggctcctggtccccggtgcgagggttaacgcgaggccccggcctcggtccccggactaggccgtgaccccgggtgccatgaagcaggagggctcggcgcggcgccgcggcgcggacaaggcgaaaccgccgcccggcggaggagaacaagaacccccaccgccgccggccccccaggatgtggagatgaaagaggaggcagcgacgggtggcgggtcgacgggggaggcagacggcaagacggcggcggcagcggctgagcactcccagcgagagctggacacagtcaccttggaggacatcaaggagcacgtgaaacagctagagaaagcggtttcaggcaaggagccgagattcgtgctgcgggccctgcggatgctgccttccacatcacgccgcctcaaccactatgttctgtataaggctgtgcagggcttcttcacttcaaataatgccactcgagactttttgctccccttcctggaagagcccatggacacagaggctgatttacagttccgtccccgcacgggaaaagctgcgtcgacacccctcctgcctgaagtggaagcctatctccaactcctcgtggtcatcttcatgatgaacagcaagcgctacaaagaggcacagaagatctctgatgatctgatgcagaagatcagtactcagaaccgccgggccctagaccttgtagccgcaaagtgttactattatcacgcccgggtctatgagttcctggacaagctggatgtggtgcgcagcttcttgcatgctcggctccggacagctacgcttcggcatgacgcagacgggcaggccaccctgttgaacctcctgctgcggaattacctacactacagcttgtacgaccaggctgagaagctggtgtccaagtctgtgttcccagagcaggccaacaacaatgagtgggccaggtacctctactacacagggcgaatcaaagccatccagctggagtactcagaggcccggagaacgatgaccaacgcccttcgcaaggcccctcagcacacagctgtcggcttcaaacagacggtgcacaagcttctcatcgtggtggagctgttgctgggggagatccctgaccggctgcagttccgccagccctccctcaagcgctcactcatgccctatttccttctgactcaagctgtcaggacaggaaacctagccaagttcaaccaggtcctggatcagtttggggagaagtttcaagcagatgggacctacaccctaattatccggctgcggcacaacgtgattaagacaggtgtacgcatgatcagcctctcctattcccgaatctccttggctgacatcgcccagaagctgcagttggatagccccgaagatgcagagttcattgttgccaaggccatccgggatggtgtcattgaggccagcatcaaccacgagaagggctatgtccaatccaaggagatgattgacatctattccacccgagagccccagctagccttccaccagcgcatctccttctgcctagatatccacaacatgtctgtcaaggccatgaggtttcctcccaaatcgtacaacaaggacttggagtctgcagaggaacggcgtgagcgagaacagcaggacttggagtttgccaaggagatggcagaagatgatgatgacagcttcccttgagctggggggctggggaggggtagggggaatggggacaggctctttcccccttgggggtcccctgcccagggcactgtccccattttcccacacacagctcatatgctgcattcgtgcagggggtgggggtgctgggagccagccaccctgacctcccccagggctcctccccagccggtgacttactgtacagcaggcaggagggtgggcaggcaacctccccgggcagggtcctggccagcagtgtgggagcaggaggggaaggatagttctgtgtactcctttagggagtgggggactagaactgggatgtcttggcttgtatgttttttgaagcttcgattatgatttttaaacaataaaaagttctccacagtgaaaaaaaaaaaaaaaaaaaaaaaaaaa

SEQ ID NO: 312 - protein, 534 aa, Homo sapien
MKQEGSARRRGADKAKPPPGGGEQEPPPPPAPQDVEMKEEAATGGGSTGEADGKTAAAAAEHSQRELDTVTLEDIKEHVKQLEKAVSGKEPRFVLRALRMLPSTSRRLNHYVLYKAVQGFFTSNNATRDFLLPFLEEPMDTEADLQFRPRTGKAASTPLLPEVEAYLQLLVVIFMMNSKRYKEAQKISDDLMQKISTQNRRALDLVAAKCYYYHARVYEFLDKLDVVRSFLHARLRTATLRHDADGQATLLNLLLRNYLHYSLYDQAEKLVSKSVFPEQANNNEWARYLYYTGRIKAIQLEYSEARRTMTNALRKAPQHTAVGFKQTVHKLLIVVELLLGEIPDRLQFRQPSLKRSLMPYFLLTQAVRTGNLAKFNQVLDQFGEKFQADGTYTLIIRLRHNVIKTGVRMISLSYSRISLADIAQKLQLDSPEDAEFIVAKAIRDGVIEASINHEKGYVQSKEMIDIYSTREPQLAFHQRISFCLDIHNMSVKAMRFPPKSYNKDLESAEERREREQQDLEFAKEMAEDDDDSFP

SEQ ID NO: 313 - DNA, 2225 bp, Homo sapien
cgacatggcgcgcgagctgcgggcgctgctgctgtggggccgccgcctgcggcctttgctgcgggcgccggcgctggcggccgtgccgggaggaaaaccaattctgtgtcctcggaggaccacagcccagttgggccccaggcgaaacccagcctggagcttgcaggcaggacgactgttcagcacgcagaccgccgaggacaaggaggaacccctgcactcgattatcagcagcacagagagcgtgcagggttccacttccaaacatgagttccaggccgagacaaagaagcttttggacattgttgcccggtccctgtactcagaaaaagaggtgtttatacgggagctgatctccaatgccagcgatgccttggaaaaactgcgtcacaaactggtgtctgacggccaagcactgccagaaatggagattcacttgcagaccaatgccgagaaaggcaccatcaccatccaggatactggtatcgggatgacacaggaagagctggtgtccaacctggggacgattgccagatcggggtcaaaggccttcctggatgctctgcagaaccaggctgaggccagcagcaagatcatcggccagtttggagtgggtttctactcagctttcatggtggctgacagagtggaggtctattcccgctcggcagccccggggagcctgggttaccagtggctttcagatggttctggagtgtttgaaatcgccgaagcttcgggagttagaaccgggacaaaaatcatcatccacctgaaatccgactgcaaggagttttccagcgaggcccgggtgcgagatgtggtaacgaagtacagcaacttcgtcagcttccccttgtacttgaatggaaggcggatgaacaccttgcaggccatctggatgatggaccccaaggatgtcggtgagtggcaacatgaggagttctaccgctacgtcgcgcaggctcacgacaagccccgctacaccctgcactataagacggacgcaccgctcaacatccgcagcatcttctacgtgcccgacatgaaaccgtccatgtttgatgtgagccgggagctgggctccagcgttgcactgtacagccgcaaagtcctcatccagaccaaggccacggacatcctgcccaagtggctgcgcttcatccgaggtgtggtggacagtgaggacattcccctgaacctcagccgggagctgctgcaggagagcgcactcatcaggaaactccgggacgttttacagcagaggctgatcaaattcttcattgaccagagtaaaaaagatgctgagaagtatgcaaagttttttgaagattacggcctgttcatgcgggagggcattgtgaccgccaccgagcaggaggtcaaggaggacatagcaaagctgctgcgctacgagtcctcggcgctgccctccgggcagctaaccagcctctcagaatacgccagccgcatgcgggccggcacccgcaacatctactacctgtgcgcccccaaccgtcacctggcagagcactcaccctactatgaggccatgaagaagaaagacacagaggttctcttctgctttgagcagtttgatgagctcaccctgctgcaccttcgtgagtttgacaagaagaagctgatctctgtggagacggacatagtcgtggatcactacaaggaggagaagtttgaggacaggtccccagccgccgagtgcctatcagagaaggagacggaggagctcatggcctggatgagaaatgtgctggggtcgcgtgtcaccaacgtgaaggtgaccctccgactggacacccaccctgccatggtcaccgtgctggagatgggggctgcccgccacttcctgcgcatgcagcagctggccaagacccaggaggagcgcgcacagctcctgcagcccacgctggagatcaaccccaggcacgcgctcatcaagaagctgaatcagctgcgcgcaagcgagcctggcctggctcagctgctggtggatcagatatacgagaacgccatgattgctgctggacttgttgacgaccctagggccatggtgggccgcttgaatgagctgcttgtcaaggccctggagcgacactgacagccagggggccagaaggactgacaccacagatgacagccccacctccttgagctttatttacctaaatttaaaggtatttcttaacccgaaaaaaaaaaaaaaa

SEQ ID NO: 314 - protein, 704 aa, Homo sapien
MARELRALLLWGRRLRPLLRAPALAAVPGGKPILCPRRTTAQLGPRRNPAWSLQAGRLFSTQTAEDKEEPLHSIISSTESVQGSTSKHEFQAETKKLLDIVARSLYSEKEVFIRELISNASDALEKLRHKLVSDGQALPEMEIHLQTNAEKGTITIQDTGIGMTQEELVSNLGTIARSGSKAFLDALQNQAEASSKIIGQFGVGFYSAFMVADRVEVYSRSAAPGSLGYQWLSDGSGVFEIAEASGVRTGTKIIIHLKSDCKEFSSEARVRDVVTKYSNFVSFPLYLNGRRMNTLQAIWMMDPKDVGEWQHEEFYRYVAQAHDKPRYTLHYKTDAPLNIRSIFYVPDMKPSMFDVSRELGSSVALYSRKVLIQTKATDILPKWLRFIRGVVDSEDIPLNLSRELLQESALIRKLRDVLQQRLIKFFIDQSKKDAEKYAKFFEDYGLFMREGIVTATEQEVKEDIAKLLRYESSALPSGQLTSLSEYASRMRAGTRNIYYLCAPNRHLAEHSPYYEAMKKKDTEVLFCFEQFDELTLLHLREFDKKKLISVETDIVVDHYKEEKFEDRSPAAECLSEKETEELMAWMRNVLGSRVTNVKVTLRLDTHPAMVTVLEMGAARHFLRMQQLAKTQEERAQLLQPTLEINPRHALIKKLNQLRASEPGLAQLLVDQIYENAMIAAGLVDDPRAMVGRLNELLVKALERH

SEQ ID NO: 315 - DNA, 1968 bp, Homo sapien
gaggaggaggaggagatgactggggagcgggagctcgagaatactgcccagttactctagcgcgccaggccgaaccgcagcttcttggcttaggtacttctactcacagcggccgattccgaggccaactccagcaatggcttttgcaaatctgcggaaagtgctcatcagtgacagcctggacccttgctgccggaagatcttgcaagatggagggctgcaggtggtggaaaagcagaaccttagcaaagaggagctgatagcggagctgcaggactgtgaaggccttattgttcgctctgccaccaaggtgaccgctgatgtcatcaacgcagctgagaaactccaggtggtgggcagggctggcacaggtgtggacaatgtggatctggaggccgcaacaaggaagggcatcttggttatgaacacccccaatgggaacagcctcagtgccgcagaactcacttgtggaatgatcatgtgcctggccaggcagattccccaggcgacggcttcgatgaaggacggcaaatgggagcggaagaagttcatgggaacagagctgaatggaaagaccctgggaattcttggcctgggcaggattgggagagaggtagctacccggatgcagtcctttgggatgaagactatagggtatgaccccatcatttccccagaggtctcggcctcctttggtgttcagcagctgcccctggaggagatctggcctctctgtgatttcatcactgtgcacactcctctcctgccctccacgacaggcttgctgaatgacaacacctttgcccagtgcaagaagggggtgcgtgtggtgaactgtgcccgtggagggatcgtggacgaaggcgccctgctccgggccctgcagtctggccagtgtgccggggctgcactggacgtgtttacggaagagccgccacgggaccgggccttggtggaccatgagaatgtcatcagctgtccccacctgggtgccagcaccaaggaggctcagagccgctgtggggaggaaattgctgttcagttcgtggacatggtgaaggggaaatctctcacgggggttgtgaatgcccaggcccttaccagtgccttctctccacacaccaagccttggattggtctggcagaagctctggggacactgatgcgagcctgggctgggtcccccaaagggaccatccaggtgataacacagggaacatccctgaagaatgctgggaactgcctaagccccgcagtcattgtcggcctcctgaaagaggcttccaagcaggcggatgtgaacttggtgaacgctaagctgctggtgaaagaggctggcctcaatgtcaccacctcccacagccctgctgcaccaggggagcaaggcttcggggaatgcctcctggccgtggccctggcaggcgccccttaccaggctgtgggcttggtccaaggcactacacctgtactgcaggggctcaatggagctgtcttcaggccagaagtgcctctccgcagggacctgcccctgctcctattccggactcagacctctgaccctgcaatgctgcctaccatgattggcctcctggcagaggcaggcgtgcggctgctgtcctaccagacttcactggtgtcagatggggagacctggcacgtcatgggcatctcctccttgctgcccagcctggaagcgtggaagcagcatgtgactgaagccttccagttccacttctaaccttggagctcactggtccctgcctctggggcttttctgaagaaacccacccactgtgatcaatagggagagaaaatccacattcttgggctgaacgcgggcctctgacactgcttacactgcactctgaccctgtagtacagcaataaccgtctaataaagagcctacccccaaaaaaaaaaaaaaaaaaaaaaaaaaaaaaaaaaaaaaaaaaaaaaaaaaaaaaaaa

SEQ ID NO: 316 - protein, 533 aa, Homo sapien
MAFANLRKVLISDSLDPCCRKILQDGGLQVVEKQNLSKEELIAELQDCEGLIVRSATKVTADVINAAEKLQVVGRAGTGVDNVDLEAATRKGILVMNTPNGNSLSAAELTCGMIMCLARQIPQATASMKDGKWERKKFMGTELNGKTLGILGLGRIGREVATRMQSFGMKTIGYDPIISPEVSASFGVQQLPLEEIWPLCDFITVHTPLLPSTTGLLNDNTFAQCKKGVRVVNCARGGIVDEGALLRALQSGQCAGAALDVFTEEPPRDRALVDHENVISCPHLGASTKEAQSRCGEEIAVQFVDMVKGKSLTGVVNAQALTSAFSPHTKPWIGLAEALGTLMRAWAGSPKGTIQVITQGTSLKNAGNCLSPAVIVGLLKEASKQADVNLVNAKLLVKEAGLNVTTSHSPAAPGEQGFGECLLAVALAGAPYQAVGLVQGTTPVLQGLNGAVFRPEVPLRRDLPLLLFRTQTSDPAMLPTMIGLLAEAGVRLLSYQTSLVSDGETWHVMGISSLLPSLEAWKQHVTEAFQFHF

SEQ ID NO: 317 - DNA, 688 bp, Homo sapien
agccccgccccaggcgagggcgccgcacccacaccgcgctgcgcagttttgttctgctccagctgttcgaaggtgatccagacgcaagatggctgtcctctctaaggaatatggttttgtgcttctaactggtgctgccagctttataatggtggcccacctagccatcaatgtttccaaggcccgcaagaagtacaaagtggagtatcctatcatgtacagcacggaccctgaaaatgggcacatcttcaactgcattcagcgagcccaccagaacacgttggaagtgtatcctcccttcttattttttctagctgttggaggtgtttaccacccgcgtatagcttctggcctgggcttggcctggattgttggacgagttctttatgcttatggctattacacgggagaacccagcaagcgtagtcgaggagccctggggtccatcgccctcctgggcttggtgggcacaactgtgtgctctgctttccagcatcttggttgggttaaaagtggcttgggcagtggacccaaatgctgccattaaagaattataggggtttaaaaactctcattcattttaaatgacttacctttatttccagttacattttttttctaaatataataaaaacttacctggcatcagcctcatacctaaaaaaaaaaaaaaaaaaaaaaaaaaaaa

SEQ ID NO: 318 - protein, 152 aa, Homo sapien
MAVLSKEYGFVLLTGAASFIMVAHLAINVSKARKKYKVEYPIMYSTDPENGHIFNCIQRAHQNTLEVYPPFLFFLAVGGVYHPRIASGLGLAWIVGRVLYAYGYYTGEPSKRSRGALGSIALLGLVGTTVCSAFQHLGWVKSGLGSGPKCCH

SEQ ID NO: 319 - DNA, 425 bp, Rattus norvegicus
gcggtttctttctttccgcgccgatagcgctcacgcaagcatggttaacgtccctaaaacccgccggactttctgtaagaagtgtggcaagcaccaaccccataaagtgacacagtacaagaagggcaaggattctctgtacgcccagggaaagcggcgttatgacaggaagcagagtggctatggtgggcaaactaagccgattttccggaaaaaggctaaaactacaaagaagattgtgctaaggcttgagtgcgttgagcccaactgcagatctaagagaatgctggctattaaaagatgcaagcattttgaactgggaggagataagaagagaaagggccaagtgatccagttctaagtgtcatcttttattatgaagacaataaaatcttgagtttatgttcaaaaaaaaaaaaaaaaaa

SEQ ID NO: 320 - protein, 106 aa, Rattus norvegicus [sequence omitted]

SEQ ID NO: 321 - DNA, 2428 bp, Homo sapien
cgtccagtttgagtctaggttggagttggaaccgtggagatgcggaaggaaaccccaccccccctagtgcccccggcggcccgggagtggaatcttcccccaaatgcgcccgcctgcatggaacggcagttggaggctgcgcggtaccggtccgatggggcgcttctcctcggggcctccagcctgagtgggcgctgctgggccggctccctctggctttttaaggacccctgtgccgcccccaacgaaggcttctgctccgccggagtccaaacggaggctggagtggctgacctcacttgggttggggagagaggtattctagtggcctccgattcaggtgctgttgaattgtgggaactagatgagaatgagacacttattgtcagcaagttctgcaagtatgagcatgatgacattgtgtctacagtcagtgtcttgagctctggcacacaagctgtcagtggtagcaaagacatctgcatcaaggtttgggaccttgctcagcaggtggtactgagttcataccgagctcatgctgctcaggtcacttgtgttgctgcctctcctcacaaggactctgtgtttctttcatgcagcgaggacaatagaattttactctgggatacccgctgtcccaagccagcatcacagattggctgcagtgcgcctggctaccttcctacctcgctggcttggcatcctcagcaaagtgaagtctttgtctttggtgatgagaatgggacagtctcccttgtggacaccaagagtacaagctgtgtcctgagctcagctgtacactcccagtgtgtcactgggctggtgttctccccacacagtgttcccttcctggcctctctcagtgaagactgctcacttgctgtgctggactcaagcctttctgagttgtttagaagccaagcccacagagactttgtgagagatgcgacttggtccccgctcaatcactccctgcttaccacagtgggctgggaccatcaggtcgtccaccacgttgtgcccacagaacctctcccagcccctggacctgcaagtgttactgagtagattggatttaagacaaaaagcaagtcccccatgagtgtccacttctttgccctgccctctcagcttgtgagacaacacaggagccttctatagtatgttgatatgctagatctgtgccgttaataggcatcgtctctcagcctgagggaggctggattctgggttcctgtagtcacagggaggaaaagctttcttaaaaatggacatgtatgtgcgtgtgagtgtgtgtgtagatttatagtttttggtagtggcaggaataaaaaaaatccatcctacatcttccctaagcactgcctctctctcaccccccaaaacaagttgacgaaagggttttatgtagctgtctatgaggaattggccgtgtctgggtgggttatgggatgtgggcatccctgggttcttggaagcagctcttatgctactcatagagatgggattgactttatttttttatagtgcttaattcaccattatgagaaatgcttccagtcacaaaaatgcagcccagctcactctgaggaagaagcaggacttggtacggttttacacaactccttaccattaaactgaatcagaaatccattttctggctgaataaaaagtttggcttgcctgtgtaatgcccactcccttccccctggctccctagtgatgggacatatatgagagagaagtgtttttctatcatagacaccataggggaaagtttggggatgaaggagagcttaaaggtgtttcaattaagttagaaaactgacacaggctgttgagaattctttgccacttttcccaccccaaaacagcatggggcctgacatcttctgccctggtcccctttctcttgatgtggaaagtctgaatgcagtatttatagacttctaaggttttaaaatccagtatcaagaagaaaatcagaaatactggttggtgaaataaagagtttaggcattgttggcctgtcttttttgaagcatgtgtgttatgtgtagttagatatatttcacttatgtgagtcatcatggtgttggtcttgtagcccattatttttcctgtgcttccccagcttcccaaagtagctagttagaacttaaggtaaatatttattcttgggttggtggagtggatattgccagttaggagtcatggatcaattactgattatattgaaagtaaatataatcaattatgtacttttgagctttgcaggttcaatttaggtaaaaatcacattatgaaactgggaaagtctgaaggaatatgggcaaaatatttctcagtaaagcttccatgcttcacccttgacatgattacccttgagtaaaacatgggaatttgtaaaaaaaaaaaaaaaaaaaaa

SEQ ID NO: 322 - protein, 342 aa, Homo sapien
MRKETPPPLVPPAAREWNLPPNAPACMERQLEAARYRSDGALLLGASSLSGRCWAGSLWLFKDPCAAPNEGFCSAGVQTEAGVADLTWVGERGILVASDSGAVELWELDENETLIVSKFCKYEHDDIVSTVSVLSSGTQAVSGSKDICIKVWDLAQQVVLSSYRAHAAQVTCVAASPHKDSVFLSCSEDNRILLWDTRCPKPASQIGCSAPGYLPTSLAWHPQQSEVFVFGDENGTVSLVDTKSTSCVLSSAVHSQCVTGLVFSPHSVPFLASLSEDCSLAVLDSSLSELFRSQAHRDFVRDATWSPLNHSLLTTVGWDHQVVHHVVPTEPLPAPGPASVTE

SEQ ID NO: 323 - DNA, 2279 bp, Homo sapien
tgcctgctgagggtggagacccacgagccgaggcctcctgcagtgttctgcacagcaaaccgcacgctatggctgacagccgggatcccgccagcgaccagatgcagcactggaaggagcagcgggccgcgcagaaagctgatgtcctgaccactggagctggtaacccagtaggagacaaacttaatgttattacagtagggccccgtgggccccttcttgttcaggatgtggttttcactgatgaaatggctcattttgaccgagagagaattcctgagagagttgtgcatgctaaaggagcaggggcctttggctactttgaggtcacacatgacattaccaaatactccaaggcaaaggtatttgagcatattggaaagaagactcccatcgcagttcggttctccactgttgctggagaatcgggttcagctgacacagttcgggaccctcgtgggtttgcagtgaaattttacacagaagatggtaactgggatctcgttggaaataacacccccattttcttcatcagggatcccatattgtttccatcttttatccacagccaaaagagaaatcctcagacacatctgaaggatccggacatggtctgggacttctggagcctacgtcctgagtctctgcatcaggtttctttcttgttcagtgatcgggggattccagatggacatcgccacatgaatggatatggatcacatactttcaagctggttaatgcaaatggggaggcagtttattgcaaattccattataagactgaccagggcatcaaaaacctttctgttgaagatgcggcgagactttcccaggaagatcctgactatggcatccgggatctttttaacgccattgccacaggaaagtacccctcctggactttttacatccaggtcatgacatttaatcaggcagaaacttttccatttaatccattcgatctcaccaaggtttggcctcacaaggactaccctctcatcccagttggtaaactggtcttaaaccggaatccagttaattactttgctgaggttgaacagatagccttcgacccaagcaacatgccacctggcattgaggccagtcctgacaaaatgcttcagggccgcctttttgcctatcctgacactcaccgccatcgcctgggacccaattatcttcatatacctgtgaactgtccctaccgtgctcgagtggccaactaccagcgtgatggcccgatgtgcatgcaggacaatcagggtggtgctccaaattactaccccaacagctttggtgctccggaacaacagccttctgccctggagcacagcatccaatattctggagaagtgcggagattcaacactgccaatgatgataacgttactcaggtgcgggcattctatgtgaacgtgctgaatgaggaacagaggaaacgtctgtgtgagaacattgccggccacctgaaggatgcacaaattttcatccagaagaaagcggtcaagaacttcactgaggtccaccctgactacgggagccacatccaggctcttctggacaagtacaatgctgagaagcctaagaatgcgattcacacctttgtgcagtccggatctcacttggcggcaagggagaaggcaaatctgtgaggccggggccctgcacctgtgcagcgaagcttagcgttcatccgtgtaacccgctcatcactggatgaagattctcctgtgctagatgtgcaaatgcaagctagtggcttcaaaatagagaatcccactttctatagcagattgtgtaacaattttaatgctatttccccaggggaaaatgaaggttaggatttaacagtcatttaaaaaaaaaatttgttttgacggatgattggattattcatttaaaatgattagaaggcaagtttctagctagaaatatgattttatttgacaaaatttgttgaaattatgtatgtttacatatcacctcatggcctattatattaaaatatggctataaatatataaaaagaaaagataaagatgatctactcagaaatttttatttttctaaggttctcataggaaaagtacatttaatacagcagtgtcatcagaagataacttgagcaccgtcatggcttaatgtttattcctgataataattgatcaaattcatttttttcactggagttacattaatgttaattcagcactgatttcacaacagatcaatttgtaattgcttacatttttacaataaataatctgtacgtaagaaca

SEQ ID NO: 324 - protein, 527 aa, Homo sapien
MADSRDPASDQMQHWKEQRAAQKADVLTTGAGNPVGDKLNVITVGPRGPLLVQDVVFTDEMAHFDRERIPERVVHAKGAGAFGYFEVTHDITKYSKAKVFEHIGKKTPIAVRFSTVAGESGSADTVRDPRGFAVKFYTEDGNWDLVGNNTPIFFIRDPILFPSFIHSQKRNPQTHLKDPDMVWDFWSLRPESLHQVSFLFSDRGIPDGHRHMNGYGSHTFKLVNANGEAVYCKFHYKTDQGIKNLSVEDAARLSQEDPDYGIRDLFNAIATGKYPSWTFYIQVMTFNQAETFPFNPFDLTKVWPHKDYPLIPVGKLVLNRNPVNYFAEVEQIAFDPSNMPPGIEASPDKMLQGRLFAYPDTHRHRLGPNYLHIPVNCPYRARVANYQRDGPMCMQDNQGGAPNYYPNSFGAPEQQPSALEHSIQYSGEVRRFNTANDDNVTQVRAFYVNVLNEEQRKRLCENIAGHLKDAQIFIQKKAVKNFTEVHPDYGSHIQALLDKYNAEKPKNAIHTFVQSGSHLAAREKANL

SEQ ID NO: 325 - DNA, 10558 bp, Homo sapien
cagtttggagctcagtcttccaccaaaggccgttcagttctcctgggctccagcctcctgcaaggactgcaagagttttcctccgcagctctgagtctccacttttttggtggagaaaggctgcaaaaagaaaaagagacgcagtgagtgggaaaagtatgcatcctattcaaacctaattgaatcgaggagcccagggacacacgccttcaggtttgctcaggggttcatatttggtgcttagacaaattcaaaatgaggaaacatcggcacttgcccttagtggccgtcttttgcctctttctctcaggctttcctacaactcatgcccagcagcagcaagcagatgtcaaaaatggtgcggctgctgatataatatttctagtggattcctcttggaccattggagaggaacatttccaacttgttcgagagtttctatatgatgttgtaaaatccttagctgtgggagaaaatgatttccattttgctctggtccagttcaacggaaacccacataccgagttcctgttaaatacgtatcgtactaaacaagaagtcctttctcatatttccaacatgtcttatattgggggaaccaatcagactggaaaaggattagaatacataatgcaaagccacctcaccaaggctgctggaagccgggccggtgacggagtccctcaggttatcgtagtgttaactgatggacactcgaaggatggccttgctctgccctcagcggaacttaagtctgctgatgttaacgtgtttgcaattggagttgaggatgcagatgaaggagcgttaaaagaaatagcaagtgaaccgctcaatatgcatatgttcaacctagagaattttacctcacttcatgacatagtaggaaacttagtgtcctgtgtgcattcatccgtgagtccagaaagggctggggacacggaaacccttaaagacatcacagcacaagactctgctgacattattttccttattgatggatcaaacaacaccggaagtgtcaatttcgcagtcattctcgacttccttgtaaatctccttgagaaactcccaattggaactcagcagatccgagtgggggtggtccagtttagcgatgagcccagaaccatgttttccttggacacctactccaccaaggcccaggttctgggtgcagtgaaagccctcgggtttgctggtggggagttggccaatatcggcctcgcccttgatttcgtggtggagaaccacttcacccgggcagggggcagccgcgtggaggaaggggttccccaggtgctggtcctcataagtgccgggccttctagtgacgagattcgctacggggtggtagcactgaagcaggctagcgtgttctcattcggccttggagcccaggccgcctccagggcagagcttcagcacatagctaccgatgacaacttggtgtttactgtcccggaattccgtagctttggggacctccaggagaaattactgccgtacattgttggcgtggcccaaaggcacattgtcttgaaaccgccaaccattgtcacacaagtcattgaagtcaacaagagagacatagtcttcctggtggatggctcatctgcactgggactggccaacttcaatgccatccgagacttcattgctaaagtcatccagaggctggaaatcggacaggatcttatccaggtggcagtggcccagtatgcagacactgtgaggcctgaattttatttcaatacccatccaacaaaaagggaagtcataaccgctgtgcggaaaatgaagcccctggacggctcggccctgtacacgggctctgctctagactttgttcgtaacaacctattcacgagttcagccggctaccgggctgccgaggggattcctaagcttttggtgctgatcacaggtggtaagtccctagatgaaatcagccagcctgcccaggagctgaagagaagcagcataatggcctttgccattgggaacaagggtgccgatcaggctgagctggaagagatcgctttcgactcctccctggtgttcatcccagctgagttccgagccgccccattgcaaggcatgctgcctggcttgctggcacctctcaggaccctctctggaacccctgaagttcactcaaacaaaagagatatcatctttcttttggatggatcagccaacgttggaaaaaccaatttcccttatgtgcgcgactttgtaatgaacctagttaacagccttgatattggaaatgacaatattcgtgttggtttagtgcaatttagtgacactcctgtaacggagttctctttaaacacataccagaccaagtcagatatccttggtcatctgaggcagctgcagctccagggaggttcgggcctgaacacaggctcagccctaagctatgtctatgccaaccacttcacggaagctggcggcagcaggatccgtgaacacgtgccgcagctcctgcttctgctcacagctgggcagtctgaggactcctatttgcaagctgccaacgccttgacacgcgcgggcatcctgactttttgtgtgggagctagccaggcgaataaggcagagcttgagcagattgcttttaacccaagcctggtgtatctcatggatgatttcagctccctgccagctttgcctcagcagctgattcagcccctaaccacatatgttagtggaggtgtggaggaagtaccactcgctcagccagagagcaagcgagacattctgttcctctttgacggctcagccaatcttgtgggccagttccctgttgtccgtgactttctctacaagattatcgatgagctcaatgtgaagccagaggggacccgaattgcggtggctcagtacagcgatgatgtcaaggtggagtcccgttttgatgagcaccagagtaagcctgagatcctgaatcttgtgaagagaatgaagatcaagacgggcaaagccctcaacctgggctacgcgctggactatgcacagaggtacatttttgtgaagtctgctggcagccggatcgaggatggagtgcttcagttcctggtgctgctggtcgcaggaaggtcatctgaccgtgtggatgggccagcaagtaacctgaagcagagtggggttgtgcctttcatcttccaagccaagaacgcagaccctgctgagttagagcagatcgtgctgtctccagcgtttatcctggctgcagagtcgcttcccaagattggagatcttcatccacagatagtgaatctcttaaaatcagtgcacaacggagcaccagcaccagtttcaggtgaaaaggacgtggtgtttctgcttgatggctctgagggcgtcaggagcggcttccctctgttgaaagagtttgtccagagagtggtggaaagcctggatgtgggccaggaccgggtccgcgtggccgtggtgcagtacagcgaccggaccaggcccgagttctacctgaattcatacatgaacaagcaggacgtcgtcaacgctgtccgccagctgaccctgctgggagggccgacccccaacaccggggccgccctggagtttgtcctgaggaacatcctggtcagctctgcgggaagcaggataacagaaggtgtgccccagctgctgatcgtcctcacggccgacaggtctggggatgatgtgcggaacccctccgtggtcgtgaagaggggtggggctgtgcccattggcattggcatcgggaacgctgacatcacagagatgcagaccatctccttcatcccggactttgccgtggccattcccacctttcgccagctggggaccgtccaacaggtcatctctgagagggtgacccagctcacccgcgaggagctgagcaggctgcagccggtgttgcagcctctaccgagcccaggtgttggtggcaagagggacgtggtctttctcatcgatgggtcccaaagtgccgggcctgagttccagtacgttcgcaccctcatagagaggctggttgactacctggacgtgggctttgacaccacccgggtggctgtcatccagttcagcgatgaccccaaggcggagttcctgctgaacgcccattccagcaaggatgaagtgcagaacgcggtgcagcggctgaggcccaagggagggcggcagatcaacgtgggcaatgccctggagtacgtgtccaggaacatcttcaagaggcccctggggagccgcattgaagagggcgtcccacagttcctggtcctcatctcgtctggaaagtctgacgatgaggtggtcgtcccggcggtggagctcaagcagtttggcgtggcccctttcacgatcgccaggaacgcagaccaggaggagctggtgaagatctcgctgagccccgaatatgtgttctcggtgagcaccttccgggagctgcccagcctggagcagaaactgctgacgcccatcacgaccctgacctcagagcagatccagaagctcttagccagcactcgctatccacctccagcagttgagagtgatgctgcagacattgtctttctgatcgacagctctgagggagttaggccagatggctttgcacatattcgagattttgttagcaggattgttcgaagactcaacatcggccccagtaaagtgagagttggggtcgtgcagttcagcaatgatgtcttcccagaattctatctgaaaacctacagatcccaggccccggtgctggacgccatacggcgcctgaggctcagaggggggtccccactgaacactggcaaggctctcgaatttgtggcaagaaacctctttgttaagtctgcggggagtcgcatagaagacggggtgccccaacacctggtcctggtcctgggtggaaaatcccaggacgatgtgtccaggttcgcccaggtgatccgttcctcgggcattgtgagtttaggggtaggagaccggaacatcgacagaacagagctgcagaccatcaccaatgaccccagactggtcttcacagtgcgagagttcagagagcttcccaacatagaagaaagaatcatgaactcgtttggaccctccgcagccactcctgcacctccaggggtggacacccctcctccttcacggccagagaagaagaaagcagacattgtgttcctgttggatggttccatcaacttcaggagggacagtttccaggaagtgcttcgttttgtgtctgaaatagtggacacagtttatgaagatggcgactccatccaagtggggcttgtccagtacaactctgaccccactgacgaattcttcctgaaggacttctctaccaagaggcagattattgacgccatcaacaaagtggtctacaaagggggaagacacgccaacactaaggtgggccttgagcacctgcgggtaaaccactttgtgcctgaggcaggcagccgcctggaccagcgggtccctcagattgcctttgtgatcacgggaggaaagtcggtggaagatgcacaggatgtgagcctggccctcacccagaggggggtcaaagtgtttgctgttggagtgaggaatatcgactcggaggaggttggaaagatagcgtccaacagcgccacagcgttccgcgtgggcaacgtccaggagctgtccgaactgagcgagcaagttttggaaactttgcatgatgcgatgcatgaaaccctttgccctggtgtaactgatgctgccaaagcttgtaatctggatgtgattctggggtttgatggttctagagaccagaatgtttttgtggcccagaagggcttcgagtccaaggtggacgccatcttgaacagaatcagccagatgcacagggtcagctgcagcggtggccgctcgcccaccgtgcgtgtgtcagtggtggccaacacgccctcgggcccggtggaggcctttgactttgacgagtaccagccagagatgctcgagaagttccggaacatgcgcagccagcacccctacgtcctcacggaggacaccctgaaggtctacctgaacaagttcagacagtcctcgccggacagcgtgaaggtggtcattcattttactgatggagcagacggagatctggctgatttacacagagcatctgagaacctccgccaagaaggagtccgtgccttgatcctggtgggccttgaacgagtggtcaacttggagcggctaatgcatctggagtttgggcgagggtttatgtatgacaggcccctgaggcttaacttgctggacttggattatgaactagcggagcagcttgacaacattgccgagaaagcttgctgtggggttccctgcaagtgctctgggcagaggggagaccgcgggcccatcggcagcatcgggccaaagggtattcctggagaagacggctaccgaggctatcctggtgatgagggtggacccggtgagcgtggtccgcctggtgtgaacggcactcaaggtttccagggctgcccgggccagagaggagtaaagggctctcggggattcccaggagagaagggcgaagtaggagaaattggactggatggtctggatggtgaagatggagacaaaggattgcctggttcttctggagagaaagggaatcctggaagaaggggtgataaaggacctcgaggagagaaaggagaaagaggagatgttgggattcgaggggacccgggtaacccaggacaagacagccaggagagaggacccaaaggagaaaccggtgacctcggccccatgggtgtcccagggagagatggagtacctggaggacctggagaaactgggaagaatggtggctttggccgaaggggaccccccggagctaagggcaacaagggcggtcctggccagccgggctttgagggagagcaggggaccagaggtgcacagggcccagctggtcctgctggtcctccagggctgataggagaacaaggcatttctggacctaggggaagcggaggtgcccgtggcgctcctggagaacgaggcagaaccggtccactgggaagaaagggtgagcccggagagccaggaccaaaaggaggaatcgggaacccgggccctcgtggggagacgggagatgacgggagagacggagttggcagtgaaggacgcagaggcaaaaaaggagaaagaggatttcctggatacccaggaccaaagggtaacccaggtgaacctgggctaaatggaacaacaggacccaaaggcatcagaggccgaaggggaaattcgggacctccagggatagttggacagaaggggagacctggctacccaggaccagctggtccaaggggcaacaggggcgactccatcgatcaatgtgccctcatccaaagcatcaaagataaatgcccttgctgttacgggcccctggagtgccccgtcttcccaacagaactagcctttgctttagacacctctgagggagtcaaccaagacactttcggccggatgcgagatgtggtcttgagtattgtgaatgtcctgaccattgctgagagcaactgcccgacgggggcccgggtggctgtggtcacctacaacaacgaggtgaccacggagatccggtttgctgactccaagaggaagtcggtcctcctggacaagattaagaaccttcaggtggctctgacatccaaacagcagagtctggagactgccatgtcgtttgtggccaggaacacatttaagcgtgtgaggaacggattcctaatgaggaaagtggctgttttcttcagcaacacacccacaagagcatccccacagctcagagaggctgtgctcaaactctcagatgcggggatcacccccttgttccttacaaggcaggaagaccggcagctcatcaacgctttgcagatcaataacacagcagtggggcatgcgcttgtcctgcctgcagggagagacctcacagacttcctggagaatgtcctcacgtgtcatgtttgcttggacatctgcaacatcgacccatcctgtggatttggcagttggaggccttccttcagggacaggagagcggcagggagtgatgtggacatcgacatggctttcatcttagacagcgctgagaccaccaccctgttccagttcaatgagatgaagaagtacatagcgtacctggtcagacaactggacatgagcccagatcccaaggcctcccagcacttcgccagagtggcagttgtgcagcacgcgccctctgagtccgtggacaatgccagcatgccacctgtgaaggtggaattctccctgactgactatggctccaaggagaagctggtggacttcctcagcaggggaatgacacagttgcagggaaccagggccttaggcagtgccattgaatacaccatagagaatgtctttgaaagtgccccaaacccacgggacctgaaaattgtggtcctgatgctgacgggcgaggtgccggagcagcagctggaggaggcccagagagtcatcctgcaggccaaatgcaagggctacttcttcgtggtcctgggcattggcaggaaggtgaacatcaaggaggtatacaccttcgccagtgagccaaacgacgtcttcttcaaattagtggacaagtccaccgagctcaacgaggagcctttgatgcgcttcgggaggctgttgccgtccttcgtcagcagtgaaaatgctttttacttgtccccagatatcaggaaacagtgtgattggttccaaggggaccaacccacaaagaaccttgtgaagtttggtcacaaacaagtaaatgttccgaataacgttacttcaagtcctacatccaacccagtgacgacaacgaagccggtgactacgacgaagccggtgaccaccacaacaaagcctgtaaccaccacaacaaagcctgtgactattataaatcagccatctgtgaagccagccgctgcaaagccggcccctgcgaaacctgtggctgccaagcctgtggccacaaagacggccactgttagacccccagtggcggtgaagccagcaacagcagcgaagcctgtagcagcaaagccagcagctgtaagaccccccgctgctgctgcaaaaccagtggcgaccaagcctgaggtccctaggccacaggcagccaaaccagctgccaccaagccagccaccactaagcccgtggttaagatgctccgtgaagtccaggtgtttgagataacagagaacagcgccaaactccactgggagaggcctgagccccccggtccttatttttatgacctcaccgtcacctcagcccatgatcagtccctggttctgaagcagaacctcacggtcacggaccgcgtcattggaggcctgctcgctgggcagacataccatgtggctgtggtctgctacctgaggtctcaggtcagagccacctaccacggaagtttcagtacaaagaaatctcagcccccacctccacagccagcaaggtcagcttctagttcaaccatcaatctaatggtgagcacagaaccattggctctcactgaaacagatatatgcaagttgccgaaagacgaaggaacttgcagggatttcatattaaaatggtactatgatccaaacaccaaaagctgtgcaagattctggtatggaggttgtggtggaaacgaaaacaaatttggatcacagaaagaatgtgaaaaggtttgcgctcctgtgctcgccaaacccggagtcatcagtgtgatgggaacctaagcgtgggtggccaacatcatatacctcttgaagaagaaggagtcagccatcgccaacttgtctctgtagaagctccgggtgtagattcccttgcactgtatcatttcatgctttgatttacactcgaactcgggagggaacatcctgctgcatgacctatcagtatggtgctaatgtgtctgtggaccctcgctctctgtctccagcagttctctcgaatactttgaatgttgtgtaacagttagccactgctggtgtttatgtgaacattcctatcaatccaaattccctctggagtttcatgttatgcctgttgcaggcaaatgtaaagtctagaaaataatgcaaatgtcacggctactctatatacttttgcttggttcattttttttcccttttagttaagcatgactttagatgggaagcctgtgtatcgtggagaaacaagagaccaactttttcattccctgcccccaatttcccagactagatttcaagctaattttctttttctgaagcctctaacaaatgatctagttcagaaggaagcaaaatcccttaatctatgtgcaccgttgggaccaatgccttaattaaagaatttaaaaaagttgtaatagagaatatttttggcattcctctcaatgttgtgtgttttttttttttgtgtgctggagggaggggatttaattttaattttaaaatgtttaggaaatttatacaaagaaactttttaataaagtatattgaaagtttaaaaaaaaaaaaaaaa

SEQ ID NO: 326 - protein, 2000 aa, Homo sapien
MRKHRHLPLVAVFCLFLSGFPTTHAQQQQADVKNGAAADIIFLVDSSWTIGEEHFQLVREFLYDVVKSLAVGENDFHFALVQFNGNPHTEFLLNTYRTKQEVLSHISNMSYIGGTNQTGKGLEYIMQSHLTKAAGSRAGDGVPQVIVVLTDGHSKDGLALPSAELKSADVNVFAIGVEDADEGALKEIASEPLNMHMFNLENFTSLHDIVGNLVSCVHSSVSPERAGDTETLKDITAQDSADIIFLIDGSNNTGSVNFAVILDFLVNLLEKLPIGTQQIRVGVVQFSDEPRTMFSLDTYSTKAQVLGAVKALGFAGGELANIGLALDFVVENHFTRAGGSRVEEGVPQVLVLISAGPSSDEIRYGVVALKQASVFSFGLGAQAASRAELQHIATDDNLVFTVPEFRSFGDLQEKLLPYIVGVAQRHIVLKPPTIVTQVIEVNKRDIVFLVDGSSALGLANFNAIRDFIAKVIQRLEIGQDLIQVAVAQYADTVRPEFYFNTHPTKREVITAVRKMKPLDGSALYTGSALDFVRNNLFTSSAGYRAAEGIPKLLVLITGGKSLDEISQPAQELKRSSIMAFAIGNKGADQAELEEIAFDSSLVFIPAEFRAAPLQGMLPGLLAPLRTLSGTPEVHSNKRDIIFLLDGSANVGKTNFPYVRDFVMNLVNSLDIGNDNIRVGLVQFSDTPVTEFSLNTYQTKSDILGHLRQLQLQGGSGLNTGSALSYVYANHFTEAGGSRIREHVPQLLLLLTAGQSEDSYLQAANALTRAGILTFCVGASQANKAELEQIAFNPSLVYLMDDFSSLPALPQQLIQPLTTYVSGGVEEVPLAQPESKRDILFLFDGSANLVGQFPVVRDFLYKIIDELNVKPEGTRIAVAQYSDDVKVESRFDEHQSKPEILNLVKRMKIKTGKALNLGYALDYAQRYIFVKSAGSRIEDGVLQFLVLLVAGRSSDRVDGPASNLKQSGVVPFIFQAKNADPAELEQIVLSPAFILAAESLPKIGDLHPQIVNLLKSVHNGAPAPVSGEKDVVFLLDGSEGVRSGFPLLKEFVQRVVESLDVGQDRVRVAVVQYSDRTRPEFYLNSYMNKQDVVNAVRQLTLLGGPTPNTGAALEFVLRNILVSSAGSRITEGVPQLLIVLTADRSGDDVRNPSVVVKRGGAVPIGIGIGNADITEMQTISFIPDFAVAIPTFRQLGTVQQVISERVTQLTREELSRLQPVLQPLPSPGVGGKRDVVFLIDGSQSAGPEFQYVRTLIERLVDYLDVGFDTTRVAVIQFSDDPKAEFLLNAHSSKDEVQNAVQRLRPKGGRQINVGNALEYVSRNIFKRPLGSRIEEGVPQFLVLISSGKSDDEVVVPAVELKQFGVAPFTIARNADQEELVKISLSPEYVFSVSTFRELPSLEQKLLTPITTLTSEQIQKLLASTRYPPPAVESDAADIVFLIDSSEGVRPDGFAHIRDFVSRIVRRLNIGPSKVRVGVVQFSNDVFPEFYLKTYRSQAPVLDAIRRLRLRGGSPLNTGKALEFVARNLFVKSAGSRIEDGVPQHLVLVLGGKSQDDVSRFAQVIRSSGIVSLGVGDRNIDRTELQTITNDPRLVFTVREFRELPNIEERIMNSFGPSAATPAPPGVDTPPPSRPEKKKADIVFLLDGSINFRRDSFQEVLRFVSEIVDTVYEDGDSIQVGLVQYNSDPTDEFFLKDFSTKRQIIDAINKVVYKGGRHANTKVGLEHLRVNHFVPEAGSRLDQRVPQIAFVITGGKSVEDAQDVSLALTQRGVKVFAVGVRNIDSEEVGKIASNSATAFRVGNVQELSELSEQVLETLHDAMHETLCPGVTDAAKACNLDVILGFDGSRDQNVFVAQKGFESKVDAILNRISQMHRVSCSGGRSPTVRVSVVANTPSGPVEAFDFDEYQPEMLEKFRNMRSQHPYVLTEDTLKVYLNKFRQSSPDSVKVVIHFTDGADGDLADLHRASENLRQEGVRALILVGLERVVNLERLMHLEFGRGF

SEQ ID NO: 327 - DNA, 2390 bp, Homo sapien
attggggtttcattgttcccgctgggccgggcggtttagtgtaattgccgccggaggaggaggcggagtaacctctggtcagccgagaaaccccactatcctgtagccataaccgcttaaacgatttgggaggtagtgaagggcagggagctggacctggaggcgccgccgcgacagcagcagccatggaggacgagatgcccaagactctatacgtcggtaacctttccagagatgtgacagaagctctaattctgcaactctttagccagattggaccttgtaaaaactgcaaaatgattatggatacagctggaaatgatccctattgttttgtggagtttcatgagcatcgtcatgcagctgcagcattagctgctatgaatggacggaagataatgggtaaggaagtcaaagtgaattgggcaacaacccctagcagtcaaaagaaagatacaagcagtagtaccgttgtcagcacacagcgttcacaagatcatttccatgtctttgttggtgatctcagcccacaaattacaactgaagatataaaagctgcttttgcaccatttggaagaatatcagatgcccgagtggtaaaagacatggcaacaggaaagtctaagggatatggctttgtctcctttttcaacaaatgggatgctgaaaacgccattcaacagatgggtggccagtggcttggtggaagacaaatcagaactaactgggcaacccgaaagcctcccgctccaaagagtacatatgagtcaaataccaaacagctatcatatgatgaggttgtaaatcagtctagtccaagcaactgtactgtatactgtggaggtgttacttctgggctaacagaacaactaatgcgtcagactttttcaccatttggacaaataatggaaattcgagtctttccagataaaggatattcatttgttcggttcaattcccatgaaagtgcagcacatgcaattgtttctgttaatggtactaccattgaaggtcatgttgtgaaatgctattggggcaaagaaactcttgatatgataaatcccgtgcaacagcagaatcaaattggatatccccaaccttatggccagtggggccagtggtatggaaatgcacaacaaattggccagtatatgcctaatggttggcaagttcctgcatatggaatgtatggccaggcatggaaccagcaaggatttaatcagacacagtcttctgcaccatggatgggaccaaattatggagtgcaaccgcctcaagggcaaaatggcagcatgttgcccaatcagccttctgggtatcgagtggcagggtatgaaacccagtgaataaggactccagaatctaaagccagtggcttgaggctacagggagtgtagtaaagccgttgtttacttaaagatttatcaaatcagtcagtgcaaatgtcagatacaatgtattcatttaaaagattcatttttaatcatgaaattacttatcatccacattgttttaaaaagaaacaagatgctggatgtctgccaatttttgccttcattaccttttttgataaagtttctcagatccttgtttcaaacacaaatgcagggattgctgccactttttaactattaagaggcagaaaattgcacaatattgaacttttttccactgaagtagtgtgcagttctagtttgcattcctgatatgatttaaaacatgtaatataaagatgttaaaaaaaaaaaccaaaactgtgcagagtctagaagttgtttgtcatcttcagcttgtgcacaattctgttttaggttaaaaaaaggcattgtttgagctgtcccatctccactgttatccctttgggttttttaatataaattattagtttacatcatttttgtatctacatcttttttcacaaatttgtcttgccttattaaagttctgtaaaatatacttaaatggaaaaaatgatgttcatttagattgaaaacttttctcagatggattgataattgcattcatcttgtgttttatatgagaaggtgcctcaagaatttcctgttggatttgtttaaaaggatttttatctttcgtgataaactttgctgtgtaccaggaactataaaaacaaaaacttgttactaaagaaaatatctgaaatgtgataagttcttatgccatgttaatttcatgtgtcaacttcaacatttacatgtattatttcattatgtaaaatgttttagcaatttaatattttgcacagttagcaaactttgtatgtcatttccttcaaggcatcatgcagagttgacatgagatttataaggttttaagttgtttgcatgtgaaaatcaaatacatactttggtagtctttgaaaaaaaaaa

SEQ ID NO: 328 - protein, 386 aa, Homo sapien
MEDEMPKTLYVGNLSRDVTEALILQLFSQIGPCKNCKMIMDTAGNDPYCFVEFHEHRHAAAALAAMNGRKIMGKEVKVNWATTPSSQKKDTSSSTVVSTQRSQDHFHVFVGDLSPQITTEDIKAAFAPFGRISDARVVKDMATGKSKGYGFVSFFNKWDAENAIQQMGGQWLGGRQIRTNWATRKPPAPKSTYESNTKQLSYDEVVNQSSPSNCTVYCGGVTSGLTEQLMRQTFSPFGQIMEIRVFPDKGYSFVRFNSHESAAHAIVSVNGTTIEGHVVKCYWGKETLDMINPVQQQNQIGYPQPYGQWGQWYGNAQQIGQYMPNGWQVPAYGMYGQAWNQQGFNQTQSSAPWMGPNYGVQPPQGQNGSMLPNQPSGYRVAGYETQ

SEQ ID NO: 329 - DNA, 1488 bp, Homo sapien
gttggtgagcatcatggcaaccgttacagccacaaccaaagtcccggagatccgtgatgtaacaaggattgagcgaatcggtgcccactcccacatccggggactggggctggacgatgccttggagcctcggcaggcttcgcaaggcatggtgggtcagctggcggcacggcgggcggctggcgtggtgctggagatgatccgggaagggaagattgccggtcgggcagtccttattgctggccagccgggcacggggaagacggccatcgccatgggcatggcgcaggccctgggccctgacacgccattcacagccatcgccggcagtgaaatcttctccctggagatgagcaagaccgaggcgctgacgcaggccttccggcggtccatcggcgttcgcatcaaggaggagacggagatcatcgaaggggaggtggtggagatccagattgatcgaccagcaacagggacgggctccaaggtgggcaaactgaccctcaagaccacagagatggagaccatctacgacctgggcaccaagatgattgagtccctgaccaaggacaaggtccaggccggggacgtgatcaccatcgacaaggcgacgggcaagatctccaagctgggccgctccttcacacgcgcccgcgactacgacgctatgggctcccagaccaagttcgtgcagtgcccagatggggagctccagaaacgcaaggaggtggtgcacaccgtgtccctgcacgagatcgacgtcatcaactctcgcacccagggcttcctggcgctcttctcaggtgacacaggggagatcaagtcagaagtccgtgagcagatcaatgccaaggtggctgagtggcgcgaggagggcaaggcggagatcatccctggagtgctgttcatcgacgaggtccacatgctggacatcgagagcttctccttcctcaaccgggccctggagagtgacatggcgcctgtcctgatcatggccaccaaccgtggcatcacgcgaatccggggcaccagctaccagagccctcacggcatccccatagacctgctggaccggctgcttatcgtctccaccaccccctacagcgagaaagacacgaagcagatcctccgcatccggtgcgaggaagaagatgtggagatgagtgaggacgcctacacggtgctgacccgcatcgggctggagacgtcactgcgctacgccatccagctcatcacagctgccagcttggtgtgccggaaacgcaagggtacagaagtgcaggtggatgacatcaagcgggtctactcactcttcctggacgagtcccgctccacgcagtacatgaaggagtaccaggacgccttcctcttcaacgaactcaaaggcgagaccatggacacctcctgagttggatgtcatcccccgaccccaccctgttttccaccagagttctgacactgtgactctgtataaaatggttgggaagctgc

SEQ ID NO: 330 - protein, 463 aa, Homo sapien
MATVTATTKVPEIRDVTRIERIGAHSHIRGLGLDDALEPRQASQGMVGQLAARRAAGVVLEMIREGKIAGRAVLIAGQPGTGKTAIAMGMAQALGPDTPFTAIAGSEIFSLEMSKTEALTQAFRRSIGVRIKEETEIIEGEVVEIQIDRPATGTGSKVGKLTLKTTEMETIYDLGTKMIESLTKDKVQAGDVITIDKATGKISKLGRSFTRARDYDAMGSQTKFVQCPDGELQKRKEVVHTVSLHEIDVINSRTQGFLALFSGDTGEIKSEVREQINAKVAEWREEGKAEIIPGVLFIDEVHMLDIESFSFLNRALESDMAPVLIMATNRGITRIRGTSYQSPHGIPIDLLDRLLIVSTTPYSEKDTKQILRIRCEEEDVEMSEDAYTVLTRIGLETSLRYAIQLITAASLVCRKRKGTEVQVDDIKRVYSLFLDESRSTQYMKEYQDAFLFNELKGETMDTS

SEQ ID NO: 331 - DNA, 3254 bp, Homo sapien
agagttgcactgagtgtggctgaagcagcgaggcgggagtggaggtgcgcggagtcaggcagacagacagacacagccagccagccaggtcggcagtatagtccgaactgcaaatcttattttcttttcaccttctctctaactgcccagagctagcgcctgtggctcccgggctggtggttcgggagtgtccagagagccttgtctccagccggccccgggaggagagccctgctgcccaggcgctgttgacagcggcggaaagcagcggtaccccacgcgcccgccgggggacgtcggcgagcggctgcagcagcaaagaactttcccggcggggaggaccggagacaagtggcagagtcccggagcgaacttttgcaagcctttcctgcgtcttaggcttctccacggcggtaaagaccagaaggcggcggagagccacgcaagagaagaaggacgtgcgctcagcttcgctcgcaccggttgttgaacttgggcgagcgcgagccgcggctgccgggcgccccctccccctagcagcggaggaggggacaagtcgtcggagtccgggcggccaagacccgccgccggccggccactgcagggtccgcactgatccgctccgcggggagagccgctgctctgggaagtgagttcgcctgcggactccgaggaaccgctgcgcccgaagagcgctcagtgagtgaccgcgacttttcaaagccgggtagcgcgcgcgagtcgacaagtaagagtgcgggaggcatcttaattaaccctgcgctccctggagcgagctggtgaggagggcgcagcggggacgacagccagcgggtgcgtgcgctcttagagaaactttccctgtcaaaggctccggggggcgcgggtgtcccccgcttgccagagccctgttgcggccccgaaacttgtgcgcgcacgccaaactaacctcacgtgaagtgacggactgttctatgactgcaaagatggaaacgaccttctatgacgatgccctcaacgcctcgttcctcccgtccgagagcggaccttatggctacagtaaccccaagatcctgaaacagagcatgaccctgaacctggccgacccagtggggagcctgaagccgcacctccgcgccaagaactcggacctcctcacctcgcccgacgtggggctgctcaagctggcgtcgcccgagctggagcgcctgataatccagtccagcaacgggcacatcaccaccacgccgacccccacccagttcctgtgccccaagaacgtgacagatgagcaggaggggttcgccgagggcttcgtgcgcgccctggccgaactgcacagccagaacacgctgcccagcgtcacgtcggcggcgcagccggtcaacggggcaggcatggtggctcccgcggtagcctcggtggcagggggcagcggcagcggcggcttcagcgccagcctgcacagcgagccgccggtctacgcaaacctcagcaacttcaacccaggcgcgctgagcagcggcggcggggcgccctcctacggcgcggccggcctggcctttcccgcgcaaccccagcagcagcagcagccgccgcaccacctgccccagcagatgcccgtgcagcacccgcggctgcaggccctgaaggaggagcctcagacagtgcccgagatgcccggcgagacaccgcccctgtcccccatcgacatggagtcccaggagcggatcaaggcggagaggaagcgcatgaggaaccgcatcgctgcctccaagtgccgaaaaaggaagctggagagaatcgcccggctggaggaaaaagtgaaaaccttgaaagctcagaactcggagctggcgtccacggccaacatgctcagggaacaggtggcacagcttaaacagaaagtcatgaaccacgttaacagtgggtgccaactcatgctaacgcagcagttgcaaacattttgaagagagaccgtcgggggctgaggggcaacgaagaaaaaaaataacacagagagacagacttgagaacttgacaagttgcgacggagagaaaaaagaagtgtccgagaactaaagccaagggtatccaagttggactgggttcggtctgacggcgcccccagtgtgcacgagtgggaaggacttggtcgcgccctcccttggcgtggagccagggagcggccgcctgcgggctgccccgctttgcggacgggctgtccccgcgcgaacggaacgttggactttcgttaacattgaccaagaactgcatggacctaacattcgatctcattcagtattaaaggggggagggggagggggttacaaactgcaatagagactgtagattgcttctgtagtactccttaagaacacaaagcggggggagggttggggaggggcggcaggagggaggtttgtgagagcgaggctgagcctacagatgaactctttctggcctgctttcgttaactgtgtatgtacatatatatattttttaatttgattaaagctgattactgtcaataaacagcttcatgcctttgtaagttatttcttgtttgtttgtttgggtatcctgcccagtgttgtttgtaaataagagatttggagcactctgagtttaccatttgtaataaagtatataatttttttatgttttgtttctgaaaattccagaaaggatatttaagaaaatacaataaactattggaaagtactcccctaacctcttttctgcatcatctgtagatcctagtctatctaggtggagttgaaagagttaagaatgctcgataaaatcactctcagtgcttcttactattaagcagtaaaaactgttctctattagacttagaaataaatgtacctgatgtacctgatgctatgtcaggcttcatactccacgctcccccagcgtatctatatggaattgcttaccaaaggctagtgcgatgtttcaggaggctggaggaaggggggttgcagtggagagggacagcccactgagaagtcaaacatttcaaagtttggattgcatcaagtggcatgtgctgtgaccatttataatgttagaaattttacaataggtgcttattctcaaagcaggaattggtggcagattttacaaaagatgtatccttccaatttggaatcttctctttgacaattcctagataaaaagatggcctttgtcttatgaatatttataacagcattctgtcacaataaatgtattcaaataccaat

SEQ ID NO: 332 - protein, 331 aa, Homo sapien
MTAKMETTFYDDALNASFLPSESGPYGYSNPKILKQSMTLNLADPVGSLKPHLRAKNSDLLTSPDVGLLKLASPELERLIIQSSNGHITTTPTPTQFLCPKNVTDEQEGFAEGFVRALAELHSQNTLPSVTSAAQPVNGAGMVAPAVASVAGGSGSGGFSASLHSEPPVYANLSNFNPGALSSGGGAPSYGAAGLAFPAQPQQQQQPPHHLPQQMPVQHPRLQALKEEPQTVPEMPGETPPLSPIDMESQERIKAERKRMRNRIAASKCRKRKLERIARLEEKVKTLKAQNSELASTANMLREQVAQLKQKVMNHVNSGCQLMLTQQLQTF

SEQ ID NO: 333 - DNA, 3254 bp, Homo sapien; identical to SEQ ID NO: 331

SEQ ID NO: 334 - protein, 331 aa, Homo sapien; identical to SEQ ID NO: 332

SEQ ID NO: 335 - DNA, 2870 bp, Homo sapien
ggcctgggtggcgaattcggcacgaggctcgccgctcgctatggcgtcgctcaccgtgaaggcctaccttctgggcaaggaggacgcggcgcgcgagattcgccgcttcagcttctgctgcagccccgagcctgaggcggaagccgaggctgcggcgggtccgggaccctgcgagcggctgctgagccgggtggccgccctgttccccgcgctgcggcctggcggcttccaggcgcactaccgcgatgaggacggggacttggttgccttttccagtgacgaggaattgacaatggccatgtcctacgtgaaggatgacatcttccgaatctacattaaagagaaaaaagagtgccggcgggaccaccgcccaccgtgtgctcaggaggcgccccgcaacatggtgcaccccaatgtgatctgcgatggctgcaatgggcctgtggtaggaacccgctacaagtgcagcgtctgcccagactacgacttgtgtagcgtctgcgagggaaagggcttgcaccgggggcacaccaagctcgcattccccagccccttcgggcacctgtctgagggcttctcgcacagccgctggctccggaaggtgaaacacggacacttcgggtggccaggatgggaaatgggtccaccaggaaactggagcccacgtcctcctcgtgcaggggaggcccgccctggccccacggcagaatcagcttctggtccatcggaggatccgagtgtgaatttcctgaagaacgttggggagagtgtggcagctgcccttagccctctgggcattgaagttgatatcgatgtggagcacggagggaaaagaagccgcctgacccccgtctctccagagagttccagcacagaggagaagagcagctcacagccaagcagctgctgctctgatcccagcaagccgggtgggaatgttgagggcgccacgcagtctctggcggagcagatgagaaagatcgccttggagtccgaggggcgccctgaggaacagatggagtcggataactgttcaggaggagatgatgactggacccatctgtcttcaaaagaagtggacccgtctacaggtgaactccagtccctacagatgccagaatccgaagggccaagctctctggacccctcccaggagggacccacagggctgaaggaagctgccttgtacccacatctcccgccagaggctgacccgcggctgattgagtccctctcccagatgctgtccatgggcttctctgatgaaggcggctggctcaccaggctcctgcagaccaagaactatgacatcggagcggctctggacaccatccagtattcaaagcatcccccgccgttgtgaccacttttgcccacctcttctgcgtgcccctcttctgtctcatagttgtgttaagcttgcgtagaattgcaggtctctgtacaggccagtttctctgccttcttccaggatcaggggttagggtgcaagaagccatttagggcagcaaaacaagtgacatgaagggagggtccctgtgtgtgtgtgtgtgctgatgtttcctgggtgccctggctccttgcagcagggctgggcctgcgagacccaaggctcactgcagcgcgctcctgacccctccctgcaggggctacgttagcagcccagcacatagcttgcctaatggctttcactttctcttttgttttaaatgactcataggtccctgacatttagttgattattttctgctacagacctggtacactctgattttagataaagtaagcctaggtgttgtcagcaggcaggctggggaggccagtgttgtgggcttcctgctgggactgagaaggctcacgaagggcatccgcaatgttggtttcactgagagctgcctcctggtctcttcaccactgtagttctctcatttccaaaccatcagctgcttttaaaataagatctctttgtagccatcctgttaaatttgtaaacaatctaattaaatggcatcagcactttaaccaatgacgtttgcatagagagaaatgattgacagtaagtttattgttaatggttcttacagagtatctttaaaagtgccttaggggaaccctgtccctcctaacaagtgtatctcgattaataacctgccagtcccagatcacacatcatcatcgaagtcttccccagttataaagaggtcacatagtcgtgtgggtcgaggattctgtgcctccaggaccaggggcccaccctctgcccagggagtccttgcgtcccatgaggtcttcccgcaaggcctctcagacccagatgtgacggggtgtgtggcccgaggaagctggacagcggcagtgggcctgctgaggccttctcttgaggcctgtgctctgggggtcccttgcttagcctgtgctggaccagctggcctggggtccctctgaagagaccttggctgctcactgtccacatgtgaactttttctaggtggcaggacaaatcgcgcccatttagaggatgtggctgtaacctgctggatgggactccatagctccttcccaggacccctcagctccccggcactgcagtctgcagagttctcctggaggcaggggctgctgccttgtttcaccttccatgtcaggccagcctgtccctgaaagagaagatggccatgccctccatttgtaagaacaatgccagggcccaggaggaccgcctgccctgcctgggccttggctgggcctctggttctgacactttctgctggaagctgtcaggctgggacaggctttgattttgagggttagcaagacaaagcaaataaatgccttccacctcaccgcaaaaaaaaaaaaaaaaaaaaaaa

SEQ ID NO: 336 - protein, 440 aa, Homo sapien
MASLTVKAYLLGKEDAAREIRRFSFCCSPEPEAEAEAAAGPGPCERLLSRVAALFPALRPGGFQAHYRDEDGDLVAFSSDEELTMAMSYVKDDIFRIYIKEKKECRRDHRPPCAQEAPRNMVHPNVICDGCNGPVVGTRYKCSVCPDYDLCSVCEGKGLHRGHTKLAFPSPFGHLSEGFSHSRWLRKVKHGHFGWPGWEMGPPGNWSPRPPRAGEARPGPTAESASGPSEDPSVNFLKNVGESVAAALSPLGIEVDIDVEHGGKRSRLTPVSPESSSTEEKSSSQPSSCCSDPSKPGGNVEGATQSLAEQMRKIALESEGRPEEQMESDNCSGGDDDWTHLSSKEVDPSTGELQSLQMPESEGPSSLDPSQEGPTGLKEAALYPHLPPEADPRLIESLSQMLSMGFSDEGGWLTRLLQTKNYDIGAALDTIQYSKHPPPL

SEQ ID NO: 337 - DNA, 1797 bp, Homo sapien
ccagcagggagctgggagctgggggaaacgacgccaggaaagctatcgcgccagagagggcgacgggggctcgggaagcctgacagggcttttgcgcacagctgccggctggctgctacccgcccgcgccagcccccgagaacgcgcgaccaggcacccagtccggtcaccgcagcggagagctcgccgctcgctgcagcgaggcccggagcggccccgcagggaccctccccagaccgcctgggccgcccggatgtgcactaaaatggaacagcccttctaccacgacgactcatacacagctacgggatacggccgggcccctggtggcctctctctacacgactacaaactcctgaaaccgagcctggcggtcaacctggccgacccctaccggagtctcaaagcgcctggggctcgcggacccggcccagagggcggcggtggcggcagctacttttctggtcagggctcggacaccggcgcgtctctcaagctcgcctcttcggagctggaacgcctgattgtccccaacagcaacggcgtgatcacgacgacgcctacacccccgggacagtacttttacccccgcgggggtggcagcggtggaggtgcagggggcgcagggggcggcgtcaccgaggagcaggagggcttcgccgacggctttgtcaaagccctggacgatctgcacaagatgaaccacgtgacaccccccaacgtgtccctgggcgctaccggggggcccccggctgggcccgggggcgtctacgccggcccggagccacctcccgtttacaccaacctcagcagctactccccagcctctgcgtcctcgggaggcgccggggctgccgtcgggaccgggagctcgtacccgacgaccaccatcagctacctcccacacgcgccgcccttcgccggtggccacccggcgcagctgggcttgggccgcggcgcctccaccttcaaggaggaaccgcagaccgtgccggaggcgcgcagccgggacgccacgccgccggtgtcccccatcaacatggaagaccaagagcgcatcaaagtggagcgcaagcggctgcggaaccggctggcggccaccaagtgccggaagcggaagctggagcgcatcgcgcgcctggaggacaaggtgaagacgctcaaggccgagaacgcggggctgtcgagtaccgccggcctcctccgggagcaggtggcccagctcaaacagaaggtcatgacccacgtcagcaacggctgtcagctgctgcttggggtcaagggacacgccttctgaacgtcccctgcccctttacggacaccccctcgcttggacggctgggcacacgcctcccactggggtccagggagcaggcggtgggcacccaccctgggacctaggggcgccgcaaaccacactggactccggcccccctaccctgcgcccagtccttccacctcgacgtttacaagcccccccttccacttttttttgtatgttttttttctgctggaaacagactcgattcatattgaatataatatatttgtgtatttaacagggaggggaagagggggcgatcgcggcggagctggccccgccgcctggtactcaagcccgcggggacattgggaaggggacccccgccccctgccctcccctctctgcaccgtactgtggaaaagaaacacgcacttagtctctaaagagtttattttaagacgtgtttgtgtttgtgtgtgtttgttctttttattgaatctatttaagtaaaaaaaaaattggttctttattaa

SEQ ID NO: 338 - protein, 347 aa, Homo sapien
MCTKMEQPFYHDDSYTATGYGRAPGGLSLHDYKLLKPSLAVNLADPYRSLKAPGARGPGPEGGGGGSYFSGQGSDTGASLKLASSELERLIVPNSNGVITTTPTPPGQYFYPRGGGSGGGAGGAGGGVTEEQEGFADGFVKALDDLHKMNHVTPPNVSLGATGGPPAGPGGVYAGPEPPPVYTNLSSYSPASASSGGAGAAVGTGSSYPTTTISYLPHAPPFAGGHPAQLGLGRGASTFKEEPQTVPEARSRDATPPVSPINMEDQERIKVERKRLRNRLAATKCRKRKLERIARLEDKVKTLKAENAGLSSTAGLLREQVAQLKQKVMTHVSNGCQLLLGVKGHAF

SEQ ID NO: 339 - DNA, 2795 bp, Homo sapien
atcagcgagggattcacggcgaaatgagactgttcgtgagtgatggcgtcccgggttgcttgccggtgctggccgccgccgggagagcccggggcagagcagaggtgctcatcagcactgtaggcccggaagattgtgtggtcccgttcctgacccggcctaaggtccctgtcttgcagctggatagcggcaactacctcttctccactagtgcaatctgccgatatttttttttgttatctggctgggagcaagatgacctcactaaccagtggctggaatgggaagcgacagagctgcagccagctttgtctgctgccctgtactatttagtggtccaaggcaagaagggggaagatgttcttggttcagtgcggagagccctgactcacattgaccacagcttgagtcgtcagaactgtcctttcctggctggggagacagaatctctagccgacattgttttgtggggagccctatacccattactgcaagatcccgcctacctccctgaggagctgagtgccctgcacagctggttccagacactgagtacccaggaaccatgtcagcgagctgcagagactgtactgaaacagcaaggtgtcctggctctccggccttacctccaaaagcagccccagcccagccccgctgagggaagggctgtcaccaatgagcctgaggaggaggagctggctaccctatctgaggaggagattgctatggctgttactgcttgggagaagggcctagaaagtttgcccccgctgcggccccagcagaatccagtgttgcctgtggctggagaaaggaatgtgctcatcaccagtgccctcccttacgtcaacaatgtcccccaccttgggaacatcattggttgtgtgctcagtgccgatgtctttgccaggtactctcgcctccgccagtggaacaccctctatctgtgtgggacagatgagtatggtacagcaacagagaccaaggctctggaggagggactaaccccccaggagatctgcgacaagtaccacatcatccatgctgacatctaccgctggtttaacatttcgtttgatatttttggtcgcaccaccactccacagcagaccaaaatcacccaggacattttccagcagttgctgaaacgaggttttgtgctgcaagatactgtggagcaactgcgatgtgagcactgtgctcgcttcctggctgaccgcttcgtggagggcgtgtgtcccttctgtggctatgaggaggctcggggtgaccagtgtgacaagtgtggcaagctcatcaatgctgtcgagcttaagaagcctcagtgtaaagtctgccgatcatgccctgtggtgcagtcgagccagcacctgtttctggacctgcctaagctggagaagcgactggaggagtggttggggaggacattgcctggcagtgactggacacccaatgcccagtttatcacccgttcttggcttcgggatggcctcaagccacgctgcataacccgagacctcaaatggggaacccctgtacccttagaaggttttgaagacaaggtattctatgtctggtttgatgccactattggctatctgtccatcacagccaactacacagaccagtgggagagatggtggaagaacccagagcaagtggacctgtatcagttcatggccaaagacaatgttcctttccatagcttagtctttccttgctcagccctaggagctgaggataactataccttggtcagccacctcattgctacagagtacctgaactatgaggatgggaaattctctaagagccgcggtgtgggagtgtttggggacatggcccaggacacggggatccctgctgacatctggcgcttctatctgctgtacattcggcctgagggccaggacagtgctttctcctggacggacctgctgctgaagaataattctgagctgcttaacaacctgggcaacttcatcaacagagctgggatgtttgtgtctaagttctttgggggctatgtgcctgagatggtgctcacccctgatgatcagcgcctgctggcccatgtcaccctggagctccagcactatcaccagctacttgagaaggttcggatccgggatgccttgcgcagtatcctcaccatatctcgacatggcaaccaatatattcaggtgaatgagccctggaagcggattaaaggcagtgaggctgacaggcaacgggcaggaacagtgactggcttggcagtgaatatagctgccttgctctctgtcatgcttcagccttacatgcccacggttagtgccacaatccaggcccagctgcagctcccacctccagcctgcagtatcctgctgacaaacttcctgtgtaccttaccagcaggacaccagattggcacagtcagtcccttgttccaaaaattggaaaatgaccagattgaaagtttaaggcagcgctttggagggggccaggcaaaaacgtccccgaagccagcagttgtagagactgttacaacagccaagccacagcagatacaagcgctgatggatgaagtgacaaaacaaggaaacattgtccgagaactgaaagcacaaaaggcagacaagaacgaggttgctgcggaggtggcgaaactcttggatctaaagaaacagttggctgtagctgaggggaaaccccctgaagcccctaaaggcaagaagaaaaagtaaaagaccttggctcatagaaagtcactttaatagatagggacagtaataaataaatgtacaatctctata

SEQ ID NO: 340 - protein, 900 aa, Homo sapien
MRLFVSDGVPGCLPVLAAAGRARGRAEVLISTVGPEDCVVPFLTRPKVPVLQLDSGNYLFSTSAICRYFFLLSGWEQDDLTNQWLEWEATELQPALSAALYYLVVQGKKGEDVLGSVRRALTHIDHSLSRQNCPFLAGETESLADIVLWGALYPLLQDPAYLPEELSALHSWFQTLSTQEPCQRAAETVLKQQGVLALRPYLQKQPQPSPAEGRAVTNEPEEEELATLSEEEIAMAVTAWEKGLESLPPLRPQQNPVLPVAGERNVLITSALPYVNNVPHLGNIIGCVLSADVFARYSRLRQWNTLYLCGTDEYGTATETKALEEGLTPQEICDKYHIIHADIYRWFNISFDIFGRTTTPQQTKITQDIFQQLLKRGFVLQDTVEQLRCEHCARFLADRFVEGVCPFCGYEEARGDQCDKCGKLINAVELKKPQCKVCRSCPVVQSSQHLFLDLPKLEKRLEEWLGRTLPGSDWTPNAQFITRSWLRDGLKPRCITRDLKWGTPVPLEGFEDKVFYVWFDATIGYLSITANYTDQWERWWKNPEQVDLYQFMAKDNVPFHSLVFPCSALGAEDNYTLVSHLIATEYLNYEDGKFSKSRGVGVFGDMAQDTGIPADIWRFYLLYIRPEGQDSAFSWTDLLLKNNSELLNNLGNFINRAGMFVSKFFGGYVPEMVLTPDDQRLLAHVTLELQHYHQLLEKVRIRDALRSILTISRHGNQYIQVNEPWKRIKGSEADRQRAGTVTGLAVNIAALLSVMLQPYMPTVSATIQAQLQLPPPACSILLTNFLCTLPAGHQIGTVSPLFQKLENDQIESLRQRFGGGQAKTSPKPAVVETVTTAKPQQIQALMDEVTKQGNIVRELKAQKADKNEVAAEVAKLLDLKKQLAVAEGKPPEAPKGKKKK

SEQ ID NO: 341 - DNA, 3117 bp, Homo sapien
attcgaaccccgtcgcgcccctttgtgcgtcacgggtggcgggcgcgggaaggggatttggattgttgcgcctctgctctgaagaaagtgctgtctggctccaactccagttctttcccctgagcagcgcctggaacctaacccttcccactctgtcaccttctcgatcccgccggcgctttagagccgcagtccagtcttggatccttcagagcctcagccactagctgcgatgcatgtgatcaagcgagatggccgccaagaacgagtcatgtttgacaaaattacatctcgaatccagaagctttgttatggactcaatatggattttgttgatcctgctcagatcaccatgaaagtaatccaaggcttgtacagtggggtcaccacagtggaactagatactttggctgctgaaacagctgcaaccttgactactaagcaccctgactatgctatcctggcagccaggatcgctgtctctaacttgcacaaagaaacaaagaaagtgttcagtgatgtgatggaagacctctataactacataaatccacataatggcaaacactctcccatggtggccaagtcaacattggatattgttctggccaataaagatcgcctgaattctgctattatctatgaccgagatttctcttacaattacttcggctttaagacgctagagcggtcttatttgttgaagatcaatggaaaagtggctgaaagaccacaacatatgttgatgagagtatctgttgggatccacaaagaagacattgatgcagcaattgaaacatataatcttctttctgagaggtggtttactcatgcttcgcccactctcttcaatgctggtaccaaccgcccacaactttctagctgttttcttctgagtatgaaagatgacagcattgaaggcatttatgacactctaaagcaatgtgcattgatttctaagtctgctggaggaattggtgttgctgtgagttgtattcgggctactggcagctacattgctgggactaatggcaattccaatggccttgtaccgatgctgagagtatataacaacacagctagatatgtggatcaaggtgggaacaagcgtcctggggcatttgctatttacctggagccttggcatttagacatctttgaattccttgatttaaagaagaacacaggaaaggaagagcagcgtgccagagatcttttctttgctctttggattccggatctcttcatgaaacgagtggagactaatcaggactggtctttgatgtgtccaaatgagtgtcctggtctggatgaggtttggggagaggaatttgagaaactatatgcaagttatgagaaacaaggtcgtgtccgcaaagttgtaaaagctcagcagctttggtatgccatcattgagtctcagacggaaacaggcaccccgtatatgctctacaaagattcctgtaatcgaaagagcaaccagcagaacctgggaaccatcaaatgcagcaacctgtgcacagaaatagtggagtacaccagcaaagatgaggttgctgtttgtaatttggcttccctggccctgaatatgtatgtcacatcagaacacacatacgactttaagaagttggctgaagtcactaaagtcgttgtccgaaacttgaataaaattattgatataaactactatcctgtaccagaggcatgcctatcaaataaacgccatcgccccattggaattggggtacaaggtctggcagatgcttttatcctgatgagatacccttttgagagtgcagaagcccagttactgaataagcagatctttgaaactatttattatggtgctctggaagccagctgtgaccttgccaaggagcagggcccatacgaaacctatgagggctctccagttagcaaaggaattcttcagtatgatatgtggaatgttactcctacagacctatgggactggaaggttctcaaggagaagattgcaaagtatggtataagaaacagtttacttattgccccgatgcctacagcttccactgctcagatcctggggaataatgagtccattgaaccttacaccagcaacatctatactcgcagagtcttgtcaggagaatttcagattgtaaatcctcacttattgaaagatcttaccgagcggggcctatggcatgaagagatgaaaaaccagattattgcatgcaatggctctattcagagcataccagaaattcctgatgacctgaagcaactttataaaactgtgtgggaaatctctcagaaaactgttctcaagatggcagctgagagaggtgctttcattgatcaaagccaatctttgaacatccacattgctgagcctaactatggcaaactcactagtatgcacttctacggctggaagcagggtttgaagactgggatgtattatttaaggacaagaccagcagctaatccaatccagttcactctaaataaggagaagctaaaagataaagaaaaggtatcaaaagaggaagaagagaaggagaggaacacagcagccatggtgtgctctttggagaatagagatgaatgtctgatgtgtggatcctgaggaaagacttggaagagaccagcatgtcttcagtagccaaactacttcttgagcatagataggtatagtgggtttgcttgaggtggtaaggctttgctggaccctgttgcaggcaaaaggagtaattgatttaaagtactgttaatgatgttaatgatttttttttaaactcatatattgggattttcaccaaaataatgcttttgaaaaaaagaaaaaaaaaacggatatattgagaatcaaagtagaagttttaggaatgcaaaataagtcatcttgcatacagggagtggttaagtaaggtttcatcacccatttagcatgcttttctgaagacttcagttttgttaaggagatttagttttactgctttgactggtgggtctctagaagcaaaactgagtgataactcatgagaagtactgataggacctttatctggatatggtcctataggttattctgaaataaagataaacatttctaagtgaaaaaaaaaaaaaaaa

SEQ ID NO: 342 - protein, 792 aa, Homo sapien
MHVIKRDGRQERVMFDKITSRIQKLCYGLNMDFVDPAQITMKVIQGLYSGVTTVELDTLAAETAATLTTKHPDYAILAARIAVSNLHKETKKVFSDVMEDLYNYINPHNGKHSPMVAKSTLDIVLANKDRLNSAIIYDRDFSYNYFGFKTLERSYLLKINGKVAERPQHMLMRVSVGIHKEDIDAAIETYNLLSERWFTHASPTLFNAGTNRPQLSSCFLLSMKDDSIEGIYDTLKQCALISKSAGGIGVAVSCIRATGSYIAGTNGNSNGLVPMLRVYNNTARYVDQGGNKRPGAFAIYLEPWHLDIFEFLDLKKNTGKEEQRARDLFFALWIPDLFMKRVETNQDWSLMCPNECPGLDEVWGEEFEKLYASYEKQGRVRKVVKAQQLWYAIIESQTETGTPYMLYKDSCNRKSNQQNLGTIKCSNLCTEIVEYTSKDEVAVCNLASLALNMYVTSEHTYDFKKLAEVTKVVVRNLNKIIDINYYPVPEACLSNKRHRPIGIGVQGLADAFILMRYPFESAEAQLLNKQIFETIYYGALEASCDLAKEQGPYETYEGSPVSKGILQYDMWNVTPTDLWDWKVLKEKIAKYGIRNSLLIAPMPTASTAQILGNNESIEPYTSNIYTRRVLSGEFQIVNPHLLKDLTERGLWHEEMKNQIIACNGSIQSIPEIPDDLKQLYKTVWEISQKTVLKMAAERGAFIDQSQSLNIHIAEPNYGKLTSMHFYGWKQGLKTGMYYLRTRPAANPIQFTLNKEKLKDKEKVSKEEEEKERNTAAMVCSLENRDECLMCGS

SEQ ID NO: 343 - DNA, 3117 bp, Homo sapien; identical to SEQ ID NO: 341

SEQ ID NO: 344 - protein, 792 aa, Homo sapien; identical to SEQ ID NO: 342

SEQ ID NO: 345 - DNA, 2465 bp, Homo sapien
gagcagcgcggcctgacgggaccaaggcggcgggagtctgcggtcgttccctcggctgtggaccgggcggcacgcacgcggtgcagggtaacatggcggatgcggaagtaattattttgccaaagaaacataagaagaaaaaggagcggaagtcattgccagaagaagatgtagccgaaatacaacacgctgaagaatttcttatcaaacctgaatccaaagttgctaagttggacacgtctcagtggccccttttgctaaagaattttgataagctgaatgtaaggacaacacactatacacctcttgcatgtggttcaaatcctctgaagagagagattggggactatatcaggacaggtttcattaatcttgacaagccctctaacccctcttcccatgaggtggtagcctggattcgacggatacttcgggtggagaagacagggcacagtggtactctggatcccaaggtgactggttgtttaatcgtgtgcatagaacgagccactcgcttggtgaagtcacaacagagtgcaggcaaagagtatgtggggattgtccggctgcacaatgctattgaaggggggacccagctttctagggccctagaaactctgacaggtgccttattccagcgacccccacttattgctgcagtaaagaggcagctccgagtgaggaccatctacgagagcaaaatgattgaatacgatcctgaaagaagattaggaatcttttgggtgagttgtgaggctggcacctacattcggacattatgtgtgcaccttggtttgttattgggagttggtggtcagatgcaggagcttcggagggttcgttctggagtcatgagtgaaaaggaccacatggtgacaatgcatgatgtgcttgatgctcagtggctgtatgataaccacaaggatgagagttacctgcggcgagttgtttaccctttggaaaagctgttgacatctcataaacggctggttatgaaagacagtgcagtaaatgccatctgctatggggccaagattatgcttccaggtgttcttcgatatgaggacggcattgaggtcaatcaggagattgtggttatcaccaccaaaggagaagcaatctgcatggctattgcattaatgaccacagcggtcatctctacctgcgaccatggtatagtagccaagatcaagagagtgatcatggagagagacacttaccctcggaagtggggtttaggtccaaaggcaagtcagaagaagctgatgatcaagcagggccttctggacaagcatgggaagcccacagacagcacacctgccacctggaagcaggagtatgttgactacagtgagtctgccaaaaaagaggtggttgctgaagtggtaaaagccccgcaggtagttgccgaagcagcaaaaactgcgaagcggaagcgagagagtgagagtgaaagtgacgagactcctccagcagctcctcagttgatcaagaaggaaaagaagaagagtaagaaggacaagaaggccaaagctggtctggagagcggggccgagcctggagatggggacagtgataccaccaagaagaagaagaagaagaagaaagcaaaagaggtagaattggtttctgagtagtgaaggccacttgaagctggaggagaaactaaagccttattgagaaaacatgttatagatccttttgttgctgagagagtggaacataggtcctagacagggtgaagagttctggcacattttagctgctactttgagacctcggtgatgttacctggtgtggtcatcccatcttgtcctgttttaaggatatgggtggtgaaagatgaaagaggcagagtttatcccaatgacttctctgtttgagttgggaagcctcaccttcagacccagtaactgtccgcagctgtctgctagtggttgtcttaacatcgtagtcctagtttgcattttttaaatcccctctgtttaaaaggtttgtaaaacaaaaacaaaaaactaagtctgctcagtgaaatgctgtagaaccctaaataagtggtagaagagtgtcactgaattttgtctctgaattcagtataactgagttttgtccatgctggtgtctgggttataggcctgatgggcctggtagttttccatcttgttctggcctagaggtcagtcctttgcacttcctcaaagcttgtgtacagtgctcacctaaatccatctgactacttgttcctgtgccctcttgttttaggcctcgtttacttttaaaaaatgaaattgttcattgctgggagaagaatgttgtaatttttacttattaaagtcaacttgttaagttttttatgtattcctgttgggttttcttgttgatctcatgctagcagagcaaaaattgtaaaatattttgattaaaaatctagggacctttatgtcctatttggaattcgatatcaa

SEQ ID NO: 346 - protein, 514 aa, Homo sapien
MADAEVIILPKKHKKKKERKSLPEEDVAEIQHAEEFLIKPESKVAKLDTSQWPLLLKNFDKLNVRTTHYTPLACGSNPLKREIGDYIRTGFINLDKPSNPSSHEVVAWIRRILRVEKTGHSGTLDPKVTGCLIVCIERATRLVKSQQSAGKEYVGIVRLHNAIEGGTQLSRALETLTGALFQRPPLIAAVKRQLRVRTIYESKMIEYDPERRLGIFWVSCEAGTYIRTLCVHLGLLLGVGGQMQELRRVRSGVMSEKDHMVTMHDVLDAQWLYDNHKDESYLRRVVYPLEKLLTSHKRLVMKDSAVNAICYGAKIMLPGVLRYEDGIEVNQEIVVITTKGEAICMAIALMTTAVISTCDHGIVAKIKRVIMERDTYPRKWGLGPKASQKKLMIKQGLLDKHGKPTDSTPATWKQEYVDYSESAKKEVVAEVVKAPQVVAEAAKTAKRKRESESESDETPPAAPQLIKKEKKKSKKDKKAKAGLESGAEPGDGDSDTTKKKKKKKKAKEVELVSE

SEQ ID NO: 347 - DNA, 2465 bp, Homo sapien; identical to SEQ ID NO: 345

SEQ ID NO: 348 - protein, 514 aa, Homo sapien; identical to SEQ ID NO: 346

SEQ ID NO: 349 - DNA, 1904 bp, Homo sapien
agctatttcaaggcgcgcgcctcgtggtggactcaccgctagcccgcagcgctcggcttcctggtaattcttcacctcttttctcagctccctgcagcatgggtgctgggccctccttgctgctcgccgccctcctgctgcttctctccggcgacggcgccgtgcgctgcgacacacctgccaactgcacctatcttgacctgctgggcacctgggtcttccaggtgggctccagcggttcccagcgcgatgtcaactgctcggttatgggaccacaagaaaaaaaagtagtggtgtaccttcagaagctggatacagcatatgatgaccttggcaattctggccatttcaccatcatttacaaccaaggctttgagattgtgttgaatgactacaagtggtttgccttttttaagtataaagaagagggcagcaaggtgaccacttactgcaacgagacaatgactgggtgggtgcatgatgtgttgggccggaactgggcttgtttcaccggaaagaaggtgggaactgcctctgagaatgtgtatgtcaacacagcacaccttaagaattctcaggaaaagtattctaataggctctacaagtatgatcacaactttgtgaaagctatcaatgccattcagaagtcttggactgcaactacatacatggaatatgagactcttaccctgggagatatgattaggagaagtggtggccacagtcgaaaaatcccaaggcccaaacctgcaccactgactgctgaaatacagcaaaagattttgcatttgccaacatcttgggactggagaaatgttcatggtatcaattttgtcagtcctgttcgaaaccaagcatcctgtggcagctgctactcatttgcttctatgggtatgctagaagcgagaatccgtatactaaccaacaattctcagaccccaatcctaagccctcaggaggttgtgtcttgtagccagtatgctcaaggctgtgaaggcggcttcccataccttattgcaggaaagtacgcccaagattttgggctggtggaagaagcttgcttcccctacacaggcactgattctccatgcaaaatgaaggaagactgctttcgttattactcctctgagtaccactatgtaggaggtttctatggaggctgcaatgaagccctgatgaagcttgagttggtccatcatgggcccatggcagttgcttttgaagtatatgatgacttcctccactacaaaaaggggatctaccaccacactggtctaagagaccctttcaacccctttgagctgactaatcatgctgttctgcttgtgggctatggcactgactcagcctctgggatggattactggattgttaaaaacagctggggcaccggctggggtgagaatggctacttccggatccgcagaggaactgatgagtgtgcaattgagagcatagcagtggcagccacaccaattcctaaattgtagggtatgccttccagtatttcataatgatctgcatcagttgtaaaggggaattggtatattcacagactgtagactttcagcagcaatctcagaagcttacaaatagatttccatgaagatatttgtcttcagaattaaaactgcccttaattttaatatacctttcaatcggccactggccatttttttctaagtattcaattaagtgggaattttctggaagatggtcagctatgaagtaatagagtttgcttaatcatttgtaattcaaacatgctatattttttaaaatcaatgtgaaaacatagacttatttttaaattgtaccaatcacaagaaaataatggcaataattatcaaaacttttaaaatagatgctcatatttttaaaataaagttttaaaaataactgca

SEQ ID NO: 350 - protein, 463 aa, Homo sapien
MGAGPSLLLAALLLLLSGDGAVRCDTPANCTYLDLLGTWVFQVGSSGSQRDVNCSVMGPQEKKVVVYLQKLDTAYDDLGNSGHFTIIYNQGFEIVLNDYKWFAFFKYKEEGSKVTTYCNETMTGWVHDVLGRNWACFTGKKVGTASENVYVNTAHLKNSQEKYSNRLYKYDHNFVKAINAIQKSWTATTYMEYETLTLGDMIRRSGGHSRKIPRPKPAPLTAEIQQKILHLPTSWDWRNVHGINFVSPVRNQASCGSCYSFASMGMLEARIRILTNNSQTPILSPQEVVSCSQYAQGCEGGFPYLIAGKYAQDFGLVEEACFPYTGTDSPCKMKEDCFRYYSSEYHYVGGFYGGCNEALMKLELVHHGPMAVAFEVYDDFLHYKKGIYHHTGLRDPFNPFELTNHAVLLVGYGTDSASGMDYWIVKNSWGTGWGENGYFRIRRGTDECAIESIAVAATPIPKL

SEQ ID NO: 351 - DNA, 1591 bp, Homo sapien
tctgggcgcgcgcgacgtcagtttgagttctgtgttctccccgcccgtgtcccgcccgacccgcgcccgcgatgctggcgctgcgctgcggctcccgctggctcggcctgctctccgtcccgcgctccgtgccgctgcgcctccccgcggcccgcgcctgcagcaagggctccggcgacccgtcctcttcctcctcctccgggaacccgctcgtgtacctggacgtggacgccaacgggaagccgctcggccgcgtggtgctggagctgaaggcagatgtcgtcccaaagacagctgagaacttcagagccctgtgcactggtgagaagggcttcggctacaaaggctccaccttccacagggtgatcccttccttcatgtgccaggcgggcgacttcaccaaccacaatggcacaggcgggaagtccatctacggaagccgctttcctgacgagaactttacactgaagcacgtggggccaggtgtcctgtccatggctaatgctggtcctaacaccaacggctcccagttcttcatctgcaccataaagacagactggttggatggcaagcatgttgtgttcggtcacgtcaaagagggcatggacgtcgtgaagaaaatagaatctttcggctctaagagtgggaggacatccaagaagattgtcatcacagactgtggccagttgagctaatctgtggccagggtgctggcatggtggcagctgcaaatgtccatgcacccaggtggccgcgttgggctgtcagccaaggtgcctgaaacgatacgtgtgcccactccactgtcacagtgtgcctgaggaaggctgctagggatgttagacctcggccaggacccaccacattgcttcctaatacccacccttcctcacgacctcatttctgggcatctttgtggacatgatgtcacccaccccttgtcaagcattgcctgtgattgcccagcccagattcatctgtgccttggacatggtgatggtgatgggttgccatccaagtgaaagtcttttccttgaccaagggggacagtcagttttgcaaaaggactctaatacctgtttaatattgtcttcctaattgggataatttaattaacaagattgactagaagtgaaactgcaacactaacttccccgtgctgtggtgtgacctgagttggtgacacaggccacagaccccagagcttggcttttgaaacacaactcagggcttttgtgaaggttcccccgctgagatctttcctcctggttactgtgaagcctgttggtttgctgctgtcgtttttgaggagggcccatgggggtaggagcagttgaacctgggaacaaacctcacttgagctgtgcctagacaatgtgaattcctgtgttgctaacagaagtggcctgtaagctcctgtgctccggagggaagcatttcctggtaggctttgatttttctgtgtgttaaagaaattcaatctactcatgatgtgttatgcataaaacatttctggaacatggatttgtgttcaccttaaatgtgaaaataaatcctattttctatggaaaaaaaaaaaaaaaaaaaaaaa

SEQ ID NO: 352 - protein, 207 aa, Homo sapien
MLALRCGSRWLGLLSVPRSVPLRLPAARACSKGSGDPSSSSSSGNPLVYLDVDANGKPLGRVVLELKADVVPKTAENFRALCTGEKGFGYKGSTFHRVIPSFMCQAGDFTNHNGTGGKSIYGSRFPDENFTLKHVGPGVLSMANAGPNTNGSQFFICTIKTDWLDGKHVVFGHVKEGMDVVKKIESFGSKSGRTSKKIVITDCGQLS

SEQ ID NO: 353 - DNA, 1591 bp, Homo sapien; identical to SEQ ID NO: 351

SEQ ID NO: 354 - protein, 207 aa, Homo sapien; identical to SEQ ID NO: 352

SEQ ID NO: 355 - DNA, 1375 bp, Homo sapien
aaaagcaagccaggaggtgcttgcggccgcttctagtagtttccaggcgctgccgggcggctggcactaagcggtcctgaggctgtggctacggctgctccggagctggtggcgccgcgataggagagccgatggccaagtggggtgagggagacccacgctggatcgtggaggagcgggcggacgccaccaacgtcaacaactggcactggacggagagagatgcttcaaattggtccacggataagctgaaaacactgttcttggcagtgcaggttcaaaatgaagaaggcaagtgtgaggtgacggaagtgagtaagcttgatggagaggcatccattaacaatcgcaaagggaaacttatcttcttttatgaatggagcgtcaaactaaactggacaggtacttctaagtcaggagtacagtacaaaggacatgtggagatccccaatttgtctgatgaaaacagcgtggatgaagtggagattagtgtgagccttgccaaagatgagcctgacacaaatctcgtggccttaatgaaggaagaaggggtgaaacttctaagagaagcaatgggaatttacatcagcaccctcaaaacagagttcacccagggcatgatcttacctacaatgaatggagagtcagtagacccagtggggcagccagcactgaaaactgaggagcgcaaggctaagcctgctccttcaaaaacccaggccagacctgttggagtcaaaatccccacttgtaagatcactcttaaggaaaccttcctgacgtcaccagaggagctctatagagtgtttaccacccaagagctggtgcaggcctttacccatgctcctgcaacattagaagcagacagaggtggaaagttccacatggtagatggcaacgtctctggggaatttactgatctggtccctgagaaacatattgtgatgaagtggaggtttaaatcttggccagagggacactttgccaccatcaccttgaccttcatcgacaagaacggagagactgagctgtgcatggaaggtcgaggcatccctgctcctgaggaagagcggacacgacagggctggcagcggtactactttgagggcattaaacagacctttggctatggcgcacgcttattttagggccagcggcaggggactccagcctgctggacacttcagtccagctctctcctgactggggcttgcgactcacaggattgcatcgtcccagctgctaacttggggccggggcccctcccttccacatataccttgggtttgtgcatgttttctgctgggtgggttcagagggcaatttctcttttatgtgtacatatgctaaataaacataatttaaaaaacaaaaa

SEQ ID NO: 356 - protein, 338 aa, Homo sapien
MAKWGEGDPRWIVEERADATNVNNWHWTERDASNWSTDKLKTLFLAVQVQNEEGKCEVTEVSKLDGEASINNRKGKLIFFYEWSVKLNWTGTSKSGVQYKGHVEIPNLSDENSVDEVEISVSLAKDEPDTNLVALMKEEGVKLLREAMGIYISTLKTEFTQGMILPTMNGESVDPVGQPALKTEERKAKPAPSKTQARPVGVKIPTCKITLKETFLTSPEELYRVFTTQELVQAFTHAPATLEADRGGKFHMVDGNVSGEFTDLVPEKHIVMKWRFKSWPEGHFATITLTFIDKNGETELCMEGRGIPAPEEERTRQGWQRYYFEGIKQTFGYGARLF

SEQ ID NO: 357 - DNA, 1550 bp, Homo sapien
tgccgccgtcccgcccgccagcgccccagcgaggaagcagcgcgcagcccgcggcccagcgcacccgcagcagcgcccgcagctcgtccgcgccatgttccaggcggccgagcgcccccaggagtgggccatggagggcccccgcgacgggctgaagaaggagcggctactggacgaccgccacgacagcggcctggactccatgaaagacgaggagtacgagcagatggtcaaggagctgcaggagatccgcctcgagccgcaggaggtgccgcgcggctcggagccctggaagcagcagctcaccgaggacggggactcgttcctgcacttggccatcatccatgaagaaaaggcactgaccatggaagtgatccgccaggtgaagggagacctggctttcctcaacttccagaacaacctgcagcagactccactccacttggctgtgatcaccaaccagccagaaattgctgaggcacttctgggagctggctgtgatcctgagctccgagactttcgaggaaatacccccctacaccttgcctgtgagcagggctgcctggccagcgtgggagtcctgactcagtcctgcaccaccccgcacctccactccatcctgaaggctaccaactacaatggccacacgtgtctacacttagcctctatccatggctacctgggcatcgtggagcttttggtgtccttgggtgctgatgtcaatgctcaggagccctgtaatggccggactgcccttcacctcgcagtggacctgcaaaatcctgacctggtgtcactcctgttgaagtgtggggctgatgtcaacagagttacctaccagggctattctccctaccagctcacctggggccgcccaagcacccggatacagcagcagctgggccagctgacactagaaaaccttcagatgctgccagagagtgaggatgaggagagctatgacacagagtcagagttcacggagttcacagaggacgagctgccctatgatgactgtgtgtttggaggccagcgtctgacgttatgagtgcaaaggggctgaaagaacatggacttgtatatttgtacaaaaaaaaagttttatttttctaaaaaaagaaaaaagaagaaaaaatttaaagggtgtacttatatccacactgcacactgcctagcccaaaacgtcttattgtggtaggatcagccctcattttgttgcttttgtgaactttttgtaggggacgagaaagatcattgaaattctgagaaaacttcttttaaacctcacctttgtggggtttttggagaaggttatcaaaaatttcatggaaggaccacattttatatttattgtgcttcgagtgactgaccccagtggtatcctgtgacatgtaacagccaggagtgttaagcgttcagtgatgtggggtgaaaagttactacctgtcaaggtttgtgttaccctcctgtaaatggtgtacataatgtattgttggtaattattttggtacttttatgatgtatatttattaaagagatttttacaaatg

SEQ ID NO: 358 - protein, 317 aa, Homo sapien
MFQAAERPQEWAMEGPRDGLKKERLLDDRHDSGLDSMKDEEYEQMVKELQEIRLEPQEVPRGSEPWKQQLTEDGDSFLHLAIIHEEKALTMEVIRQVKGDLAFLNFQNNLQQTPLHLAVITNQPEIAEALLGAGCDPELRDFRGNTPLHLACEQGCLASVGVLTQSCTTPHLHSILKATNYNGHTCLHLASIHGYLGIVELLVSLGADVNAQEPCNGRTALHLAVDLQNPDLVSLLLKCGADVNRVTYQGYSPYQLTWGRPSTRIQQQLGQLTLENLQMLPESEDEESYDTESEFTEFTEDELPYDDCVFGGQRLTL

SEQ ID NO: 359 - DNA, 2160 bp, Homo sapien
agccccctgcccctcgccgccccccgccgcctgcctgggccgggccgaggatgcggcgcagcgcctcggcggccaggcttgctcccctccggcacgcctgctaacttcccccgctacgtccccgttcgcccgccgggccgccccgtctccccgcggcctccgggtccgggtcctccaggacggccaggccgtgccgccgtgtgccctccgccgctcgcccgcgcgccgcgcgctccccgcctgcgcccagcgccccgcgcccgcgccccagtcctcgggcggtccatgctgcccctctgcctcgtggccgccctgctgctggccgccgggcccgggccgagcctgggcgacgaagccatccactgcccgccctgctccgaggagaagctggcgcgctgccgcccccccgtgggctgcgaggagctggtgcgagaggcgggctgcggctgttgcgccacttgcgccctgggcttggggatgccctgcggggtgtacaccccccgttgcggctcgggcctgcgctgctacccgccccgaggggtggagaagcccctgcacacactgatgcacgggcaaggcgtgtgcatggagctggcggagatcgaggccatccaggaaagcctgcagccctctgacaaggacgagggtgaccaccccaacaacagcttcagcccctgtagcgcccatgaccgcaggtgcctgcagaagcacttcgccaaaattcgagaccggagcaccagtgggggcaagatgaaggtcaatggggcgccccgggaggatgcccggcctgtgccccagggctcctgccagagcgagctgcaccgggcgctggagcggctggccgcttcacagagccgcacccacgaggacctctacttcatccccatccccaactgcgaccgcaacggcaacttccaccccaagcagtgtcacccagctctggatgggcagcgtggcaagtgctggtgtgtggaccggaagacgggggtgaagcttccggggggcctggagccaaagggggagctggactgccaccagctggctgacagctttcgagagtgaggcctgccagcaggccagggactcagcgtcccctgctactcctgtgctctggaggctgcagagctgacccagagtggagtctgagtctgagtcctgtctctgcctgcggcccagaagtttccctcaaatgcgcgtgtgcacgtgtgcgtgtgcgtgcgtgtgtgtgtgtttgtgagcatgggtgtgcccttggggtaagccagagcctggggtgttctctttggtgttacacagcccaagaggactgagactggcacttagcccaagaggtctgagccctggtgtgtttccagatcgatcctggattcactcactcactcattccttcactcatccagccacctaaaaacatttactgaccatgtactacgtgccagctctagttttcagccttgggaggttttattctgacttcctctgattttggcatgtggagacactcctataaggagagttcaagcctgtgggagtagaaaaatctcattcccagagtcagaggagaagagacatgtaccttgaccatcgtccttcctctcaagctagcccagagggtgggagcctaaggaagcgtggggtagcagatggagtaatggtcacgaggtccagacccactcccaaagctcagacttgccaggctccctttctcttcttccccaggtccttcctttaggtctggttgttgcaccatctgcttggttggctggcagctgagagccctgctgtgggagagcgaagggggtcaaaggaagacttgaagcacagagggctagggaggtggggtacatttctctgagcagtcagggtgggaagaaagaatgcaagagtggactgaatgtgcctaatggagaagacccacgtgctaggggatgaggggcttcctgggtcctgttcccctaccccatttgtggtcacagccatgaagtcaccgggatgaacctatccttccagtggctcgctccctgtagctctgcctccctctccatatctccttcccctacacctccctccccacacctccctactcccctgggcatcttctggcttgactggatggaaggagacttaggaacctaccagttggccatgatgtcttttctt

SEQ ID NO: 360 - protein, 258 aa, Homo sapien
MLPLCLVAALLLAAGPGPSLGDEAIHCPPCSEEKLARCRPPVGCEELVREAGCGCCATCALGLGMPCGVYTPRCGSGLRCYPPRGVEKPLHTLMHGQGVCMELAEIEAIQESLQPSDKDEGDHPNNSFSPCSAHDRRCLQKHFAKIRDRSTSGGKMKVNGAPREDARPVPQGSCQSELHRALERLAASQSRTHEDLYFIPIPNCDRNGNFHPKQCHPALDGQRGKCWCVDRKTGVKLPGGLEPKGELDCHQLADSFRE

SEQ ID NO: 361 - DNA, 1238 bp, Homo sapien
cggcggagctggtcccgttgtgctgcggcgccgcgcggcctgcagtcccgggcccgcgccccgcgccgcccgcccgcccgccatggagcccggccccgacggccccgccgcctccggccccgccgccatccgcgagggctggttccgcgagacctgcagcctgtggcccggccaggccctgtcgctgcaggtggagcagctgctccaccaccggcgctcgcgctaccaggacatcctcgtcttccgcagtaagacctatggcaacgtgctggtgttggacggtgtcatccagtgcacggagagagacgagttctcctaccaggagatgatcgccaacctgcctctctgcagccaccccaacccgcgaaaggtgctgatcatcgggggcggagatggaggtgtcctgcgggaggtggtgaagcacccctccgtggagtccgtggtccagtgtgagatcgacgaggatgtcatccaagtctccaagaagttcctgccaggcatggccattggctactctagctcgaaggtgaccctacatgtgggtgacggttttgagttcatgaaacagaatcaggatgccttcgacgtgatcatcactgactcctcagaccccatgggccccgccgaaagtctcttcaaggagtcctattaccagctcatgaagacagccctcaaggaagatggtgtcctctgctgccagggcgagtgcgagtggctgcacctggacctcatcaaggagatgcggcagttctgccagtccctgttccccgtggtggcctatgcctactgcaccatccccacctaccccagcggccagatcggcttcatgctgtgcagcaagaacccgagcacgaacttccaggagccggtgcagccgctgacacagcagcaggtggcgcagatgcagctgaagtactacaactccgacgtgcaccgcgccgcctttgtgctgcccgagtttgcccgcaaggccctgaatgatgtgagctgagcccaggcgccaccactgatgccacccaggacctcggaccttggagcctgcggggtgcctcggcccctccagccccgggccggacctcctgctggctctcgcccaccaaccaagtgttacaagccccagaatgctgcccggcctgccctgctgggcggactgtctgtgtgtctgtctctctggcgttccacctccaagcctataccagctgtgtacagcgccatctctctgccttctgttgcccccg

SEQ ID NO: 362 - protein, 302 aa, Homo sapien
MEPGPDGPAASGPAAIREGWFRETCSLWPGQALSLQVEQLLHHRRSRYQDILVFRSKTYGNVLVLDGVIQCTERDEFSYQEMIANLPLCSHPNPRKVLIIGGGDGGVLREVVKHPSVESVVQCEIDEDVIQVSKKFLPGMAIGYSSSKVTLHVGDGFEFMKQNQDAFDVIITDSSDPMGPAESLFKESYYQLMKTALKEDGVLCCQGECEWLHLDLIKEMRQFCQSLFPVVAYAYCTIPTYPSGQIGFMLCSKNPSTNFQEPVQPLTQQQVAQMQLKYYNSDVHRAAFVLPEFARKALNDVS

SEQ ID NO: 363 - DNA, 1643 bp, Homo sapien
caccaagggctggccgcagccactgtagctgagctcagagccttctgtgtggtttgcgggggcaaggtcagctgccccctgccctctctctggggctatttgaggaatgcggcctttttgcataagaaaggcttttctctacagtaactgtggtcgctgatcaatgacaccttcctggtaacatttcatattgcttttttggagatactttgacgaaggtaattgggactcccatcaagtctccacacagctagcagccacgtggggcacttctccagcatatgtaagtggaactcagaaggcaacattccctgaacatactcttccaccagaatctcctctacagatttttgctgccccttttaccagtggctgaatctactttctcttatggatcgcttacacctgagacgaactacagaacagcacgtaccagaggtggaagtccaagtcaaacgcagaaggactgcctcactgagcaaccaagagtgtcagttgtacccgaggcgttctcagcagcagcaagtacctgtggtggatttccaggctgaactgaggcaggcattcttagctgagacaccaagaggtggttaaagccatattggagtagcgaggaatctgattccaagcaaaaaccaggctccatctactctttgaagcttctgcccagcttgcattgtttctaggagaacctgcgtcatacctttatctatagccttcccctaggtcttcagaagcatcaagttttaactgtggacattggatttggtggaacagcaatcatgactgttggcaagagtagcaagatgctgcagcacattgactatagaatgagatgtatcctgcaagatggccgaatcttcattggcacctttaaggcttttgacaagcatatgaatttgatcctctgtgattgtgatgagttcagaaagatcaagccaaagaatgcgaagcaaccagagcgtgaagaaaagcgggttttgggtctggtgttgctgcgtggggagaacttggtatccatgactgtggaggggccaccccccaaagatactggcattgctcgggtaccacttgctggagctgctggaggccctggggttggtagggcagctggtagaggagtaccagctggtgtgccaattccccaggcccctgctggattggcaggccctgtccgaggagttgggggaccatcccagcaggtaatgactccacagggaagaggcactgtagcagctgctgctgttgctgcgactgccagtattgctggagccccaacacagtacccaccaggacggggcactccgcccccacccgtcggcagagcaaccccacctccaggcattatggctcctccacctggtatgagaccacccatgggcccaccaattgggcttccccctgctcgagggacgccaataggcatgccgcctccgggaatgagaccccctccaccaggcattagaggtccacctcccccaggaatgcgtccaccaagaccttagcatactgttgatccatctcagtcactttttcccctgcaatgcgtcttgtgaaattgtgtagagtgtttgtgagctttttgttccctcattctgcattaataatagctaataataaatgcatagagcaattaaactgtg

SEQ ID NO: 364 - protein, 240 aa, Homo sapien [sequence omitted]

SEQ ID NO: 365 - DNA, 1746 bp, Homo sapien
gagcctgacttcagcgctcccactctcggccgacacccctcatggccaaccgttacaccatggatctgactgccatctacgagagcctcctgtcgctgagccctgacgtgcccgtgccatccgaccatggagggactgagtccagcccaggctggggctcctcgggaccctggagcctgagcccctccgactccagcccgtctggggtcacctcccgcctgcctggccgctccaccagcctagtggagggccgcagctgtggctgggtgcccccaccccctggcttcgcaccgctggctccccgcctgggccctgagctgtcaccctcacccacttcgcccactgcaacctccaccaccccctcgcgctacaagactgagctatgtcggaccttctcagagagtgggcgctgccgctacggggccaagtgccagtttgcccatggcctgggcgagctgcgccaggccaatcgccaccccaaatacaagacggaactctgtcacaagttctacctccagggccgctgcccctacggctctcgctgccacttcatccacaaccctagcgaagacctggcggccccgggccaccctcctgtgcttcgccagagcatcagcttctccggcctgccctctggccgccggacctcaccaccaccaccaggcctggccggcccttccctgtcctccagctccttctcgccctccagctccccaccaccacctggggaccttccactgtcaccctctgccttctctgctgcccctggcacccccctggctcgaagagaccccaccccagtctgttgcccctcctgccgaagggccactcctatcagcgtctgggggcccttgggtggcctggttcggaccccctctgtacagtccctgggatccgaccctgatgaatatgccagcagcggcagcagcctggggggctctgactctcccgtcttcgaggcgggagtttttgcaccaccccagcccgtggcagccccccggcgactccccatcttcaatcgcatctctgtttctgagtgacaaagtgactgcccggtcagatcagctggatctcagcggggagccacgtctcttgcactgtggtctctgcatggaccccagggctgtggggacttgggggacagtaatcaagtaatccccttttccagaatgcattaacccactcccctgacctcacgctggggcaggtccccaagtgtgcaagctcagtattcatgatggtgggggatggagtgtcttccgaggttcttgggggaaaaaaaattgtagcatatttaagggaggcaatgaaccctctcccccacctcttccctgcccaaatctgtctcctagaatcttatgtgctgtgaataataggccttcactgcccctccagtttttatagacctgaggttccagtgtctcctggtaactggaacctctcctgagggggaatcctggtgctcaaattaccctccaaaagcaagtagccaaagccgttgccaaaccccacccataaatcaatgggccctttatttatgacgactttatttattctaatatgattttatagtatttatatatattgggtcgtctgcttcccttgtatttttcttcctttttttgtaatattgaaaacgacgatataattattataagtagactataatatatttagtaatatatattattaccttaaaagtctatttttgtgttttgggcatttttaaataaacaatctgagtgt

SEQ ID NO: 366 - protein, 326 aa, Homo sapien
MDLTAIYESLLSLSPDVPVPSDHGGTESSPGWGSSGPWSLSPSDSSPSGVTSRLPGRSTSLVEGRSCGWVPPPPGFAPLAPRLGPELSPSPTSPTATSTTPSRYKTELCRTFSESGRCRYGAKCQFAHGLGELRQANRHPKYKTELCHKFYLQGRCPYGSRCHFIHNPSEDLAAPGHPPVLRQSISFSGLPSGRRTSPPPPGLAGPSLSSSSFSPSSSPPPPGDLPLSPSAFSAAPGTPLARRDPTPVCCPSCRRATPISVWGPLGGLVRTPSVQSLGSDPDEYASSGSSLGGSDSPVFEAGVFAPPQPVAAPRRLPIFNRISVSE

SEQ ID NO: 367 - DNA, 3323 bp, Homo sapien
gatcacgaaccagtcaaaatcgtggtttatttctgtaacgtgaagacttctgctcttttttctttgtttgtttttttcgtaaacatctgggtgtatatcaaacggcaagatgtccagtaatgtcccggcggatatgataaatttgcgcctcattttggtaagcggaaaaacaaaagagttcctgttttctcctaacgattctgcttctgacattgcaaagcatgtatatgacaattggccaatggactgggaagaagagcaggtcagcagtccaaatattctacgacttatttatcaaggacgatttctacatggaaatgtcacattaggagcattaaaacttccttttggcaaaacaacagtgatgcatttggtggccagagagacattaccagagccaaactctcaaggtcagaggaatcgtgagaagactggagagagtaattgttgtgtaatcctgtaaacactgtctgcctagtgtgatgtgatatagtctttgtctttcatgctgctgggacagaaaagacccgacattgcttcagaaaccgttcagaacagtctgcctgtaaacacatggaactgaattaccacatgaacactgtcatcttttctcatgaaagtaaaaagaaccaagaacatttttcactctgattttttatttcttgtattttttgttgagctgttttaacacatattggtttttgaatgcagtcaatctccaggggaaaagttaacaagttatctttcgtagcagaaaccattttgctgccacaaaattttcatcatcagaactaataaatcaagtgttccaaatacaatttgcactaaaaagattggcattattttcctcatcagcagaatttataacagtgtgtggtatctagaaatacttatatatacaattccacactggaagacactcagcaattaatgaagttaattactgggccaacttgagaggaaaaaatggaaaagaaactaaaatgttgggtgaattctaccaaagtcagccgtggtggctgcactggcacagaatactaaactgagtgtgactattttcactgcaacaaatgaaaaaacaaaatgtgcctgtttaaagcactcagtagagggctgatgaaactaattttttttcctttaagacatgcactcttgagtcctacagtaactgagtgtttgtttagacagcacaagaaggggtgagagtgcgtctcctagccttaatgtgggagggtagtttcagtcactcatcggctttcattattgtgcagaaatattagaaaacctcattgatcaattttatgtatttgaatatcagcaaattgaaattttccataattatcattaatttgtaaccacatccagtgtcatgcttactccttagagttcagatgaattcttaaaattaaaaaaaaactccatagtactaattttgtttctttatatagtttgcgtttgatattagtgcttgcaattgtattaaagtcaaaagctgatttttatggcatacacaagaatgccactttttcttttatttcataccaataatttaaagattgatatgctaaaaacaatttgcacagcactaaagcatgagctactttcatctaaacctgtaaaaatatgaaagatttttatattttttcactgggaagaaattcttcctggatgaaattacaaatatgtgtagaatatatttaataaaagacttataaaatacctaactacaggacttaaaatatagattggcgcgtagtatatagaacaatattccatataaataagtttagcctttataaaaatgaagttgcaggctgacattacattctgtacttactaagtgtcaacagcccttacaaacattaaatgtaaatggtttcaaatggtcagcgttgtttaaatgtaatcatgttattttattcattgttaatgctttgatgaaaaggctttatatgcagtagatctacgaaaatattgttcatactgatcagaattaaatttgtatagagcagagttttaaaatgaatgtaaatagcactaaacgttttctttctgcaacctgtacttacagattcttcctgtaaactaaataaaaaaaaaatgatagtgcattttggtggtaattttaaaggtcttgattaggtcaataattgtttaagcaccgtctcattcatgttttctactttcatttcttaagcttttaaaattcatttaattaatattctgttgttgttttggggagtattcccaatgtatctttgatatttaacctggttaatttgtggacagtcacaacaatggatagaattatgtagtctccgttatcactaaaatgttatcttcaagagatgttaaatatttatatgctttgttgactagctgaaatgtgaattctgttagtgttgactaaagaatctggtagttgcttaattgggcaattaaacaatttatggctctattttgtaaaacaaactactggtaattatttttaatacctattttcattctgattactctttttttaagttaaagactatcagttaattaagattgagtttttatgatggttaaaaataattctctattggtttttcaatatatttttctgtgtgttctcagattatatatttccctcaatttagagtttgctaagtgaaataaactggttcactagtagagaaagaattacgtcgcttaatacctaatatcatagttgtacaatatgaaaaaaaagaataaaaagtagcagtaaaattatatactgaaaacaccaaaaatttagatgccttaatagtatatacgtgaaatactcagctgtccctttaaaaataattccttggactgcctggtggttaaaatacgattcctcatatccaaggctacttttgaagatccctctgccaaaaatatagctcacttatctaaaggtgagagctgcatagatccagtaatgtacataaagcctgaatgatgagcctatgtccctgcctaacgctggtgtctcactcatctcttttacctaaattgtcctgaactttgttaagtgttctggacaaggccaagcttttctttattaaaacctcagcatgtctccctgatctgaactatttgctttctcttcaagataagttgtattttaccatggaaaaatacagtatctaacattaccattcacgttaaatgaagtttcctcataacatttatctttagttttatgaagtcatcgtgaccaatgttacagtaatttctgttagctgattgtggtaaacaatgtttaatgtgaaaagaaattaaaactttcttcatctgttgtaaaaaaaaaa

SEQ ID NO: 368 - protein, 117 aa, Homo sapien
MSSNVPADMINLRLILVSGKTKEFLFSPNDSASDIAKHVYDNWPMDWEEEQVSSPNILRLIYQGRFLHGNVTLGALKLPFGKTTVMHLVARETLPEPNSQGQRNREKTGESNCCVIL

SEQ ID NO: 369 - DNA, 3323 bp, Homo sapien; identical to SEQ ID NO: 367

SEQ ID NO: 370 - protein, 117 aa, Homo sapien; identical to SEQ ID NO: 368

SEQ ID NO: 371 - DNA, 3003 bp, Homo sapien
ctagttctagatccggcgagtagctggcggtcccgggtgctgctggttagtgtgctctgagggagggtccgagccagccgctgttttgccggaggagcccctcaggccgtagtaagcattaataatgtctttcatctttgagtggatctacaatggcttcagcagtgtgctccagttcctaggactgtacaagaaatctggaaaacttgtattcttaggtttggataatgcaggcaaaaccactcttcttcacatgctcaaagatgacagattgggccaacatgttccaacactacatccgacatcagaagagctaacaattgctggaatgacctttacaacttttgatcttggtgggcacgagcaagcacgtcgcgtttggaaaaattatctcccagcaattaatgggattgtctttctggtggactgtgcagatcattctcgcctcgtggaatccaaagttgagcttaatgctttaatgactgatgaaacaatatccaatgtgccaatccttatcttgggtaacaaaattgacagaacagatgcaatcagtgaagaaaaactccgtgagatatttgggctttatggacagaccacaggaaaggggaatgtgaccctgaaggagctgaatgctcgccccatggaagtgttcatgtgcagtgtgctcaagaggcaaggttacggcgagggtttccgctggctctcccagtatattgactgatgtttggacggtgaaaataaaagagttttacttctctggactgatcctattcacagcttcctcatgaacttttctaatagaacaaggaaagctctccaaccatgtctggcgttgagaagccaagagtctctgtcaactctctcattgcccagtggtgacatgtgctcttctccacactgttgggaggtaatgctgccccacgtgctggtgcaggtcagtatcctgggacttggaagctggcaggatttgccgggtaaagctgtatgccatcatggggcacctgaaaagaaaaacacgtctcaccactgtggttgattcaaaagaaagtgattctattttttaaagaaagcgttgttaatgtaattggtatccctcctaactttttgagttcacaatttacttggtccagagttttctattcttttttttttttaaactaatgaatgacatttagatacttcataaaattatgaacagatatggaggccagagctcatttgggtaaacttactcctgctgagttagcaggttggtgagagaagctcccctgagctcacctgtctctctgactgccttggagtaggtggcataaccttgtgcacagagaactagaaaaggggcagaaccccggccttgcagttgtggcaggtttccactgtggtaagctaggttcattcctcatcaaggaatgtgtagcagattgttcactgtggaggagttaattatagaatgggttattgttgttattcttactcatgaagttacagattttagccagtctttgcttttatacttttgtgaaatttaatttctctctatagcaccttcctttttcgttttcagttatcaaaagtgactttgacctcataaaagagttgagaacatctctcgtgtcacatactgcaggtgcatcagttacttttgcacagattctgggggacatttttctgaataggaagacaggacaaagttaacagcttaagggctcttaattctgtgagttgaggacttaaaagtattgtagcatttgtttggatccatgaaaaatgtattcagtgggctttaaaatttccatttgcagaatttggtctctcaggctgtttgggagctcttttttttacattttttctcctttgacacctattttattggtgtttaaagtaaaggttaacatctgtagcttttccaggtttttttttttttttttttgatatgaaattgtctttctccattgcagaaataagctagggaaacactaacccaaaaactttctgtagagctgttcctttggaggcagcatcacttattggcagtaaagactcagtataaaagcaccagcatccctacttgggtgatggggattaattttatagcattccattttcctagtgccacatgtgaaattggattttgatgatcttaatctatattctacccttataataaaagatcaaaagatatatctcctatgaacagattggagataggagatgaaaagttgggaggatgtctttattctaatgtgagggtagggaaaatgtggataacattactggggtgaaggaggcattgttctttagttggagttctcatttttattctccagtactgacttgtggggaaagcatactttttcactgccaggtactgaatgcagaggctcagtgaagtatatatgtgggaagtgcatgcatttcgtttattagcaaacatagctggattaagacaaagttgttggtttggaaaggggttaaagccttaagtgaacaaatctagctaacagtgaatgaactaggtaatataacttgcatatttttaatttcctttggttaaaggtcccccatacttctctgttcggagacatgagaagtatgattacttcagtgttagttttcttaattttttttttcccctatttgtcccttgtcactttgttgcaagctagaaatctgtgggttatacatagggcagctctttgtgaaagtggtttattccactggagaaaggggattgaaaatcagttagaaccaatgtatttcttgccccacggaacactattcctataagatagctgaaagaagctgctgtgaggagctcagctccaaacacaggatcagcaccttgtataggaattcccatgaattatgacttctcattctgttttatcagagtgcatatatgtcctacttcaggaaaagtaaaacagtcatttacgaaagaaagtcaatctgtatcctaagcattttaataaaaagttaaaacaaaaaaaaaaaaaaaaaaaa

SEQ ID NO: 372 - protein, 198 aa, Homo sapien
MSFIFEWIYNGFSSVLQFLGLYKKSGKLVFLGLDNAGKTTLLHMLKDDRLGQHVPTLHPTSEELTIAGMTFTTFDLGGHEQARRVWKNYLPAINGIVFLVDCADHSRLVESKVELNALMTDETISNVPILILGNKIDRTDAISEEKLREIFGLYGQTTGKGNVTLKELNARPMEVFMCSVLKRQGYGEGFRWLSQYID

SEQ ID NO: 373 - DNA, 1807 bp, Homo sapien
ctctgagtcaccaacctgaggctgccccggccgcctgcgcacccggcagcaccatgacagatcaggcctttgtgacactaaccacaaacgatgcctacgccaaaggtgccctggtcctgggatcatctctgaaacagcacaggaccaccaggaggctggtcgtgctcgccacccctcaggtctcagactccatgagaaaagttttagagacagtctttgatgaagtcatcatggtagatgtcttggacagtggcgattctgctcatctaaccttaatgaagaggccagagttgggtgtcacgctgacaaagctccactgctggtcgcttacacagtattcaaaatgtgtattcatggatgcagatactctggtcctagcaaatattgatgatctttttgacagagaagaattgtcagcagcaccagacccagggtggcctgactgcttcaattccggagtcttcgtttatcagccttcagttgaaacatacaatcagctgttgcatcttgcttctgagcaaggtagttttgatggtggggaccaaggcatactgaacacattttttagcagctgggcaacaacagatatcagaaaacacctgccgtttatttataacctaagcagcatctctatatactcctacctcccggcatttaaagtgtttggtgcaagtgccaaagttgtgcatttcctgggacgagtcaaaccatggaattatacttatgatcccaaaacaaaaagtgtcaaaagtgaggcccatgatcccaacatgactcatccagagtttctcatcctgtggtggaacatctttaccaccaacgttttacctctgcttcaacaatttggccttgtcaaagacacctgctcatatgtaaatgtgctttcagacttggtctatacactggctttctcttgtggcttctgtagaaaggaagatgtctcaggagccatatcacatctgtcccttggggagatcccagctatggcacagccgtttgtatcctcggaagaacggaaggaacgatgggaacagggccaggctgattatatgggagcagattcctttgacaacatcaagaggaaacttgacacttacctccagtagaaacactgcatttttctgtgaacacatccacttcacaagccttgtttctgatacttagtatctagagctgggttgagaaaagtctgttacagttgctagaggttttcattaaaacttatcagatgagaggcttttttaggataagaggtgagaactgggcaaaagttgtgaagcagcaattctgttatatggacagtgttctgctttttaatcctatttagcttgtttcagaaattctcacttttgttgactgccaacatacaaagtaagggaaactcaagatattaagatggctgtatcagttcttaaaatctgcagagcctggttcaaaatcagtcactcccttcagaagcagacatggcatctgttccttgcttgcttgttggttgtgtacctttcacgagacctgaattttagaattgcccagtgctgccagagtgagtgagtgtaattctcctttcaggtaaagataggctatctcaacactgctgagtgattcataaacatatcaaccaatagcattaacccattttatttcctgtccttagtgtctgaagatgctcaccagttttctgtgtacagtaaggcagcatgctaaaatgcttttgttcagttctggatatttgaaaatagcagtgtgttctctgatggttacctgcagtggcaccctgtacaaaaaataaaagacttattggtgtaaa

SEQ ID NO: 374 - protein, 350 aa, Homo sapien
MTDQAFVTLTTNDAYAKGALVLGSSLKQHRTTRRLVVLATPQVSDSMRKVLETVFDEVIMVDVLDSGDSAHLTLMKRPELGVTLTKLHCWSLTQYSKCVFMDADTLVLANIDDLFDREELSAAPDPGWPDCFNSGVFVYQPSVETYNQLLHLASEQGSFDGGDQGILNTFFSSWATTDIRKHLPFIYNLSSISIYSYLPAFKVFGASAKVVHFLGRVKPWNYTYDPKTKSVKSEAHDPNMTHPEFLILWWNIFTTNVLPLLQQFGLVKDTCSYVNVLSDLVYTLAFSCGFCRKEDVSGAISHLSLGEIPAMAQPFVSSEERKERWEQGQADYMGADSFDNIKRKLDTYLQ

SEQ ID NO: 375 - DNA, 3061 bp, Homo sapien
cggcacgaggcgactttggtggaggtagttctttggcagcgggcatggcgggtaccgtggtgctggacgatgtggagctgcgggaggctcagagagattacctggacttcctggacgacgaggaagaccagggaatttatcagagcaaagttcgggagctgatcagtgacaaccaataccggctgattgtcaatgtgaatgacctgcgcaggaaaaacgagaagagggctaaccggcttctgaacaatgcctttgaggagctggttgccttccagcgggccttaaaggattttgtggcctccattgatgctacctatgccaagcagtatgaggagttctacgtaggactggaaggcagctttggctccaagcacgtctccccgcggactcttacctcctgcttcctcagctgtgtggtctgtgtggagggcattgtcactaaatgttctctagttcgtcccaaagtcgtccgcagtgtccactactgtcctgctactaagaagaccatagagcgacgttattctgatctcaccaccctggtggcctttccctccagctctgtctatcctaccaaggatgaggagaacaatccccttgagacagaatatggcctttctgtctacaaggatcaccagaccatcaccatccaggagatgccggagaaggccccagccggccagctcccccgctctgtggacgtcattctggatgatgacttggtggataaagcgaagcctggtgaccgggttcaggtggtgggaacctaccgttgccttcctggaaagaagggaggctacacctctgggaccttcaggactgtcctgattgcctgtaatgttaagcagatgagcaaggatgctcagccctctttctctgctgaggatatagccaagatcaagaagttcagtaaaacccgatccaaggatatctttgaccagctggccaagtcattggccccaagtatccatgggcatgactatgtcaagaaagcaatcctctgcttgctcttgggaggggtggaacgagacctagaaaatggcagccacatccgtggggacatcaatattcttctaataggagacccatccgttgccaagtctcagcttctgcggtatgtgctttgcactgcaccccgagctatccccaccactggccggggctcctctggagtgggtctgacggctgctgtcaccacagaccaggaaacaggagagcgccgtctggaagcaggggccatggtcctggctgaccgaggcgtggtttgcattgatgaatttgacaaaatgtctgacatggatcgcacagccatccatgaagtgatggagcagggtcgagtgaccattgccaaggctggcatccatgctcggctgaatgcccgctgcagtgttttggcagctgccaaccctgtctacggcaggtatgaccagtataagactccaatggagaacattgggctacaggactcactgctgtcacgatttgacttgctcttcatcatgctggatcagatggatcctgagcaggatcgggagatctcagaccatgtccttcggatgcaccgttacagagcacctggggagcaggatggcgatgctatgcccttgggtagtgctgtggatatcctggccacagatgatcccaactttagccaggaagatcagcaggacacccagatttatgagaagcatgacaaccttctacatgggaccaagaagaaaaaggagaagatggtgagtgcagcattcatgaagaagtacatccatgtggccaaaatcatcaagcctgtcctgacacaggagtcggccacctacattgcagaagagtattcacgcctgcgcagccaggatagcatgagctcagacaccgccaggacatctccagttacagcccgaacactggaaactctgattcgactggccacagcccatgcgaaggcccgcatgagcaagactgtggacctgcaggatgcagaggaagctgtggagttggtccagtatgcttactttaagaaggttctggagaaggagaagaaacgtaagaagcgaagtgaggatgaatcagagacagaagatgaagaggagaaaagccaagaggaccaggagcagaagaggaagagaaggaagactcgccagccagatgccaaagatggggattcatacgacccctatgacttcagtgacacagaggaggaaatgcctcaagtacacactccaaagacggcagactcacaggagaccaaggaatcccagaaagtggagttgagtgaatccaggttgaaggcattcaaggtggccctcttggatgtgttccgggaagctcatgcgcagtcaatcggcatgaatcgcctcacagaatccatcaaccgggacagcgaagagcccttctcttcagttgagatccaggctgctctgagcaagatgcaggatgacaatcaggtcatggtgtctgagggcatcatcttcctcatctgaggaggcctcgtctctgaacttgggttgtgccgagagagtttgttctgtgtttcccaccctctccctgacccaagtctttgcctctactcccttaacagtgttgaattcaactgaaggcgaggaatgttggtgatgaagctgagttcaggactcggtggaccctttgggaatgggtcatgaaagctgccatggggtgaggaaagaggagacagtgggagaggacaatgactattgcatcttcattgcaaaagcactggctcatccgccctacttcccatcccacacaaacccaattgtaaataacatatgacttctgagtacttttgggggcacaactgttttctgtttgctgtttttttgttttgttttttttctccagagcactttggtctagactaggctttgggtggttccaattggtggagagaagctctgaggcacgtcatgcaggtcaagaaagctttctttgcagtagcaccagttaaggtgaatatgtattgtatcacaaaacaaacccaatatccagatgaatatccgagatgttgaataaacttagccatttcgtacaaaaaaaggggggcccggtaaac

SEQ ID NO: 376 - protein, 808 aa, Homo sapien
MAGTVVLDDVELREAQRDYLDFLDDEEDQGIYQSKVRELISDNQYRLIVNVNDLRRKNEKRANRLLNNAFEELVAFQRALKDFVASIDATYAKQYEEFYVGLEGSFGSKHVSPRTLTSCFLSCVVCVEGIVTKCSLVRPKVVRSVHYCPATKKTIERRYSDLTTLVAFPSSSVYPTKDEENNPLETEYGLSVYKDHQTITIQEMPEKAPAGQLPRSVDVILDDDLVDKAKPGDRVQVVGTYRCLPGKKGGYTSGTFRTVLIACNVKQMSKDAQPSFSAEDIAKIKKFSKTRSKDIFDQLAKSLAPSIHGHDYVKKAILCLLLGGVERDLENGSHIRGDINILLIGDPSVAKSQLLRYVLCTAPRAIPTTGRGSSGVGLTAAVTTDQETGERRLEAGAMVLADRGVVCIDEFDKMSDMDRTAIHEVMEQGRVTIAKAGIHARLNARCSVLAAANPVYGRYDQYKTPMENIGLQDSLLSRFDLLFIMLDQMDPEQDREISDHVLRMHRYRAPGEQDGDAMPLGSAVDILATDDPNFSQEDQQDTQIYEKHDNLLHGTKKKKEKMVSAAFMKKYIHVAKIIKPVLTQESATYIAEEYSRLRSQDSMSSDTARTSPVTARTLETLIRLATAHAKARMSKTVDLQDAEEAVELVQYAYFKKVLEKEKKRKKRSEDESETEDEEEKSQEDQEQKRKRRKTRQPDAKDGDSYDPYDFSDTEEEMPQVHTPKTADSQETKESQKVELSESRLKAFKVALLDVFREAHAQSIGMNRLTESINRDSEEPFSSVEIQAALSKMQDDNQVMVSEGIIFLI

SEQ ID NO: 377 - DNA, 2159 bp, Homo sapien
tctttccgtcccgggcagccagcgccagtcggagccagcgcgagcgccgccgccatcactgccgctgccaagtcctccacccgctgcccccgccatgtctgctaccgctgccacggccccccctgctgccccggctggggagggtggtccccctgcaccccctccaaacctcaccagtaacaggagactgcagcagacccaggcccaggtggatgaggtggtggacatcatgagggtgaacgtggacaaggtcctggagcgagaccagaagctgtcggagctggacgaccgtgcagatgcactccaggcgggggcctcccagtttgaaacaagcgcagccaagctcaagcgcaaatactggtggaaaaacctcaagatgatgatcatcttgggagtgatttgcgccatcatcctcatcatcatcatagtttacttcagctcttaaatccccgaggagtctgccctgcctagagaagggcctctcccccaaccctcagccgttcctccacctctcagccatatctttcagccccccctcccctggatccgtgtgtgtgtgtgtccgtgtgtgtgtccccctgtaaatagccagctgttatttatacatatataatattatatatatttggtctgtttgtagttttattactagatgatttttccggttgtccttaacaccccttcctgaggttcccttcacccctctctcttgccttccttccctttccctttcttcctgactagccccaagtcccttcatttgcatctgctatgcaatagtccctctcctttccttcttcttccctcagatttagctgatccttcctcccaccctggccttcctttcctctttcctcctcactctccccgtcatgctccctctgccccgccctcaaaaaaaaaaaaaaaaaaaaaaaaaaaaaaaaccaccagcacctgtccaggcttccttaggtacatcttctttgtatccattgggaggctctgagactggccccacttggtcctaaaaatcccaaggtctttgggagcgtccagcatgttaattagcgtatcattacatactgctatccctttccatttctttttgttccatcactcttctctcaacctgtgtttctttttttactgaggagttagtccccattagttcttgtatcacattttcatttgcacgacattactcgcaggtggtggggagcctgggcttttggggaaccaggctgctctggtccccagcattgcctcctcctagcccctctagtccagtttgcctcccttaccctcattttccaaacctcttgtaccctcctctccctcccccagtggtatgtaagtgtcttgaagttcagtatgttatgatggaccaataattctgcccttcgggtttctccctacattcctgctccccagttttcatgtggggtactcaactgacattcccatggggtttccctcccatctgcctgatccacctcctcctcccaccacaagatcaattgttggccacaattgatctcttgtagaggggtggctaccagtgtgtgtgtgggggtcatcactgccttggggaggagtggggcagggcagagaatccccccaattcctgcctgaaatctctggcctcacccctgctgggggttggactgaaaaccctcctccccaatttggggggtgttgccccatcactgcccagctcctctgactgccccccctgaatttagggtgggggtactagtcactgccaatgtgtgtatgggacttgctggaaaacggggatgcttgcccctctccaggactattgagcccagagagagctgtcctctcattgggtgaactgattgaggaagggtctattgtctttttaaatggcacaattttaagggtttgagggtacagtcccttaacctgccacgggagggggcccccaaactttcttcccccccacacttctggttttctgtgtggagggggagcagggatatctaagctgtggtgtgaaagggtaggagagatgctggaggtgggggtgctgtgttctagaccccccatattatcccagtgtcccctgcccccctcttcccccaccccatgcccccaattctgtggcgcatccagattgtgaaaatgtacaataaatgtgtaatgagtaaccaggt

SEQ ID NO: 378 - protein, 116 aa, Homo sapien
MSATAATAPPAAPAGEGGPPAPPPNLTSNRRLQQTQAQVDEVVDIMRVNVDKVLERDQKLSELDDRADALQAGASQFETSAAKLKRKYWWKNLKMMIILGVICAIILIIIIVYFSS

SEQ ID NO: 379 - DNA, 4318 bp, Homo sapien
aagcggctcgggctgcggctggctcagagtgccgcggggggcgtggggcggtgctgaggagctgaagccgtggccagctcgactccggacagtccagcgagcagcacggcgggaaccggcagccggagcagtcccggagcagaagcagcagcagcagcagcagccctcgccgttcgcggagcgcagccgagccggccatggcgttgtcgatgccgctgaatgggctgaaggaggaggacaaagagcccctcatcgagctcttcgtcaaggctggcagtgatggtgaaagcataggaaactgccccttttcccagaggctcttcatgattctttggctcaaaggagttgtatttagtgtgacgactgttgacctgaaaaggaagccagcagacctgcagaacttggctcccgggacccacccaccatttataactttcaacagtgaagtcaaaacggatgtaaataagattgaggaatttcttgaagaggtcttatgccctcccaagtacttaaagctttcaccaaaacacccagaatcaaatactgctggaatggacatctttgccaaattctctgcatatatcaagaattcaaggccagaggctaatgaagcactggagaggggtctcctgaaaaccctgcagaaactggatgaatatctgaattctcctctccctgatgaaattgatgaaaatagtatggaggacataaagttttctacacgtaaatttctggatggcaatgaaatgacattagctgattgcaacctgctgcccaaactgcatattgtcaaggtggtggccaaaaaatatcgcaactttgatattccaaaagaaatgactggcatctggagatacctaactaatgcatacagtagggacgagttcaccaatacctgtcccagtgataaggaggttgaaatagcatatagtgatgtagccaaaagactcaccaagtaaaatcgcgtttgtaaaagagatgtcttcatgtcttcccctaagaatacgcttttcctaacaggctactccttcctgtagagcagaaattgtattttgcacgaacatgcagttattgaagattaggatcaaggatagacaaggtatagtagttatcttaaaatatacactcctaagcagtattattttaaaatcctttaccctggctacctcccctacccgggttcccctctctttaatttggagacactccaccacaaacttttcactttagaggtagcttgccatctctcaggagccctcaccattgtgtccattcactgtgtatagatggcagaacttttgaggtgcaatgtttaattgttaaaaatagtagccacgactttatcaggcagccccaaactggtgcataatgcatggtacaagaaatatttatgtattttttggaattttgtaatatttagtaggagtatatgaaaggattgctactgtatcagaaatattgtttcaatttagtctatcctggatatgtactaacgaatattaccaccagagaagagagctttctacaaaagtcactacagattttgctatattgctttgtagatagatttttacttttgcctaaaagcatttatccttcataccaattgtaacatctgacaccatgtagaagctaaaagtttagagggagtgagcgttttctcaagaccttcctcaagcattttatctttagaagagaaactgatgggcacctgatactctgtctaaatacgtttgttatatgtgttttgccctgtgccattcatttggaactttattgcattctttattttaaaaagcttgtttttacgtaatcatagagcttgctatttgtacatctgttgagcaacactacataactgatttttagttgacttagctatagcagtacaatgattagtaatgtaaaaattaacacagaaattaacctaaggaatgaagggtgggtttgtcaaaatatcaagtaaatttttgtttctaaagtacatttaatgtagatgacctaaagaatgcgttatccatcctatataaaagaaagataaaacacaggtcaccaattttctcatttcaccccatttaccttgtatagaggattgttcattcctttgggactaagttatagttatggtgagtgtgtatttactgtagttttgcctgatctcactcattgcacttcctggagttaaattttccaacagccatgttgaggaatagcactctgcatgtttttgttttgtttttcggggttttttttaattgaagccctaaaccaggaattatttgtgttctaacaggaggatgaacttgctgaaaataaaactttgctatgtatttactcttttttaaaagacaaaagcaaaaccagactttctacgtactactccaaagactgtgattgtgactataatacatttttggtaatttttttatacctaatttgtataggaagtgctatttctcataggctgtttcttgaaattttaagtttattgctttaaaatggcagtgtttctcccactttgatatgctaacatttagtaagcactggctttatgaaagcggctttttataagtatactgcattttttgagcctatcattaattagcttagtatgaaagataagaaaatctccatgttgtatccatttggctcaggaagattctttgccttacctttcttagaactctttattgcttatcaaaagtttgagtacccgcttggtttttttttggtaattaaatattgtatgatttatctggttcaaggaagatgcactattcagttatctattgagaaattattttgcagtggttttagtgggtgaaaatgtcccatctgcaccagtacacaggcaggcattatcattcttcacctactttttaaatagtggcaacttgggattctttctggtgattctgaaccttgcctcatagcttaaagtataaaaaaagattcaagagcagtgaggtttgttctttccagtgaatggtggactgagtggtgcgaggtggagggctaacaagaggaaagaactacattcttcagaatacagtgatgaaaattcattttgaaactcaaatattttcattttggatattctcctgtttttattaaaccagtgattacacctggccatccctctaaatgttctaggaaggcatgtctattgtgattttgatgaagacagaattatttttctctgtagaaacacagataccactttatcagggaagttagtcaaatgaaatggaaattggtaaatggacaaaagctagctagtaaaaaggacgacccagcaacatgctttaaccccattgtatgtttgtggaaagagcatagtttaacatcttgagaaatttgggacataaagttttcatggtagacagttcatgcagtatatgaattgacataatggaaataatctgattttatttttacaactaacatccattccccttcatttaaacaccttttgtgttttacttcagtgaggagattggagtctgaatggatctgttttccaagagattctgagaaatttttgtattcagcagttggaaagctctctattctagttgataaaacttcccttttttgatgtagatgcagatattctatacagttctgttgtcttttactaggactgtaaacttttgtgataaaattcaaataagattttatttctttgtaattttggctttcacaatttatctttaaatccttgagcaatctgtatacaattaagagatttctgacatttattcttacactaaatggatcaactctaggatttaggcatgttaacttctgttgtgttttgaatctctccagagttgcatgtagatagcatttatttctgtgcccttaaacccatttagaaaataactacaaagtaaaaatgtagaggaaatagaaatgtattttttcatgaacattttgatacaaatttcatcatttaatgattcaccaatttcttgcattaatttgaatttaagcatttaattcaaagagaggggagcatccattattggtacatgtgggcttttaaaaactccatcctttataaatagtcaaggtttgggccacacaaagtatatttttatcatggaaaaatttcaactcctcaagccgtaatgttgaacagaattggagtattttctttataatttcttgaacaggcaaatgaaagcttattatagaatgcatgtattttcttttatctttggaacatcagcaccagtatattgctggcagctattgtattaaaaaataaagtatattttcactatcaaaaaaaaaaaaaaaaaaaaaaaaaaaa

SEQ ID NO: 380 - protein, 253 aa, Homo sapien
MALSMPLNGLKEEDKEPLIELFVKAGSDGESIGNCPFSQRLFMILWLKGVVFSVTTVDLKRKPADLQNLAPGTHPPFITFNSEVKTDVNKIEEFLEEVLCPPKYLKLSPKHPESNTAGMDIFAKFSAYIKNSRPEANEALERGLLKTLQKLDEYLNSPLPDEIDENSMEDIKFSTRKFLDGNEMTLADCNLLPKLHIVKVVAKKYRNFDIPKEMTGIWRYLTNAYSRDEFTNTCPSDKEVEIAYSDVAKRLTK

SEQ ID NO: 381 - DNA, 4318 bp, Homo sapien; identical to SEQ ID NO: 379

SEQ ID NO: 382 - protein, 253 aa, Homo sapien; identical to SEQ ID NO: 380

SEQ ID NO: 383 - DNA, 640 bp, Homo sapien
attctgagccgagcccggtgccaagcgcagctagctcagcaggcggcagcggcggcctgagcttcagggcagccagctcctcccggtctcgccttcctcgcggtcagcatgaaagccttcagtcccgtgaggtccgttaggaaaaacagcctgtcggaccacagcctgggcatctcccggagcaaaacccctgtggacgacccgatgagcctgctatacaacatgaacgactgctactccaagctcaaggagctggtgcccagcatcccccagaacaagaaggtgagcaagatggaaatcctgcagcacctcatcgactacatcttggacctgcagatcgccctggactcgcatcccactattgtcagcctgcatcaccagagacccgggcagaaccagcgctccaggacgccgctgaccaccctcaacacggatatcagcatcctgtccttgcaggcttctgaattcccttctgagttaatgtcaaatgacagcaaagcactgtgtggctgaataagcggtgttcatgatttcttttattctttgcacaacaacaacaacaacaaattcacggaatcttttaagtgctgaacttatttttcaaccatttcacaaggaggacaagttgaatggacctttt

SEQ ID NO: 384 - protein, 134 aa, Homo sapien
MKAFSPVRSVRKNSLSDHSLGISRSKTPVDDPMSLLYNMNDCYSKLKELVPSIPQNKKVSKMEILQHLIDYILDLQIALDSHPTIVSLHHQRPGQNQRSRTPLTTLNTDISILSLQASEFPSELMSNDSKALCG

SEQ ID NO: 385 - DNA, 1049 bp, Homo sapien
gcccggtgccaagcgcagctagctcagcaggcggcagcggcggcctgagcttcagggcagccagctcctcccggtctcgccttcctcgcggtcagcatgaaagccttcagtcccgtgaggtccgttaggaaaaacagcctgtcggaccacagcctgggcatctcccggagcaaaacccctgtggacgacccgatgagcctgctatacaacatgaacgactgctactccaagctcaaggagctggtgcccagcatcccccagaacaagaaggtgagcaagatggaaatcctgcagcacgtcatcgactacatcttggacctgcagatcgccctggactcgcatcccactattgtcagcctgcatcaccagagacccgggcagaaccaggcgtccaggacgccgctgaccaccctcaacacggatatcagcatcctgtccttgcaggcttctgaattcccttctgagttaatgtcaaatgacagcaaagcactgtgtggctgaataagcggtgttcatgatttcttttattctttgcacaacaacaacaacaacaaattcacggaatcttttaagtgctgaacttatttttcaaccatttcacaaggaggacaagttgaatggacctttttaaaaagaaaaaaaaaatgaaggaaaactaagaatgatcatcttcccagggttcttacttgactgtaattcgttatttatgaaaaaaccttttaaatgccctttctgcagttggaaggttttctttatatactattcccaccatggggagcgaaaacgttaaaatcacaaggaattgcccaatctaagcagactttgccttttttcaaaggtggagcgtgataccagaaggatccagtattcagtcacttaaatgaagtcttttggtcagaaattacctttttcacacaagcctactgaatgctgtgtatatatttatatataaatatatctatttgagtgaaaccttgtgaacctttaattagagtcttcttgtatagtggcagagatgtctattctgcatcaaagtgtaatgatgtact

SEQ ID NO: 386 - protein, 134 aa, Homo sapien
MKAFSPVRSVRKNSLSDHSLGISRSKTPVDDPMSLLYNMNDCYSKLKELVPSIPQNKKVSKMEILQHVIDYILDLQIALDSHPTIVSLHHQRPGQNQASRTPLTTLNTDISILSLQASEFPSELMSNDSKALCG

SEQ ID NO: 387 - DNA, 2261 bp, Homo sapien
  Unsure 2261: Unknown base
gaattccgcagccgctgccgccaggactgggccttagggaggaggaggcgagaagatggcggacgaccccagtgctgccgacaggaacgtggagatctggaagatcaagaagctcattaagagcttggaggcggcccgcggcaatggcaccagcatgatatcattgatcattcctcccaaagaccagatttcacgagtggcaaaaatgttagcggatgagtttggaactgcatctaacattaagtctcgagtaaaccgcctttcagtcctgggagccattacatctgtacaacaaagactcaaactttataacaaagtacctccaaatggtctggaagtatactgtggaacaattgtaacagaagaaggaaaggaaaagaaagtcaacattgactttgaacctttcaaaccaattaatacgtcattgtatttgtgtgacaacaaattccatacagaggctcttacagcactactttcagatgatagcaagtttggattcattgtaatagatggtagtggtgcactttttggcacactccaaggaaacacaagagaagtcctgcacaaattcactgtggatctcccaaagaaacacggtagaggaggtcagtcagccttgcgttttgcccgtttaagaatggaaaagcgacataactatgttcggaaagtagcagagactgctgtgcagctgtttatttctggggacaaagtgaatgtggctggtctagttttagctggatccgctgactttaaaactgaactaagtcaatctgatatgtttgatcagaggttacaatcaaaagttttaaaattagttgatatatcctatggtggtgaaaatggattcaaccaagctattgagttatctactgaagtcctctccaacgtgaaattcattcaagagaagaaattaataggacgatactttgatgaaatcagccaggactcactggcaagtactgttttggcgttgaagatacacataggctttggaatgggagctgtagaaaattctaatagtcatatgaaatctggatataatgagatatgttcttcattgccaaggcacagaagaagaaatctctatctaactccagagcaagaaaaggataaatctcatttcacagacaaagagaccggacaggaacatgagcttatcgagagcatgcccctgttggaatggtttgctaacaactataaaaatttggagctacgttggaaattgtcacagataaatcacaagaagggtctcagtttgatgaaaggatttggtggaattggaggtatcttgcggtaccagagtagatttccagggaatggaataccaaggaggagacgatgaattttttgaccttgatgactactaggtagtcgacatgggtccggcaaaacgtgcctcaccctccagcatccaacccaaggagcatacccatggtggaatccaaacagatccctgtccttacaattggaacatttccagaacttaatccatgagcattggatattgaaagaaaccgaaacaaaaccagacccagccctacactttggtttgtcatggtgcagcgcagcagcctaactaactaatgttccttcaaaagccactttggacgtaatttaaaaaagaatcccagtttttacttttactggatggtgaaattggttgctcttgtattttatgaaaaaaaatgatttttttaaccttcatacatagaagcaaaaatactttaactgctgtaaaccttcaaaagttaatagaagtgagatcatactggtttgtttcttatttttgattggagaaaaattaaattgctgcatttcgcctaggtgaccatttacatggattctcagttagactgcgtaagaagaaatatatgtggtgaaatgttggaaccatttctctcttggtctctgtttaatgttgaagggtgagctattaggaggcactttcaacttcactccctcacgctaccccgtccccctccagactggcagtttcaaggatgcaaattgcattgcaaaatcaaactgactcatgaagcatttgggccagtgcactgtttacttccatctgtttgcagacacatttgtgcccggcgtttgggagccctttgtatcaatgttctgacaagggtccctataaccttaacctactcgaaaccggtttgggatggatatgatggggcttctgtgctattgctgggattgggagaaataaaacatgcaatttaagtggaagcgaagaaatttaaaaaaaaaaaaan

SEQ ID NO: 388 - protein, 428 aa, Homo sapien [sequence omitted]

SEQ ID NO: 389 - DNA, 3653 bp, Homo sapien
attgcaacacatgcagctgcctggagagagggagccggtgtcctacgtcagagccgccgccgccgcgagccgccgccggggaggagcagccgctgccgcccaggactgggcccttagggaggaggaggcgagaagatggcggacgaccccagtgctgccgacaggaacgtggagatctggaagatcaagaagctcattaagagcttggaggcggcccgcggcaatggcaccagcatgatatcattgatcattcctcccaaagaccagatttcacgagtggcaaaaatgttagcggatgagtttggaactgcatctaacattaagtcacgagtaaaccgcctttcagtcctgggagccattacatctgtacaacaaagactcaaactttataacaaagtacctccaaatggtctggttgtatactgtggaacaattgtaacagaagaaggaaaggaaaagaaagtcaacattgactttgaacctttcaaaccaattaatacgtcattgtatttgtgtgacaacaaattccatacagaggctcttacagcactactttcagatgatagcaagtttggattcattgtaatagatggtagtggtgcactttttggcacactccaaggaaacacaagagaagtcctgcacaaattcactgtggatctcccaaagaaacacggtagaggaggtcagtcagccttgcgttttgcccgtttaagaatggaaaagcgacataactatgttcggaaagtagcagagactgctgtgcagctgtttatttctggggacaaagtgaatgtggctggtctagttttagctggatccgctgactttaaaactgaactaagtcaatctgatatgtttgatcagaggttacaatcaaaagttttaaaattagttgatatatcctatggtggtgaaaatggattcaaccaagctattgagttatctactgaagtcctctccaacgtgaaattcattcaagagaagaaattaataggacgatactttgatgaaatcagccaggacacgggcaagtactgttttggcgttgaagatacactaaaggctttggaaatgggagctgtagaaattctaatagtctatgaaaatctggatataatgagatatgttcttcattgccaaggcacagaagaggagaaaattctctatctaactccagagcaagaaaaggataaatctcatttcacagacaaagagaccggacaggaacatgagcttatcgagagcatgcccctgttggaatggtttgctaacaactataaaaaatttggagctacgttggaaattgtcacagataaatcacaagaagggtctcagtttgtgaaaggatttggtggaattggaggtatcttgcggtaccgagtagatttccagggaatggaataccaaggaggagacgatgaattttttgaccttgatgactactaggtagtcgacatgggtccggcaaaacgtgcctcaccctccagcatccaacccaaggagcatacccatggtggaatccaaacagatccctgccttacaattggaacatttccagaacttaatccatgagcattggatattgaaaagaaaaccgaaacaaaaccagacccagccctacactttggtttgtcatggtgtcagcgcagcagcctacaactaagttcctaaacgccactttggactaatttaaaaaagaatcccagtttttacttttactggatggtgaaattggttgctcttgtattttatgaaaaaaaatgatttttttaaccttcatacatagaagcaaaaatactttaactgctgtaaaccttcaaaagttaatagaagtgagatcatactggtttgtttcttattttgattggagaaaaattaaattgctgcatttcgcagtgacccatttacatggcattctcagcttagactgcgtaagaagaaatatatgtggtgaaatgttggaaccatttctctcttggtctctgtttaatgttgaaagggtgagctaataggaggcactttcaacttcactccctcacgctaccccgtccccctccagactggcagtttcaaggatgcaaattgcattgcaaaatcaaactgactcatgaagcatttgggccagtgcactgtttacttccatctgtttgcagacacatttgtgcccggcgtttgggagccctttgtatcaatgttctgacaagggtccctataaccttaacctactcgaaaccggtttgggatggatatgatggggcttctgtgctattgctgggattgggagaaataaaacatgcaatttaagtggaagcgaagaaatttaaagaggattttattttgcttgggtcaatccttgttaaaagggaggtggatgtgtttccttgtgttggatggcatgagattatgtgaatgttttgatttattaaaatgaactgcaaggtttttcacaggaacgacagacatgtatgactgcatgtaattataaactcctgacctcctggtggggttggagcatctgtttcaaatgtgggacttacaagcacttctcacatgagaaattaggggcgggtgggaagggatgggacacagcttctggcaccatggatttaagaccatgttggatccaaaagttggcctgaaaccctgaagctgatgcttcacagctgggctgtaagtcagacttgaacccagctgatatgcaaggtcatggcgtgccagggtggtgacagttgaacaaagtgtatagtacgtgcccagtggtagcgatggaaaaaagtataccaaatggactttgaaggaccaaaggttttaaaagtcaattggtatcacctccacactgactagggtagtggggtgcatttggttttcaaattgggtacttttaacactttagtgcctgactgctgttctttactgacttgattcagtcactcgtagctttattggtctgaaccagctccttgttcccaggttacagacctgcctatcgttccaataatcctgtttcacttgaatgaagggagtatgtcttaaatgtaaagtttctggttctcacactgtactctgaggtccaaatactgtctgtcaatgtgtaacctgatgtctcaaccccctgtgagaagagtccattatttggtgttcaccaacgtgggagacttcaccggaacaggcttttttgctttgggctctgctatttgtttgcagaacacccaagagcgagcaaacacgctctcttcacagcagtaccttagggttttgccattgtaaatgggtctgatgtgatatgacaagaccagagaaattggatgtaaatttacatttttgaatatgcttgttgtttcacatgatacatttagggtatgcagctccttttgtagtttttatttttactatttaagtttggaaatgatgccaaatttttgtatttctttaatcaatgtgttctcttcggtgatatatattgcattatatattgatgtgtgtatcaatatatattgatatgtattacacttacacatacaaacacatataagagggggtgaaaaccgtagcctttgcattctctatagcctctgcagagagatactaagcagcaaaatcttggtgttgtgatgtacagaaatggagaagagtattaaaccatatttaag

SEQ ID NO: 390 - protein, 437 aa, Homo sapien
MADDPSAADRNVEIWKIKKLIKSLEAARGNGTSMISLIIPPKDQISRVAKMLADEFGTASNIKSRVNRLSVLGAITSVQQRLKLYNKVPPNGLVVYCGTIVTEEGKEKKVNIDFEPFKPINTSLYLCDNKFHTEALTALLSDDSKFGFIVIDGSGALFGTLQGNTREVLHKFTVDLPKKHGRGGQSALRFARLRMEKRHNYVRKVAETAVQLFISGDKVNVAGLVLAGSADFKTELSQSDMFDQRLQSKVLKLVDISYGGENGFNQAIELSTEVLSNVKFIQEKKLIGRYFDEISQDTGKYCFGVEDTLKALEMGAVEILIVYENLDIMRYVLHCQGTEEEKILYLTPEQEKDKSHFTDKETGQEHELIESMPLLEWFANNYKKFGATLEIVTDKSQEGSQFVKGFGGIGGILRYRVDFQGMEYQGGDDEFFDLDDY

SEQ ID NO: 391 - DNA, 732 bp, Homo sapien
tgctgcgaaccacgtgggtcccgggcgcgtttcgggtgctggcggctgcagccggagttcaaacctaagcagctggaaggaaccatggccaactgtgagcgtaccttcattgcgatcaaaccagatggggtccagcggggtcttgtgggagagattatcaagcgttttgagcagaaaggattccgccttgttggtctgaaattcatgcaagcttccgaagatcttctcaaggaacactacgttgacctgaaggaccgtccattctttgccggcctggtgaaatacatgcactcagggccggtagttgccatggtctgggaggggctgaatgtggtgaagacgggccgagtcatgctcggggagaccaaccctgcagactccaagcctgggaccatccgtggagacttctgcatacaagttggcaggaacattatacatggcagtgattctgtggagagtgcagagaaggagatcggcttgtggtttcaccctgaggaactggtagattacacgagctgtgctcagaactggatctatgaatgacaggagggcagaccacattgcttttcacatccatttcccctccttcccatgggcagaggaccaggctgtaggaaatctagttatttacaggaacttcatcataatttggagggaagctcttggagctgtgagttctccctgtacagtgttaccatccccgaccatctgattaaaatgcttcctcccagc

SEQ ID NO: 392 - protein, 152 aa, Homo sapien
MANCERTFIAIKPDGVQRGLVGEIIKRFEQKGFRLVGLKFMQASEDLLKEHYVDLKDRPFFAGLVKYMHSGPVVAMVWEGLNVVKTGRVMLGETNPADSKPGTIRGDFCIQVGRNIIHGSDSVESAEKEIGLWFHPEELVDYTSCAQNWIYE

SEQ ID NO: 393 - DNA, 5224 bp, Homo sapien
ggctcatagagctgaacagttgcaggatgcggaggaggaaaaagatgattcaaatgaagaagaaaacaaagacagccttgtagatgatgaagaagagaaagaagatcttggcgatgaggatgaagcagaggaagaagaggaggaggacaacttggctgctggtgtggatgaggagagaagtgaggccaatgatcaggggcccccaggagaggacggtgtgacccgggaggaagtagagcctgaggaggctgaagaaggcatctctgagcaaccctgcccagctgacacagaggtggtggaagactccttgaggcagcgtaaaagtcagcatgctgacaagggactgtagatttaatgatgcgttttcaagaatacacaccaaaacaatatgtcagcttccctttggcctgcagtttgtaccaaatccttaatttttcctgaatgagcaagcttctcttaaaagatgctctctagtcatttggtctcatggcagtaagcctcatgtatactaaggagagtcttccaggtgtgacaatcaggatatagaaaaacaaacgtagtgttgggatctgtttggagactgggatgggaacaagttcatttacttaggggtcagagagtctcgaccagaggaggccattcccagtcctaatcagcaccttccagagacaaggctgcaggccctgtgaaatgaaagccaagcaggagccttggctcctgagcatccccaaagtgtaacgtagaagccttgcatccttttcttgtgtaaagtatttatttttgtcaaattgcaggaaacatcaggcaccacagtgcatgaaaaatctttcacagctagaaattgaaagggccttgggtatagagagcagctcagaagtcatcccagccctctgaatctcctgtgctatgttttatttcttacctttaatttttccagcatttccaccatgggcattcaggctctccacactcttcactattatctcttggtcagaggactccaataacagccaggtttacatgaactgtgtttgttcattctgacctaaggggtttagataatcagtaaccataacccctgaagctgtgactgccaaacatctcaaatgaaatgttgtggccatcagagactcaaaaggaagtaaggattttacaagacagattaaaaaaaaatggttttgtccaaaatatagttgttgttgatttttttttaagttttctaagcaatatttttcaagccagaagtcctctaagtcttgccagtacaaggtagtcttgtgaagaaaagttgaatactgttttgttttcatctcaaggggttccctgggtcttgaactactttaataataactaaaaaaccacttctgattttccttcagtgatgtgcttttggtgaaagaattaatgaactccagtacctgaaagtgaaagatttgattttgtttccatcttctgtaatcttccaaagaattatatctttgtaaatctctcaatactcaacctactgtaagtacccagggaggctaatttccttaaaaaaaaaaaatctatccatctacttctctcttacctgatttatgtgttagaataaattcatgaaattcgattccaagcatacgaaagatgcctaaagttgattctatgctccttagatccagacagaataatgagtacaggtttatgaaattctaaaagtttctgtcgtctttaaaaaggaacgtgcagtatatttctatctggctgtttagataaccctttccttgtattaattgtgagcacggagctcactggtgggggaggttctgaaactctctgccctcctgtggttgaatgaagatgttgcaagacttgcacaaaggaggttattcttctgacagcatcaacttttagagatggttctttttcatctttccaattcagttacttgacagtctccttccccagtatgctgaagtttgttaagagtcaccagtaattgtgcttttcagacagtagtgcagcttcaaaatcgaggccatcactgggctgatgggctgggagaaccttgccatgtgcctgcctgtttcctgcccccttagtcactgcccatttcctgcccccttggtcgctgacacaccttcacccaaagtgccatggttctgatggtggcagttccatctccctgacatcaggaagcttttctcgatcagagcagagcggggcctgcctgccctcgtgtcactggatttctttctcttataatcagctgaaacagagttctcaaagaacagtaaactcaggttcagaggtattatggaataagaatggtttcatagtttggcttttctatataattcctccctctcaaactgaaatattcatttttttagtggagtatttgactagagagaaggtaaggcagaaatacagtctacactggcttttaaaaatgtaaagccaatttccaaccggaccccaaatagtacaggttgaacattccgttccaacaatccaaaaccccaaatgctccaaaatcttaaactttgagttccagcattccgtcagaagtggaaaattttacacctgacctcatttgacaggtggcagttacagtgcaatcaaaactttgttccatgcccaagattattaaaaatattggataaaattaccttcaagctatgttgtataaggtgtatataaaacaaatgaattttgtgtttagacttgggtctactcccaagatacctcattatatatatacaaaaatccccaaatccaaaaacatttgaaacacttctggtcccacacattttggataagggatatttgacctatatctaattatataataagaaaaatgtattttctttttttttttttttttgagatggagtttcactcttgttgtcgcccaggctgcaatggcacaatcttggcttactacaacctccgcctccctagttcaagggattctcctgcctcagcctcccaggtagctgggattacaggcatgtgccaccatgcctggctaattttgtatttttagtagagacggggtttcgccatgttggtcagactggtcttgaactcctgacctcaggtgatccgcccgcctcagcctcccaacgtgctgggattacaggtgtgagccaccgtacctggcagaaaatgtactttctttctcagaaatacttttaaaaaaaattgaagggtgaggagaaaaacatcttggagaagaggacccattaaaactttaaatatctgtgggaaccatttttcctgattttcccttttttaacatcatggcaaagatgggtttttttccaacaaaatttaatttaatatctttccacttgaagattttaggtttgttttcaatacttaatgaatataaaactaaaggagaaaagccaacctgaaataatttaaactttatatgaacatttcgataagagtttgtggattttttctgtagataatatatttgatccagaactcaagtgcatggaaacatgattttgatttttaaaatctaaaaaaaaaaaaaattaaaatcatgcttccctctattgcagtatcagttatttagtcacagaatggtattttatgtaaattaaaattaggtgaatgcaatgcaggtaactggttttggaatgggaatgtgcagtgctttatgtttggggagttggagcagggtatcttttcatcaattagaaggaaagtttgaaacttctgattacctttatgttggtttctcttattatttgtctcttgctagatctgctaaaccaacccagcttgctcagagatctcatattgaagcaacatacaggcaatccacatctttctttccctttgaagtatagtcattggatgggatgagggacagggcctgttgggttcacagggccttgcactgcatgggcacatacttaaaagctcttgtgcatggaatccctgtctgttagccacaggcctctttagctctatacattcaaaataactactgtagtagaaaatagataagcttcagctgagttggcttttgatagtggaaaaaaaacaaaatttgactttttatggccaaaattccttgttgacagctgtgatgttctaatatgatttgggaatatgtcagtctacagaacctgcatcctgtaaaaacacctttggggtagacgataaaagtcatttttaaggcaaatacttaccatgtgactttttattaccaaatgcatcagtagtggagctggtatgttgtttcataggatggaaacattagaagtccagagaaaaataaattttaaaaaaaggtggaaaagttacggcaaacctgagatttcagcataaaatctttagtatgaagtgagagaaagaagagggaggctggttctgttgctcgtatcaataggttatctgtgtccctcatcttggtgttacagtgttatttctgtcagtattatgaatatgtggttgacccatcctgtcaaatgtaccaacattttcgaaagaattcattcaaatctcttatgccaacagaaaagttccttcttgtttaatatctctttacctcagtcctacattttgattctctggaggagattttagcttgtcttaaaaagccaaatttggagtcatcaagcctgctgaacctgatggggcagctttttgaacagctttctggaagtaagaacttcagttgaaaagccctttgatcgcttcagcccgggacatgcccttcagatggcttattctcagtaaagctttatgtagactgtgacactgtatatgtgtgactcgtacaactttgacgtgtttctgaagtggtttaatcgtatttgttattagcttctttgtggaaatgcaatttttatactaaaaacattgcttatttgcaatgcaatatgttataaatttgttgtttatattactggtattagtcttagcctaatgaacctaattatttttctttctgtattctttgcttcctcaaatagcatctgcagcaattggaatgagaaatccagatatgtgtttcaagtagtacattgcctgaatcacaaatcacttgatcacagtattgtatataatccctgatcctatttgtttcattttattgtaaattcccatttgcatcaaaacctaatgatagtgattggtaagtaaaaacaaatggtgtattgcttttcatacaagtgttttcacaaaagccatttgcctaggcagcaaaaaatattaatttgtt

SEQ ID NO: 394 - DNA, 3583 bp, Homo sapien
cgcggacccggccggcccaggcccgcgcccgccgcggccctgagaggccccggcaggtcccggcccggcggcggcagccatggccggggggccgggcccgggggagcccgcagcccccggcgcccagcacttcttgtacgaggtgccgccctgggtcatgtgccgcttctacaaagtgatggacgccctggagcccgccgactggtgccagttcgccgccctgatcgtgcgcgaccagaccgagctgcggctgtgcgagcgctccgggcagcgcacggccagcgtcctgtggccctggatcaaccgcaacgcccgtgtggccgacctcgtgcacatcctcacgcacctgcagctgctccgtgcgcgggacatcatcacagcctggcaccctcccgccccgcttccgtccccaggcaccactgccccgaggcccagcagcatccctgcacccgccgaggccgaggcctggagcccccggaagttgccatcctcagcctccaccttcctctccccagcttttccaggctcccagacccattcagggcctgagctcggcctggttccaagccctgcttccctgtggcctccaccgccatctccagccccttcttctaccaagccaggcccagagagctcagtgtccctcctgcagggagcccgcccctctccgttttgctggcccctctgtgagatttcccggggcacccacaacttctcggaggagctcaagatcggggagggtggctttgggtgcgtgtaccgggcggtgatgaggaacacggtgtatgctgtgaagaggctgaaggagaacgctgacctggagtggactgcagtgaagcagagcttcctgaccgaggtggagcagctgtccaggtttcgtcacccaaacattgtggactttgctggctactgtgctcagaacggcttctactgcctggtgtacggcttcctgcccaacggctccctggaggaccgtctccactgccagacccaggcctgcccacctctctcctggcctcagcgactggacatccttctgggtacagcccgggcaattcagtttctacatcaggacagccccagcctcatccatggagacatcaagagttccaacgtccttctggatgagaggctgacacccaagctgggagactttggcctggcccggttcagccgctttgccgggtccagccccagccagagcagcatggtggcccggacacagacagtgcggggcaccctggcctacctgcccgaggagtacatcaagacgggaaggctggctgtggacacggacaccttcagctttggggtggtagtgctagagaccttggctggtcagagggctgtgaagacgcacggtgccaggaccaagtatctgaaagacctggtggaagaggaggctgaggaggctggagtggctttgagaagcacccagagcacactgcaagcaggtctggctgcagatgcctgggctgctcccatcgccatgcagatctacaagaagcacctggaccccaggcccgggccctgcccacctgagctgggcctgggcctgggccagctggcctgctgctgcctgcaccgccgggccaaaaggaggcctcctatgacccaggtgtacgagaggctagagaagctgcaggcagtggtggcgggggtgcccgggcatttggaggccgccagctgcatccccccttccccgcaggagaactcctacgtgtccagcactggcagagcccacagtggggctgctccatggcagcccctggcagcgccatcaggagccagtgcccaggcagcagagcagctgcagagaggccccaaccagcccgtggagagtgacgagagcctaggcggcctctctgctgccctgcgctcctggcacttgactccaagctgccctctggacccagcacccctcagggaggccggctgtcctcagggggacacggcaggagaatcgagctgggggagtggcccaggatcccggcccacagccgtggaaggactggcccttggcagctctgcatcatcgtcgtcagagccaccgcagattatcatcaaccctgcccgacagaagatggtccagaagctggccctgtacgaggatggggccctggacagcctgcagctgctgtcgtccagctccctcccaggcttgggcctggaacaggacaggcaggggcccgaagaaagtgatgaatttcagagctgatgtgttcacctgggcagatcccccaaatccggaagtcaaagttctcatggtcagaagttctcatggtgcacgagtcctcagcactctgccggcagtgggggtgggggcccatgcccgcgggggagagaaggaggtggccctgctgttctaggctctgtgggcataggcaggcagagtggaaccctgcctccatgccagcatctgggggcaaggaaggctggcatcatccagtgaggaggctggcgcatgttgggaggctgctggctgcacagacccgtgaggggaggagaggggctgctgtgcaggggtgtggagtagggagctggctcccctgagagccatgcagggcgtctgcagcccaggcctctggcagcagctctttgcccatctctttggacagtggccaccctgcacaatggggccgacgaggcctagggccctcctacctgcttacaatttggaaaagtgtggccgggtgcggtggctcacgcctgtaatcccagcactttgggaggccaaggcaggaggatcgctggagcccagtaggtcaagaccagccagggcaacatgatgagaccctgtctctgccaaaaaattttttaaactattagcctggcgtggtagcgcacgcctgtggtcccagctgctggggaggctgaagtaggaggatcatttatgcttgggaggtcgaggctgcagtgagtcatgattgtatgactgcactccagcctgggtgacagagcaagaccctgtttcaaaaagaaaaaccctgggaaaagtgaagtatggctgtaagtctcatggttcagtcctagcaagaagcgagaattctgagatcctccagaaagtcgagcagcacccacctccaacctcgggccagtgtcttcaggctttactggggacctgcgagctggcctaatgtggtggcctgcaagccaggccatccctgggcgccacagacgagctccgagccaggtcaggcttcggaggccacaagctcagcctcaggcccaggcactgattgtggcagaggggccactacccaaggtctagctaggcccaagacctagttacccagacagtgagaagcccctggaaggcagaaaagttgggagcatggcagacagggaagggaaacattttcagggaaaagacatgtatcacatgtcttcagaagcaagtcaggtttcatgtaaccgagtgtcctcttgcgtgtccaaaagtagcccagggctgtagcacaggcttcacagtgattttgtgttcagccgtgagtcacactacatgcccccgtgaagctgggcattggtgacgtccaggttgtccttgagtaataaaaacgtatgttccctaaaaaaaaaaaaa

SEQ ID NO: 395 - protein, 712 aa, Homo sapien
MAGGPGPGEPAAPGAQHFLYEVPPWVMCRFYKVMDALEPADWCQFAALIVRDQTELRLCERSGQRTASVLWPWINRNARVADLVHILTHLQLLRARDIITAWHPPAPLPSPGTTAPRPSSIPAPAEAEAWSPRKLPSSASTFLSPAFPGSQTHSGPELGLVPSPASLWPPPPSPAPSSTKPGPESSVSLLQGARPSPFCWPLCEISRGTHNFSEELKIGEGGFGCVYRAVMRNTVYAVKRLKENADLEWTAVKQSFLTEVEQLSRFRHPNIVDFAGYCAQNGFYCLVYGFLPNGSLEDRLHCQTQACPPLSWPQRLDILLGTARAIQFLHQDSPSLIHGDIKSSNVLLDERLTPKLGDFGLARFSRFAGSSPSQSSMVARTQTVRGTLAYLPEEYIKTGRLAVDTDTFSFGVVVLETLAGQRAVKTHGARTKYLKDLVEEEAEEAGVALRSTQSTLQAGLAADAWAAPIAMQIYKKHLDPRPGPCPPELGLGLGQLACCCLHRRAKRRPPMTQVYERLEKLQAVVAGVPGHLEAASCIPPSPQENSYVSSTGRAHSGAAPWQPLAAPSGASAQAAEQLQRGPNQPVESDESLGGLSAALRSWHLTPSCPLDPAPLREAGCPQGDTAGESSWGSGPGSRPTAVEGLALGSSASSSSEPPQIIINPARQKMVQKLALYEDGALDSLQLLSSSSLPGLGLEQDRQGPEESDEFQS

SEQ ID NO: 396 - DNA, 647 bp, Homo sapien
gctcactgagcaccgtcccagcatccggacaccacagcggcccttcgctccacgcagaaaaccacacttctcataccttcactcaacacttccttccccaaagccagaagatgcacaaggaggaacatgaggtggctgtgctgggggcaccccccagcaccatccttccaaggtccaccgtgattaacatccacagcgagacctccgtgcccgaccatgtcgtctggtccctgttcaacaccctcttcttgaactggtgctgtctgggcttcatagcattcgcctactccgtaaagtctagggacaggaagatggttggcgacgtgaccggggcccaggcctatgcctccaccgccaagtgcctgaacatctgggccctgattctgggcatcctcatgaccattggattcatcctgttactggtattcggctctgtaacagtctaccatattatgttacagataatacaggaaaaacggggttactagtagccgcccatagcctgcaacctttgcactccactgtgcaatgctggccctgcacgctggggctgttgcccctgcccccttggtcctgcccctagatacagcagtttatacccacacacctgtctacagtgtcattcaataaagtgcacgtgcttgtga

SEQ ID NO: 397 - protein, 125 aa, Homo sapien
MHKEEHEVAVLGAPPSTILPRSTVINIHSETSVPDHVVWSLFNTLFLNWCCLGFIAFAYSVKSRDRKMVGDVTGAQAYASTAKCLNIWALILGILMTIGFILLLVFGSVTVYHIMLQIIQEKRGY

SEQ ID NO: 398 - DNA, 2122 bp, Homo sapien
gcccgtcccgccgcccgcccgccagccatgagctccacgcagttcaacaagggcccctcgtacgggctgtcggccgaggtcaagaaccggctcctgtccaaatatgacccccagaaggaggcagagctccgcacctggatcgagggactcaccggcctctccatcggccccgacttccagaagggcctgaaggatggaactatcttatgcacactcatgaacaagctacagccgggctccgtccccaagatcaaccgctccatgcagaactggcaccagctagaaaacctgtccaacttcatcaaggccatggtcagctacggcatgaaccctgtggacctgttcgaggccaacgacctgtttgagagtgggaacatgacgcaggtgcaggtgtctcttctcgccctggcggggaaggccaagactaaggggctgcagagcggggtggacattggcgtcaagtactcggagaagcaggagcggaatttcgacgatgccaccatgaaggctggccagtgcgtcatcgggctgcagatgggcaccaacaaatgcgccagccagtcgggcatgactgcctacggcacgagaaggcatctctatgaccccaagaaccatatcctgccccccatggaccactcgaccatcagcctccagatgggcacgaacaagtgcgccagccaggtgggcatgacggctcccgggacccggcggcacatctatgataccaagctgggaaccgacaagtgtgacaactcctccatgtccctgcagatgggctacacgcagggcgccaaccagagcggccaggtcttcggcctgggccggcagatatatgaccccaagtactgcccgcaaggcacagtggccgatggggctccctcgggcaccggcgactgcccggacccgggggaggtccctgaatatcccccttactaccaggaggaggccggctactgaggctcccagcacgctctctccccacatcgtcttcccatctgggtttttgggtttttctgtgttttcatctttttttttttttttcttgacccgttcagtgctgccagtcaaccaagggtctgtgagtgtcagcgtgggatcaggcagcagagcttttttcccctttgccttgatccttcgcaaggctgagccactgggctgtgggggaaggggtcaaggccatatcccaatacgtgtagggcgagggtccctgctggcacattcaggctgtgctgggaagaagagacctgggcttggaaggaaccggtccccgacggtttctggttgcctcgcctcttcccccttttgtcagctgagcagtttgtggtttctatgcccgcaagtttcaggaagtattcacaaaagaaaaatacattttttcccccaggggtggggcaaggacagtggagagagtgctaggaaatgagtcccctgggaaaggggaccgggccgtgatgttaaatatctccggctcccaagtgactggatttgcctaggaccttcagatcaacagacttcagaccctcagacctgccccggggccaggtggagaaagtgagggccgtacaaggaagtgaaattctgagttgttggggctaagcctgaccccctctccatgctccccgccccaactcactctggcctcagtagatttttttttcagttgtggttgttgcccaggctggagtgcagtggcgccatcttggctcactgcacctccaccttccgggctcaagcgattctccagcctcagcctcctgagtagctaggactgcaggtgctccaccacgcccggctaatttttgtatttttagtagagatggggtttccccatgttggccaggctggtctcgaactcctggcctcaggtgtgatccgcccgcctccgcctccccaagcgctgagattacaggtgtgagccaccgtgcccaggccctcagtaggttttaaggagtccccagccctcctcccttctgggcccgaccagcttatactgctccatcttccccggccacatgccccgccaagtactgcacagggaccccccacccaggggccctgctccgtgagataatgtgaaatacgactgtggaccaaacgcaataaaacctttgtttgtaggaag

SEQ ID NO: 399 - protein, 309 aa, Homo sapien
MSSTQFNKGPSYGLSAEVKNRLLSKYDPQKEAELRTWIEGLTGLSIGPDFQKGLKDGTILCTLMNKLQPGSVPKINRSMQNWHQLENLSNFIKAMVSYGMNPVDLFEANDLFESGNMTQVQVSLLALAGKAKTKGLQSGVDIGVKYSEKQERNFDDATMKAGQCVIGLQMGTNKCASQSGMTAYGTRRHLYDPKNHILPPMDHSTISLQMGTNKCASQVGMTAPGTRRHIYDTKLGTDKCDNSSMSLQMGYTQGANQSGQVFGLGRQIYDPKYCPQGTVADGAPSGTGDCPDPGEVPEYPPYYQEEAGY

SEQ ID NO: 400 - DNA, 3305 bp, Homo sapien
aaaaaaaatatattaataaaaaagttcaaaaaaggggggggattgtcatctcctttggggtgcgatggcttcaaatccaaactgaggctctccgggtggtaaggatgtgcgaggaggcctcttgaagaactccaggcctatcatgctgtctctccgctaaagcctgaggcccgaggtcagaggattcaggaaggctctgcagtcggcccaggagggcggggtcccgtggtggaggcggggagagggaaggaccgcacggagcaccaacccctgctcggccccgtaccaggaagcgctggggggcagaggagcggagttgaggcagaagccaggtgaggctggagtcctggggtaggcaggctgtcgctgccgctgccgctgcctgagatggaaatcgggggaggaagctcgcggaagaaacagcggagggttcgtggaaaaaaaagcaatggctgagctaagggatggggtaccaggttagggggaggaaacggtagagagaaataggtggggctcccgcgcatgctcaatagggaaggggcgcccgtggggtgcggacgcatgcgtagtgggcttctcgggcggtggggtgggcgcggaatttggagacccacttcgggaaaggtaaaatgcgggcgcaattttagggtacctgtgggacccgggctcttagggtcttgacacaggacgggcctgggccgaaagcccaggcacgcccgaccagagagtgtttctccactcccggactctgccagtcaggatggtggtgccttcgctgaagcttcaggacctcatcgaagagattcgcggggccaagactcaggcccaggagcgggaggtgatccaaaaggagtgtgcccacatccgggcctccttccgcgacggggacccagtgcacaggcaccggcagctggccaaactgctctacgtccacatgttgggctaccccgcccactttggacagatggagtgcctgaaactgatcgcctcctccagattcacagacaagagggtgggctacctgggggccatgcttctattggatgagaggcacgatgcccacctgctcattaccaacagcatcaagaatgacctgagccaggggattcagccagtacaaggcctggccttgtgcactttgagcaccatgggctctgctgagatgtgccgagacctggccccagaggtggagaaactgctcctgcagcccagtccctacgtgcgcaagaaggctattctgactgcagtgcacatgatccggaaggtccctgaactctccagtgtcttcctcccaccctgtgcccaactgcttcatgagcgtcaccatggcatcctgctgggcaccatcacgctgatcacggagctctgcgaacgaagccctgcagccctcaggcacttccgaaaggtggtaccccagctggtacacatcctccggactctggtgacaatgggatactccacagaacacagcatatctggagtcagcgaccccttcctgcaggtccagatacttcgtctgcttcggatcctgggccggaaccacgaggagagcagtgagaccatgaatgacttgctggcccaggtggccactaacacggacaccagccgaaatgccggaaatgcggtcctgtttgagacagtactcaccatcatggatatccgctctgcagctggcctacgggttctagctgtcaacattcttggtcgcttcctactcaacagtgacaggaacattaggtatgtggccctgacatcactgcttcgactggtgcagtctgatcacagtgctgtgcagcggcatcggcccactgtggtggaatgtctacgggaaactgatgcctccctcagccggagagccctggaactaagcctggctctggtaaatagctccaatgtgcgagccatgatgcaagagctgcaggcctttctggagtcctgccctcctgacctacgggctgactgtgcctcaggcatcctgctggctgcagagaggtttgctccaaccaaacgctggcacatagacaccatcctgcatgtgctgacaacggcgggcacccatgtgcgggatgatgcagtggccaacctgacccagctgattgggggggcccaggagctacatgcctactctgtgcgccgcctctacaatgccctggcagaagacatttcccagcaaccactggtgcaggtggcagcctggtgcattggggagtatggggacctcctgctggcagggaactgcgaggagattgagccccttcaggtggacgaagaggaagtgctggcattgctggaaaaggtgctgcagtcccacatgtccctgccagccactcgaggatatgccctcacagccctcatgaagctcagcactcgcctctgtggggacaacaaccgcatccgccaggtggtgtccatctacgggagctgcttggacgtggagctgcagcagcgggctgtggagtatgacacactcttccggaaatacgaccacatgagggctgccatcctggaaaaaatgcctcttgtggagcgagatggccctcaggctgatgaggaagcaaaggaaagcaaagaagcagcccagctttcagaagcagccccagtgcccacagagccccaggcctcacagctcctggatctgctagatctcctggatggggcttctggggatgtccagcatcctccccatctggacccctccccaggaggtgccctggtacacctgcttgaccttccctgtgtacctccacccccagctcccatcccagatctcaaagtgtttgagcgtgagggagtacagctgaatctgtctttcattcgaccccctgaaaaccctgctttgctgttaatcaccatcactgccaccaacttctcagagggtgatgtcacccatttcatctgccaggctgctgtgcccaagagtctccagctgcagctgcaggcccccagtgggaacacagttccagctcggggtggccttcctatcacccagctcttcagaatcctcaatcctaacaaggcccccctgcggctaaagctgcgcctcacctacgaccactttcaccagtcggtgcaggagatctttgaggtgaacaacttgcctgtggaatcgtggcagtaactgtctccactcacagcctgaaattctcctgtgtcccaaaccccagggggccccagcagcttcgaacctacacctgagggctaccagcaggtggcgctctggctttgcactgcaaaaactggggaccagcccccttctcccacaaataaagcccaataaagcctgagaagtgaggaaagccaaaaaa

SEQ ID NO: 401 - protein, 785 aa, Homo sapien
MVVPSLKLQDLIEEIRGAKTQAQEREVIQKECAHIRASFRDGDPVHRHRQLAKLLYVHMLGYPAHFGQMECLKLIASSRFTDKRVGYLGAMLLLDERHDAHLLITNSIKNDLSQGIQPVQGLALCTLSTMGSAEMCRDLAPEVEKLLLQPSPYVRKKAILTAVHMIRKVPELSSVFLPPCAQLLHERHHGILLGTITLITELCERSPAALRHFRKVVPQLVHILRTLVTMGYSTEHSISGVSDPFLQVQILRLLRILGRNHEESSETMNDLLAQVATNTDTSRNAGNAVLFETVLTIMDIRSAAGLRVLAVNILGRFLLNSDRNIRYVALTSLLRLVQSDHSAVQRHRPTVVECLRETDASLSRRALELSLALVNSSNVRAMMQELQAFLESCPPDLRADCASGILLAAERFAPTKRWHIDTILHVLTTAGTHVRDDAVANLTQLIGGAQELHAYSVRRLYNALAEDISQQPLVQVAAWCIGEYGDLLLAGNCEEIEPLQVDEEEVLALLEKVLQSHMSLPATRGYALTALMKLSTRLCGDNNRIRQVVSIYGSCLDVELQQRAVEYDTLFRKYDHMRAAILEKMPLVERDGPQADEEAKESKEAAQLSEAAPVPTEPQASQLLDLLDLLDGASGDVQHPPHLDPSPGGALVHLLDLPCVPPPPAPIPDLKVFEREGVQLNLSFIRPPENPALLLITITATNFSEGDVTHFICQAAVPKSLQLQLQAPSGNTVPARGGLPITQLFRILNPNKAPLRLKLRLTYDHFHQSVQEIFEVNNLPVESWQ

SEQ ID NO: 402 - DNA, 1929 bp, Homo sapien; identical to SEQ ID NO: 15

SEQ ID NO: 403 - protein, 180 aa, Homo sapien; identical to SEQ ID NO: 16

SEQ ID NO: 404 - DNA, 2271 bp, Homo sapien
tggccggaattccggggagggagaagcccctttggcctgccttacggaagcctgcgagggagggtggtgtccactgcccagttccgtgtcccgatgcccagcgccacgcagcgcaagagtcaggagaagccgcgggagatcatggacgcggcggaagattatgctaaagagagatatggaatatcttcaatgatacaatcacaagaaaaaccagatcgagttttggttcgggttagagacttgacaatacaaaaagctgatgaagttgtttgggtacgtgcaagagttcatacaagcagagctaaagggaaacagtgcttcttagtcctacgtcagcagcagtttaatgtccaggctcttgtggcggtgggagaccatgcaagcaagcagatggttaaatttgctgccaacatcaacaaagagagcattgtggatgtagaaggtgttgtgagaaaagtgaatcagaaaattggaagctgtacacagcaagacgttgagttacatgttcagaagatttatgtgatcagtttggctgaaccccgtctgcccctgcagctggatgatgctgttcggcctgagcaagaaggagaagaggaaggaagagctactgttaaccaggatacaagattagacaacagagtcattgatcttaggacatcaactagtcaggcagtcttccgtctccagtctggcatctgccatctcttccgagaaactttaattaacaaaggttttgtggaaatccaaactcctaaaattatttcagctgccagtgaaggaggagccaatgtttttactgtgtcatattttaaaaataatgcatacctggctcagtccccacagctatataagcaaatgtgcatttgtgctgattttgagaaggttttctctattggaccagtattcagagcggaagactctaatacccatagacatctaactgagtttgttggtttggacattgaaatggcttttaattaccattaccacgaagttatggaagaaattgctgacaccatggtacaaatattcaaaggacttcaagaaaggtttcagactgaaattcaaacagtgaataaacagttcccatgtgagccattcaaatttttggagccaactctaagactagaatattgtgaagcattggctatgcttagggaagctggagtcgaaatgggagatgaagacgatctgagcacaccaaatgaaaagctgttgggtcatttggtaaaggaaaagtatgatacagatttttatattcttgataaatatccattggctgtaagacctttctataccatgcctgacccaagaaatcccaaacagtccaagtcttacgatatgttcatgagaggagaagaaatattgtcaggagctcaaagaatacatgatcctcaactgctaacagagagagctttacatcatggaaatgatttggagaaaattaaggcttacattgattccttccgctttggagcccctcctcatgctggtggaggcattggattggaacgagttactatgctgtttctgggattgcataatgttcgtcagacctccatgttccctcgtgatcccaaacgactcactccttaaattcacactttgccacttaactccagtgtggatgacagagcgagaccctgcctcaaaaaaaaaaaaaaaaaaaaaaaaaaaaaaaaaaaaaaaaaaaaaaaaaaaaaaaaaaaaaagaaagccacacttattcttttcagtaacctgctagtgcacaggctgtactttaggtacttaaaatatgcactagaataaatttgcaaggccctaaaatatcactgttatttttggagtaattcagtataggttcgtttaaaagagatttttataacttcagacatgcatcagtaggaaataacttgagaaattcatatggttatgttacaaattcatattctgttactacagtaaacgttaagagttttaaacagttaagattgtacaatttttcttcttttctatattacaagggccccagtgttaatgtcttagattttcagtatttgaacttatttttttaaattctgtcattgagataagaataattcaggtagcatctgaaattttaatgaatgtataattggcatatcatggaaaattaaccagaaagtatcagttcttaaaagttatgcctagaaattatgtaaagctaaactactggttagaaagtattcagtgtaatattgtattaatttgttaaattctaaacttgaatttcaataaaattttaaagct

SEQ ID NO: 405 - protein, 500 aa, Homo sapien
MPSATQRKSQEKPREIMDAAEDYAKERYGISSMIQSQEKPDRVLVRVRDLTIQKADEVVWVRARVHTSRAKGKQCFLVLRQQQFNVQALVAVGDHASKQMVKFAANINKESIVDVEGVVRKVNQKIGSCTQQDVELHVQKIYVISLAEPRLPLQLDDAVRPEQEGEEEGRATVNQDTRLDNRVIDLRTSTSQAVFRLQSGICHLFRETLINKGFVEIQTPKIISAASEGGANVFTVSYFKNNAYLAQSPQLYKQMCICADFEKVFSIGPVFRAEDSNTHRHLTEFVGLDIEMAFNYHYHEVMEEIADTMVQIFKGLQERFQTEIQTVNKQFPCEPFKFLEPTLRLEYCEALAMLREAGVEMGDEDDLSTPNEKLLGHLVKEKYDTDFYILDKYPLAVRPFYTMPDPRNPKQSKSYDMFMRGEEILSGAQRIHDPQLLTERALHHGNDLEKIKAYIDSFRFGAPPHAGGGIGLERVTMLFLGLHNVRQTSMFPRDPKRLTP

SEQ ID NO: 406 - DNA, 2271 bp, Homo sapien; identical to SEQ ID NO: 404

SEQ ID NO: 407 - protein, 500 aa, Homo sapien; identical to SEQ ID NO: 405

SEQ ID NO: 408 - DNA, 2977 bp, Homo sapien
gcaggcgctgcggccgtcccgggccgtgactcctcctttcccccgccccgcctccgttcggagagccggcgggcgggcgcctctcggccaggaagcgcctcttggacgcgtgtgaccgatgcccagattgcacgaccacttctggagctgctcctgtgcgcacagcgcgaggcgccgaggccccccgcgagccagcgccgcggggctggcggccaaggttggggagatgatcaacgtttccgtgtccgggccctccctgctggcggcccacggtgccccggacgctgaccccgcgcccaggggccgcagtgctgcgatgagcggccccgagcccggcagcccctaccccaacacctggcatcatcgcctgttgcagaggagcctcgtgctcttctcggttggggtggtcctagccctggtgctcaacctgctgcagatccagaggaatgtcactctcttccccgaggaggtgatcgccaccatcttttcctccgcctggtgggtccctccctgctgcgggacagcagctgctgttgttggcctactgtacccctgtatcgacagtcacctcggagaaccccacaaatttaagagagaatgggccagtgtcatgcgctgcatagcagtttttgttggcattaaccacgccagtgctaaattggattttgccaataatgtccagctgtccttgactttagcagccctatctttgggcctttggtggacatttgatcgttccagaagtggccttgggctggggatcaccatagcttttctagctacgctgatcacgcagtttctcgtgtataatggtgtctatcagtatacatccccagatttcctctatattcgttcttggctcccttgtatatttttctcaggaggcgtcacggtggggaacataggacgacagttagctatgggtgttcctgaaaagccccatagtgattgagtcttcaaaaccaccgattctgagagcaaggaagattttggaagaaaatctgactgtggattatgacaaagattatcttttttcttaagtaatctatttagatcgggctgactgtacaaatgactcctggaaaaaactcttcacctagtctagaatagggaggtggagaatgatgacttaccctgaagtcttcccttgactgcccgcactggcgcctgtctgtgccctggagcattctgcccaggctacgtgggttcaggcaggtggcagcttcccaagtattcgatttcattcatgtgattaaaacaagttgccatatttcaaagccttgaactaagactcaattaccaacccgcagttttgtgtcagtgcccaaaggaggtaggttgatggtgcttaacaaacatgaagtatggtgtaataggaataatatttatccaaaagatttttaaaaatagggctgtgtttaaaaaaaaaaacaaaacaagaaaagcagcagtgattatagagaggtcacactctaagtggggtcgcggcgtggccacgcttcacggtcacgctcgtccgtcctgcagtggcgtgtttacatggtcacacgtgtgtgtatcaccagtgggtcaactgcttgtcattcctcccgtggcagtttgtgtagacaatcttactgagcaaaaggcaatgaaaagtcttggttcccacactgcgatatattggaattttcacctcagtttatgaagtttatttcgaaatccatagtcatctaagaatgaatacctgtctgccatgtatttcaatcttagtgagccaaaattgtttgtttgttactacagaatagagatgactgttttttgccacagccctatggaatttgcaatctgtgattgccttgtaaaaaggagagtgcatatggcactgcattaaacgtgtggtgtttctagtcaatgatattggtgagcacaatgtattcatttaatggcatagaccataccagacctaatttgcaagtattgggtcttaaacttcaagtgcaatgtatatgaaaaccaatctgagccttgtatctcttaaatatttattttttttaacgtgtgagatgttcgagagaaggttctccattcatttcagtgctgcctggaggaaactcggcaatgatttctttcagttgtgaagttcctttcgtgttacaccctccactgaaccctcaaccttcgaaatactccagttttgtgggtttggtcatttttacttataaatttacctttttgtattttgcaatttacatgtgtttggtttgttttaaattctgtgaaagtggcttgattaaaagactccttttaaatggaagccaccagtcagcagaatggaagcttagaggaacttgcctgtgagcgctggtctttgtgtttggttttgtgatgtaacgatctttgctggggttttttgctttgttttgagggaaatgtcttggagtaaattttaagttcctggagttaatttgttttacaggaattttgttttttaaaaaaataggatcattctgaactttggaatgacccccttatatattttctgaaaatgaaaacagttacatgaaaaaaatttccaatgaagatgtcagcattttatgaaaaaccagaagttattagatgaaagcagcgagtgaatctttaaaacagacttgatcacgcacacacaataagtctttctctccgaaaccggaagtaaatctatatctgttagaaataatgtagccaaaagaatgtaaatttgaggatttttttgccaatagtttatagaaaatatatgaaccaaagtgatttgagtttgtaaaaatgtaaaatagtatgaacaaaatttgcactctaccagatttgaacatctagtgaggttcacattcatactaagttttcaacattgtgttctttttgcattcattttttacttttattaaaggttcaaaccaaaaaaatctatgtcggtgcggagaaagaggtaatgaaatgccaggaattcggatatcaagct

SEQ ID NO: 409 - protein, 241 aa, Homo sapien [sequence omitted]

SEQ ID NO: 410 - DNA, 12003 bp, Homo sapien
  Unsure 7240: Unknown base
agctcacagtggggtcgaggagacacagcacaggcttctgaaaggtgccctgtccattagggagcaccccatttacagatgggtcatccttcagctcactagtttcccagcgcatgacagtgggtagcttttttttttcctattataaacaaatcttcgatgtgactgcgatgatctacggatgatctacgtatctggttgtgtgatcctcaagcacttatgcaaggtggagtgtaaacaatggccaagacccaaactgcaatgttccctgaagtccaacctgcttggagtccttgggaacgtgtacaatggttaacaggcttgagaggagtcagctgggagagtgagagcgagactgccctgcagaggggccgctgaggatggacccctgtaggccgtccacacccaccacgcgtgtcatcctcaggaaatgcaaccggatgctcggaatttcgcccctaaagcgactcagggcagtctcagctcaggaagacttctttttttgaccttctggcttaaagccacaaccccaggctgaggatgccacatcaacggcgtttcctcgccacgctgcaggcgtgactcacgtttctaagcctgcagggtccccgggccaagcgcggctactgagagcacagcgtcctccctcagcccctgctcatctgcacggagcaaagccgcagctttctctgctgtcagcgctttatacgactcggatgtaggctctgagcgggcacgggcccgccctcagacggcgacccgaggggcaaacaggatggaggcgcgctcccttggaggctgtggtctcgattttatctgctcctgggtggtgcgggtggtttgctctctaggcgtgagcaaaggccacaaggggcccgaaaaaatcacccaaggatgcaagcccgccattgcgctgagcaggggcctccccgccgccagagcccgcgcccctccagggaggcccgcgcgatcgagacccgccgcctcccgaccaggcgcgggacaccaggcgaggggagacaggagccgggaggggaggggccgggcccgcaaccccacccagtcctgcctccgcctcctcccggtaggaccgtcccctcccaggccccagctccgcggccgcctcaccagaccgcgtgcggacgggctcgcgggcggggcggggcaagctcaggccacgcccctgggcggtgcgcgcgggcggtgggtaggccgggcaggctcacgtgatgcgggccccgcggcccgcggatataaacccgcgcgcccgccaggcgctgcggccgtcccgggccgtgactcctcctttcccccgccccgcctccgttcggagagccggcgggcgggcgcctctcggccaggtacgcggccggctgggataggggtcgcgggcgggctttggtcgcgcagcagccggtcctccccggaggtaggcgggcgcgggccctgttgggtctttgggacgcgggtcccgctggggccggggatgctcctctctgtgagcgcggtcccgtccccccctgtccccgggcgggcgcacgggggtctaaccttggggggcggcgctcccgcctgtcccgggtgccggggttcgcgtcccgcggggccttcctcgctctttgtctcttctgagtgaacttgatgacccccttcttccaggaagcgcctcttggacgcgtgtgaccgatgcccagattgcacgaccacttctggagctgctcctgtgcgcacagcgcgaggcgccgaggccccccgcgagccagcaccgcggggctgccgcccaaggttggggagatgatcaacgtttccgtgtccgggccctccctgctggcggcccacggtgccccggacgctgaccccgcgcccaggggccgcagtgctgcgatgagcggccccgagcccggcagcccctaccccaacacctggcatcatcgcctgttgcagaggagcctcgtgctcttctcggttggggtggtcctaaccctggtgctcaacctgctgcagatccagaggaatgtcactctcttccccgaggaggtgatcgccaccatcttttcctccgcctggtgggtccctccctgctgcgggacagcagctggtgagtacccctcctggttcttctggaagtaaaaagggtgtcttttcggttgaaagtacttttcagcctataagaaacatgcatttgaaactggaactatccacagattgaaagtgtgcatctccagtcttgggatttagagaaatgaaggaggggtagagaggacctggcacccccgagggcgggttcgggacacagctctctgaagtttgaggaagcacagtgatggagatgaggcagggagataattggctgttcaagcaggtgctgtgccaagttgactgagggcccttccctcctggcgtccgggtacagccccagctgtcatcccgcgccagccgccccggattggccgcctggggaactggtgagcagcgggactgaaaggccattggtcgcggcagcaaacatgctaccctgctggataactgaaaacaaacccgtcacatgggttcaggaggcggttgccaggggagcaacttctcagcacttccttttgccgggtcgctgagtaaactgtggtctgaagccaaaccgcctacaccctgaactgttagagctctgtagattacgttcttaagaaaagataccccttacggcgtttagattttcgtacacccaagcagtagcatagatgctgtacaacgtaacactgagtcagtctgaactgtggacacggggactgctgggtgtgtgtactagactttcttggctatcattgacccgcttttatagaaatgttgagttgatcttggctcagcagatcacttactgctcctgtagtcacacagcatttgtttatttaacgagcttgtcgggtgctttctgcaacctcaactctataagctgttgaaatgttaatccaaaagtgagcaccacaagcccctatccttaagcagcttagagtctggtggggaaaacaaaccagtatgtcagtgactccagtgcagggcagggagcatcctgtttgctttgtggctgacgcctgccagctgactgctgaccataggcttcagatgctttgctgtgttcattccttacagcaatgccatttgtagcttcatttatagatgtggcaactgaatcacagttgaagtcaagcccaaggttggcgcaggtagaaagggcccaagccatcggtggtagactgctccttcttgccatggtagggtgtgtctcctgcactgtggaaacacattgcctcagttgactcactgaaaacagcaagcagcagagaggtttgtagcagattaaacagggggctccgtgttgaagaactaggacaggtgtctgtaactaaaaagtagtgggtagaatgttttcatatgtgttctcggagggacgggttcctctgtcgtttgtcgaaacacattatgtggctgttctaagtgaacactttttgagaacgatatctagagttgaaattccatgtttcatatacagttggcagaatagtttctttcctttaaccctaaaacttgatcttagaaatgagataggtagccttcagtagttgtaattggatcctcaagggtttctaggaatatctggacaatttctcatactctcatattctacttttttttaaaccatcagccaagagcataagtaaaatttttcatagtatgttttttacctatttatttattaagctatagtgaggtaaagttaatttggggggtccatttttcagaactccaaaattagaacctgatgaagtataataaattgaaaacaacattttttatctgaatgtttgatgcaaactgtgtttcttgtttctcagttgaacctaaaaggtatatttctttcatactagactgaggtgaaacaattgcagggttctcaagagccctgggacacagtgacccttgtgtcccagcatccaaccccacggggcggcaccccactcccccctacagacattcattcctgccttcatctttggcattttacttctcttgggggaatgccattccttcccacctgtccaaattccaagttcgtgtctataaagaataactattccagaccacagtgatctctttctctgtgtcccagttacataatccttataattttacacatgagaaaacaaacatgcagagccacgtcccatcagagggcaagctgggatttgaggctgagttttctcttcttggtctggtgttctttccgcagcttgaggcttgaccatgcgggaaccagatggagaataagcgaagcctgtgtggggctgtctcgccccgtacttgcccatgtgcatgtgtgcacagtaggtgctcagtgcctcgtacagaacatgctagaacccccgaaaatcaactccagggtcactctaggagcatgtgacccagactgtcaaagtcacatcagcaaatatgtatctcatcacgtgccccaggcccagtactgggtggtggggaggagtgtcaagagctgtgatgtgacagggggtggacagatgctaacctttttattgtaagatagaaatcacaccggatgaaaagacaaggtggaactacatagtcatttaagttctgtgtgctttaggcaaatgtggatattaaatataaggttacaatattgctcatattaatatgaataatccctgcttgattccttcctgtgtttactgagacatgttcaactacactaaataatagtgatttttaaaaaacttttcccaaacagtacaattttgtgggagtggtactcaaagagaacaagaatataaaatcactctgaagttatagctgataattttttctaggaaaaggactggtttgagtaatgtactgtgttactaatgaccacgttggaaattctggaacttggaatctgctgtattctaacattggcaactttttttaaaacagctgttgttggcctactgtacccctgtatcgacagtcacctcggagaaccccacaaatttaagagagaatgggccagtgtcatgcgctgcatagcaggttttggtggcattaaccacgccagtgctgtatccttaattttctgtgctacgtccagagtatcttcttaggttatatattgaagcattttgttttgttatatactcaaatgactccatgtcataatacagacatgatggtggtacctacccatttcagattactaaaaagagaaagaagaatggggctatcgatgacttcatagcaaaatatattgttttatggtcaaaataaatataaaattatttaaatttttatatatattaaaaaaatttttaaaaatatatataaaatatataataaatatatatttatataaatatatataagcactccatatatagctttcagcaagttcattctcatggctaagtttctgactcagcgatggcagggagatttcaggtgatcttaatgattactgtaacctgcatccaacaaatcctttctttagctcattacacaggctttatggacagtgaattatctgtgggacaataataaaatacccatgtttttaacccttgtggttttacgtttttttatcttaataagagtcaccgaacttttccttaacttttatatcaccagaaattggattttgccaataatgtccagctgtccttgactttagcagccctatctttgggcctttggtggacatttgatcgttccagaagtggccttgggctggggatcaccatagcttttctagctacgctgatcacgcagtttctcgtgtataatggtgtctatcagtatacagtaagtgtgtgttttcaaatattggctttggaaagcttagatattttcatattttatttgttttttatatagaatgatacagatttaggcatgaaattctcaaaaatgctgctatccataacttaatgtaacgcaaaggaaaaccaagtagtagcagttacaaccaaacaaatatgaacattcgtaacattggatggttgatatgcgttctgcatatccccactacagagaatctgtgatgtagaattgagccaggtgaaattgactgctaaggtacagtttcttttctcgctccaggtatacgtccccagatttcctctatattcgttcttggctcccttgtatatttttctcaggaggcgtcacggtggggaacataggacgacagttagctatggtaagtgaaatgatcatattatcttctaaaacttgcttctctttaccttgatagaatgactttacatgatacattcaaatttgcgttcatatattctggttcagacttgagtgacaactactgagaaaagcttggagtccggatcaagcaacctcccgcttcagcgtcccgagtagctgggattacaggcacatgccaccatacccggctaacttttttgctttttgtggagatgttatctccctgccttgtccaggccgggctcgaactcgtgggctcaagccatcctcccaccttggcctcccaaagcactgggattataggcgtgagcctggccttgctttttttaatattaaaaatctggtcggatggtcccacatggaaatagtatgttgttttcatgcattcgccatcatccccgttaatagtcttcccaaaggagagctggcaacctccatcattgctttcttgctttgagatttttgtttcgggaactctctttgggagagaattccctaagaaggtttttaaagaataaaattgtcctcaaccagattgactaattacacattataactacaacttgaataacatttaaagagttgggttatttcttgtttgataggttggatgcttgttatatgtcaagcctttttaaatcggttttaagaaataagcattattttggtggaggtagaaatttcacaacattcataagttctaaacatctagaaatggttggaggaaacattttcgttttgaagatagtttcattaagtaatccctgctgtgctcctttgcttacagaaaaaaatgttaaagataactccccataggatagttggtgtaattataattctccttacttcagctttctcttcatcctttttattctttaagcttgggggaaaatgtttggatgttctcgtatcttaaaactggaggagagaggctgggcgcggtggctcacgcctttaatcccagcactttgggagctgaggcggncggatcacgaggtcaggagatcgagaccatcctggctaacacagtgaaaccccgtctgtcctgaaaatccccgaaaggaaaaaaaaaatacccaggcgtggtggtgggcacctgtagtcccagctgcttgggatgctgaggcaggagaatggcgtgaacccgggaggcagagcttgcaatgagccgagattgtcccactgcattccagcctgggtgacagagcaagactctgtcgccgaaaaaaaaaaaaaaactggagaagagagatcaccaccttaatccccttccctactgggctatcacatgaaactgagctctgaggttctaagcctaacccgcctaccactgtttttattcataaatacttaaatccttacctctggatcccaactgttactctttttttcacttcaaaatttgcaaactcatttctatccatcaaaccccggaaatggcccaggggcttcacagtgcagtcccctccctcctgctgcatccgttcctcaggctgtgccccaggttgcattcgtggtgcgtgttttctcccagggcagccttccccacattccactcttgtcatactgttgactcacaaaatggaagtggctgaatgttccagggatagtgtctaagagctattggtttaaggttgaaacctacaccaagtaaggctttgtgaagggagatgacgagagtgaagttgttgacagtctgaaggtgaagagattccgagggtcagttcagcaccgggaccagacccgcccagatccagggtaatttgaggtctgtgtttgggtgctgatggttttggccagtggactccacaacctctccttcttagctgtctcaggtctcttcagatgccttgggtcttaacttatgcttccctcccttaagaagaaacatagttaattggcaagaataaccatgctcaaaaagttacaagttgggtttgggttcaagttatatgggcttcctagcttttctatgtggtatttccccccacacatgccgttgtcctttgtgtccgaaaatacagcagaaacatttgttatcagcctgttacggtttttttgtttgcttgtggtttgtttttatttgtacttttttggagacggagtcttgctttgtcacccagactaaagtgcagtgggacaatcttggctcactgcatttgaaccgtctcccaggttcaaatgattatcctgcctcagcctcccaagtagctagggatcacagggcgcccaccaccgcacctggctaatttttctgtttttagtagagacggggtttcgccacgttggccaggctggtctcgaactcctgacctcaggtgatccacctgcctctgcctcccaaagtgctgggattacaggaatgagacaccgcgcccggcccagtctgtatgtttaaaaaggaaaatgagtctgtaaccatcatttattagaacttgtagtatgttgctgtgtgtagcttcaagtccttcctcaagagtaagctgcaaactgccaacagaaatcaagcctgtcctgttgacactgcccggccccactgggacacctggagggagagtcccccccacctcagtgtcagattggaatttgatttggcggtcctgtttgtgattgacccaatacagctgctaatgataataatactattattgttattgagggtttacatttgttgggctcttactgctgcacaggaggcattgtgctgagcgtttccattgttaggcagtttagtcctcatacacaagtctttggagtagaaactattattagcccatttctaaaaggggaattagcagcttaggaagattaaacagcttgaccaggtgggtggcagaggtcgacgttgcaagccgacttctcattagcataccacactgccaataccaacacaatgctcgcactgtctcacctggaagcaggttacagcagcctgcgttggtgtctgggttgccatttacaatgtgccaccattaggcaacactgctggaagtccctgtgccacgtgtcaggtccgccccggcctggctgtcgcccgcctctggcgtctctgccaggcctcactggggtctctgtcgaccagggattctaaaagtccacttcccatctatttattcagtacattagggaacagggagtcaaatttttgttggcccaagtttcctttcccgggtttgcttgcccaagaagtttgcccgttttttgttttccccccccccacggtttgaataagaaccccctccccagttgtgcaaaaacccaagaaacttgggcagttccttttcacctttgttccaattcccttgaaagcattgtattgtttccctaaggaagtccttaattgtgttttgtcccccaggggtagtaccctggcaataccctggttgactccaacccagactcatgactttcttacctgccctggttttgttcaagatgagaggctcttttggcctgttttctggatgagtaatctccgtcattgctgaagtgaggagctcagctccttcctcttaaagtgagtggagggcaattaagtaacgtgggaagtcacgattctgagggaaaaaaattctgtatggagtttctcttttgccctttagcagaagctccgtgacctcaggaaggtcatttaatctctctgtctttgcttcttcatcagtgaaatactgttctccattaagaatttaccctgaggtgcctggtcatagtagtaactgtagtgtctacctctcagaagctctgtgagggtcagatgaggaagaacatgtagaaaggatttcccaactgtgaagctctgtgtgaattgagggcacacagagcttcagtattacaaagcatgacctatttccaatgtctgtttcaacaaactgctggtaaggtgggttataacacaggcatcagatactaataaaggtttgtggcagaaacctcccttcagataaaggttcaatcccttaaattgcagttagaactttcaggaacctatcataccctaagcatcaccatgctttgataaaattgggtgtttcctttatatagatattaatttagttaaactttcaccaagtcttacacttacatggtggctttaataagggcctcagcagcgtaatttcacctgaggcagagaattatcctaattttgcaggtgagagctgtggctcacggggccagagccatgaagacggcgcaggggagctgggagagctggcctcggtctccagttctctgcacatgtcccacctctcaatcttgttgcttcagtcaaagaaagtgtcaatatttcccatgttaggacctacttaattggtaattaaaatatttatacatttagtgctaattttctctttccttttttttttcctttctacacatagggtgttcctgaaaagccccatagtgattgagtcttcaaaaccaccgattctgagagcaaggaagattttggaagaaaatctgactgtggattatgacaaagattatcttttttcttaagtaatctatttagatcgggctgactgtacaaatgactcctggaaaaaactcgtcacctatctagaaaagtcaagaatagggaggtggagaatgatgacttaccctgaagtcttcccttgctacccacactggcgcctgtctgtgccctggagcattctgcccagcctacgtgggttcagtcaggtgccaccttcccaagtattcgatttcattcatgtgattaaaacaagttgccatatttcaaagccttgagctaagactcaattaccaacccgcagttttgtgtcagtgcccaaaggagggaggttgatggtgcttaacaaacatgaagtatggtgtaataggaataatatttatccaaaagatttttaaaaatagggctgtgtttaaagaaggaatcaaaacaagaaaagcagcagtgattatagagaggtcacactctaagtggggtcgcggcgtggccacgcttcacggtcacgctcgtccgtcctgcagtggcgtgtttacatggtcacacgtgtgtgtatcaccagtgggtcaactgcttgtcattcctcccgcggcagtgttgtgtagacaatcttactgagcaaaaggcaatgaaaagtcttgggctcccacactgcgatatattggaattcccacctcagtttatgaagtttatttcgaaatccatagtcatctaagaatgaatacctgtctgccatgtatttcaatcttagtgagccaaaattgtttgtttgttactacagaatagagatgactgttttttggcacagccctatggaatttgcaatctgtgattgccttgtaaaaaggagagtgcatatggcactgcattaaacgtgtggtgtttctagtcaatgatattggtgagcacaatgtattcatttaatggcatagaccataccagacctaatttgcaagtattgggtcttcaaacttcaagtgcaatgtattatgaaaaccaatctgagccttgtatctcttaaatatttattccttctaacgtgtgagatgtcccgagagaagggttctccattcatttcagtgctgcctggaggaaactcggcaatgatttcttcagttgtgaagttcctttcgggttacaacctccactggaaccctcaaccttcgaaatactccagttttgggggttggggccatttacttataaatttaccgccgggtttttggaatctacatgtcttgggggcgggctcaaattcttcgaaagtggttggattaaaa

SEQ ID NO: 411 - DNA, 1549 bp, Homo sapien
tggcagtgcgcctgcgccgcgtcggcgtgcggaacgccgcggtgtctcggcgcctctgcgcgcgggaagatggcggaacaggctaccaagtccgtgctgtttgtgtgtctgggtaacatttgtcgatcacccattgcagaagcagttttcaggaaacttgtaaccgatcaaaacatctcagagaattggagggtagacagcgcggcaacttccgggtatgagatagggaacccccctgactaccgagggcagagctgcatgaagaggcacggcattcccatgagccacgttgcccggcagattaccaaagaagattttgccacatttgattatatactatgtatggatgaaagcaatctgagagatttgaatagaaaaagtaatcaagttaaaacctgcaaagctaaaattgaactacttgggagctatgatccacaaaaacaacttattattgaagatccctattatgggaatgactctgactttgagacggtgtaccagcagtgtgtcaggtgctgcagagcgttcttggagaaggcccactgaggcaggttcgtgccctgctgcggccagcctgactagaccccaccctgaggtcctgcatttctcagtcggtgtgtaatcacgttccagggcccaaagcccagctctttgttcagttgacttactgtttcttaccttaaaaagtaattgtagatggaaatcagttgtgtttggcaggagaatcaataaaaatctttgattcagacagcttatggggtattttaagcattcttagactagttgaacatctcactttgccccagttacaaaaatagtagaacaagcaacataaaacaatgaaggaaaacctcacttgaaggcccaggtcaacatctaagcctgttgagacttagataatcgagtctacctcttcagtaggtttgtgtggatggcctggagggcaggtgccctctgctccccagtgctacctctctcttccctagggccttttgtggattgacagtagtcccctccgtaggagctcacagtctagattagaagtgttttaatttctacacacccatagtgcacacttgtatattgaaaagatagggaagagagaaacatttatggaatcagtcgttggcaccttcaatacttcatgatttttgtcgagtttacttcatgaggaggtcagcccattggctcccatctgaaccactttgcctctgaaacttaattacatccagaaagaaggacacttgtatgctagtctatggtcagttgaggaatatgactgtttttatatgcacatgtaacccaaatgtccaatataaattggcttattttttaaaataattttaaaagttgggaaaagtgttattatttggcatgcttaaatattgaataagtattcttcatcagcatttaataaatgtataggcagatgtaaggtaatttctgtgtattttgagataatgtcaaaatcatgaatatttcaaaataaactggggagttataaaaatacaactagagatataaaaaaaaaaaaaaaaaaaaaaaaaaa

SEQ ID NO: 412 - protein, 158 aa, Homo sapien
MAEQATKSVLFVCLGNICRSPIAEAVFRKLVTDQNISENWRVDSAATSGYEIGNPPDYRGQSCMKRHGIPMSHVARQITKEDFATFDYILCMDESNLRDLNRKSNQVKTCKAKIELLGSYDPQKQLIIEDPYYGNDSDFETVYQQCVRCCRAFLEKAH

SEQ ID NO: 413 - DNA, 1345 bp, Homo sapien
acttggccttacactccgctcggctcaccatgtgtcactctcgcagctgccacccgaccatgaccatcctgcaggccccgaccccggccccctccaccatcccgggaccccggcggggctccggtcctgagatcttcaccttcgaccctctcccggagcccgcagcggcccctgccgggcgccccagcgcctctcgcgggcaccgaaagcgcagccgcagggtctctctaccctcgagtggtgagtatcgccgaagtgggcattcgcggtgtgcgctgccctggagtcactggggaacgacccgactccagagcctcgacctgacctgtctcctgttttgtctccccttagtccggcgccagctgccagtcgaggaaccgaacccagccaaaaggcttctctttctgctgctcaccatcgtcttctgccagatcctgatggctgaagagggtgtgccggcgcccctgcctccagaggacgcccctaacgccgcatccctggcgcccacccctgtgtcccccgtcctcgagccctttaatctgacttcggagccctcggactacgctctggacctcagcactttcctccagcaacacccggccgccttctaactgtgactccccgcactccccaaaaagaatccgaaaaaccacaaagaaacaccaggcgtacctggtgcgcgagagcgtatccccaactgggacttccgaggcaacttgaactcagaacactacagcggagacgccacccggtgcttgaggcgggaccgaggcgcacagagaccgaggcgcatagagaccgaggcacagcccagctgggctaggccggtgggaaggagagcgtcgttaatttatttcttattgctcctaattaatatttatatgtatttatgtacgtcctcctaggtgatggagatgtgtacgtaatatttattttaacttatgcaagggtgtgagatgttccctctgctgtaaatgcaggtctcttggtatttattgagctttgtgggactggtggaagcaggacacctggaactgcggcaaagtaggagaagaaatggggaggactcgggtgggggaggacgtcccggctgggatgaagtctggtggtgggtcgtaagtttaggaggtgactgcatcctccagcatctcaactccgtctgtctactgtgtgagacttcggcggaccattaggaatgagatccgtgagatccttccatcttcttgaagtcgcctttagggtggctgcgaggtagagggttgggggttggtgggctgtcacggagcgactgtcgagatcgcctagtatgttctgtgaacacaaataaaattgatttactgtctgc

SEQ ID NO: 414 - protein, 193 aa, Homo sapien
MCHSRSCHPTMTILQAPTPAPSTIPGPRRGSGPEIFTFDPLPEPAAAPAGRPSASRGHRKRSRRVSLPSSGEYRRSGHSRCALPWSHWGTTRLQSLDLTCLLFCLPLVRRQLPVEEPNPAKRLLFLLLTIVFCQILMAEEGVPAPLPPEDAPNAASLAPTPVSPVLEPFNLTSEPSDYALDLSTFLQQHPAAF

SEQ ID NO: 415 - DNA, 1810 bp, Homo sapien
ctcagttagcggtggagaggcagtatgtccggttcaatggcgactgcggaagctagcggcagcgatgggaaagggcaggaagtcgagacctcagtcacctattaccggttggaggaggtggcaaagcgcaactccttgaaggaactgtggcttgtgatccatgggcgagtctacgatgtcacccgcttcctcaacgagcaccctggaggagaagaggttctgctggaacaagctggtgtagatgcaagtgaaagctttgaagatgtaggacactcttctgatgccagagaaatgctaaagcagtactacattggtgatatccatccgagtgaccttaaacctgaaagtggtagcaaggacccttcaaaaaatgatacatgcaaaagttgctgggcatattggattttacccatcataggcgctgttctcttaggtttcctgtaccgctactacacatcggaaagcaaatcctcctgaggaggccttgctgaagttagaaagtgcatccactttggggcgaaaactagagacttgcttgggggctgcagaagtgccctctcctcgaatcctgccagttgcattcttcccccttggagccaagacgattggccagacatcacctcagatctgagaccagcgtcttccatctctcagagccttactcccaaagtacctgctcactgttccgtgttgaacaattgccggtgtttcctctcttcactggtttccatgagtacccttatatttcacaactttctgttcataagttatagtgacattgctctttggtaaaaatgcctgctttccaatactttgattgcatattagacattcttaacagggcggcagtctagtgttgaaagttttatttttccatttttcttttaagtaaattttttttaaaaaattctgatttagggctaggtgtggtggctcaggcctgtaatcctggcactttgggaggccaaggtgggaacatcgcttgaggccaagagttcaagaccagcctgggcaacatagcgagacccctatctgtattaaaaaaaaatctgatttaattcttttatttatcataaggggtttaattcctgaagtaaaggtttgcacctattaaacttaaaactgccaaatgatttttgttcttttatgtgcgtgataaaaatacaaagaatggtgtggccacctcctccctttcaagctagggcagcaggtagctcttcccagcccctgagcccagccccttcccaagtggtgccggacaaaaaactacatggccctttcgtgtcttgggggtggaaagggagggatgaattggggtgatagaaccctggtgaattcagagtaatctttctttagaaaactggtgttttctaaagaaacaggataggagtttagagaaggcaccaaagctttcactttggtttggcaccagtttctaaccatctgttttttctaccctagctatcttttattggtaaaatataaatgtataattatgtttgtagagctttaccaaggagtttccctcctttttttgtttgttgattagcaaatttttgattctccattttccaaaagtaagagactccagcatggccttctgtttgccccgcagtaaagtaacttccatataaaatggtatttgaaagtgagagttcatgacaacagaccgttttccatttcatctgtattttatctccgtgactccaacttgtgggtttgttctgtttttccatgagaataaaatactggcggttttttttcaaaaaaaaaaaaaaaaaaaaaaaaaaaaaaaaaaaaaaaaaaaaaa

SEQ ID NO: 416 - protein, 146 aa, Homo sapien
MATAEASGSDGKGQEVETSVTYYRLEEVAKRNSLKELWLVIHGRVYDVTRFLNEHPGGEEVLLEQAGVDASESFEDVGHSSDAREMLKQYYIGDIHPSDLKPESGSKDPSKNDTCKSCWAYWILPIIGAVLLGFLYRYYTSESKSS

SEQ ID NO: 417 - DNA, 983 bp, Homo sapien
gtggaattcatggcatctacttcgtatgactattgcagagtgcccatggaagacggggataagcgctgtaagcttctgctggggataggaattctggtgctcctgatcatcgtgattctgggggtgcccttgattatcttcaccatcaaggccaacagcgaggcctgccgggacggccttcgggcagtgatggagtgtcgcaatgtcacccatctcctgcaacaagagctgaccgaggcccagaagggctttcaggatgtggaggcccaggccgccacctgcaaccacactgtgatggccctaatggcttccctggatgcagagaaggcccaaggacaaaagaaagtggaggagcttgagggagagatcactacattaaaccataagcttcaggacgcgtctgcagaggtggagcgactgagaagagaaaaccaggtcttaagcgtgagaatcgcggacaagaagtactaccccagctcccaggactccagctccgctgcggcgccccagctgctgattgtgctgctgggcctcagcgctctgctgcagtgagatcccaggaagctggcacatcttggaaggtccgtcctgctcggcttttcgcttgaacattcccttgatctcatcagttctgagcgggtcatggggcaacacggttagcggggagagcacggggtagccggagaagggcctctggagcaggtctggaggggccatggggcagtcctgggtgtggggacacagtcgggttgacccagggctgtctccctccagagcctccctccggacaatgagtcccccctcttgtctcccaccctgagattgggcatggggtgcggtgtggggggcatgtgctgcctgttgttatgggttttttttgcggggggggttgcttttttctggggtctttgagctccaaaaaataaacacttcctttgagggagagcaaaaaaaaaaaaaaaaaaaaaaaaaaaaaaaaaaaa

SEQ ID NO: 418 - protein, 180 aa, Homo sapien
MASTSYDYCRVPMEDGDKRCKLLLGIGILVLLIIVILGVPLIIFTIKANSEACRDGLRAVMECRNVTHLLQQELTEAQKGFQDVEAQAATCNHTVMALMASLDAEKAQGQKKVEELEGEITTLNHKLQDASAEVERLRRENQVLSVRIADKKYYPSSQDSSSAAAPQLLIVLLGLSALLQ

SEQ ID NO: 419 - DNA, 2214 bp, Homo sapien
gttgactggaggcggaggttgcagtgagccgagatcgccccactgcactccagcctggtgactccgtctcaaaaaaaaggggaggggggcgggggagagttgaaagcttaatatgtactttgggggctattaaagcaaacatttcgactaaaggggcgaatcctcgaattgtgcgatcaagcacccgagaggagagttggggggggtcaggaggggtgggggctccagggaacgcccgggggcctgggccggggtctcgcggggcccttccggaaggatcgcggcccccgaaggtgggcgtcccgcggggctccagtctccaggacgttccgggaggctccgcgctctgggaggccggctgcgtggggtccccgcgctgcagccgcagaggccccccagggccgcggttcccggagcgggaaagtcccgcgcgggggcggtggcctcgggggcgggacggggcgggggcgggggcgcgggcggccgagccgaatcccctccaccgggacgccccgctgccgctcgggaagaggcgggccctgcgcgccctgcgctcgccatggcggtttgggcggcgacgtgagcggctccgcggaccccgagcggggccccggccgcgacctgagccgccgccgagcgcccggggccatgcgaccgacgctgctgtggtcgctgctgctgctgctcggagtcttcgccgccgccgccgcggccccgccagaccctctttcccagctgcccgctcctcagcacccgaagattcgcctgtacaacgcagagcaggtcctgagttgggagccagtggccctgagcaatagcacgaggcctgttgtctaccgagtgcagtttaaatacaccgacagtaaatggttcacggccgacatcatgtccataggggtgaattgtacacagatcacagcaacagagtgtgacttcactgccgccagtccctcagcaggcttcccaatggatttcaatgtcactctacgccttcgagctgagctgggagcactccattctgcctgggtgacaatgccttggtttcaacactatcggaatgtgactgtcgggcctccagaaaacattgaggtgaccccaggagaaggctccctcatcatcaggttctcctctccctttgacatcgctgatacctccacggcctttttttgttattatgtccattactgggaaaaaggaggaatccaacaggtcaaaggccctttcagaagcaactccatttcattggataacttaaaaccctccagagtgtactgtttacaagtccaggcacaactgctttggaacaaaagtaacatctttagagtcgggcatttaagcaacatatcttgctacgaaacaatggcagatgcctccactgagcttcagcaagtcatcctgatctccgtgggaacattttcgttgctgtcggtgctggcaggagcctgtttcttcctggtcctgaaatatagaggcctgattaaatactggtttcacactccaccaagcatcccattacagatagaagagtatttaaaagacccaactcagcccatcttagaggccttggacaaggacagctcaccaaaggatgacgtctgggactctgtgtccattatctcgtttccggaaaaggagcaagaagatgttctccaaacgctttgaaccaaagcatgggcctagcccactggctccctggaagagatcaagccatcggagctgctagagttctgtctggactttccagagaccagtattcccttttgctgcctctaaaaggcctgtccctgcagacatgagagacagcaggtctcatgggggtgacaagcttttttttttttttcttaaagaattttcaaaatcaaattccagaatgattttacggagatatcccaggaaaattaaggcttctcttaaacactaaaaaggcatgtaattgcttgttagcaaaatggatatgacacatctctgatacttttttcattattggttgggctgagcagtcagaagacctggtcgtcgtcttgactttggcaaatgagccggagccccttgggcaggtcacacaacctgtcccagcgagggacactgagtggcccttcatgtacatccatggtgtgctggcttaaaatgtaattaatcttgtaaatatactcctagtaatttaagattttgtttttaaactggaaataaaagattgtatagtgcatgtttttt

SEQ ID NO: 420 - protein, 337 aa, Homo sapien
MRPTLLWSLLLLLGVFAAAAAAPPDPLSQLPAPQHPKIRLYNAEQVLSWEPVALSNSTRPVVYRVQFKYTDSKWFTADIMSIGVNCTQITATECDFTAASPSAGFPMDFNVTLRLRAELGALHSAWVTMPWFQHYRNVTVGPPENIEVTPGEGSLIIRFSSPFDIADTSTAFFCYYVHYWEKGGIQQVKGPFRSNSISLDNLKPSRVYCLQVQAQLLWNKSNIFRVGHLSNISCYETMADASTELQQVILISVGTFSLLSVLAGACFFLVLKYRGLIKYWFHTPPSIPLQIEEYLKDPTQPILEALDKDSSPKDDVWDSVSIISFPEKEQEDVLQTL

SEQ ID NO: 421 - DNA, 5611 bp, Homo sapien
gcgcgaccgtcccgggggtggggccgggcgcagcggcgagaggaggcgaaggtggctgcggtagcagcagcgcggcagcctcggacccagcccggagcgcagggcggccgctgcaggtccccgctcccctccccgtgcgtccgcccatggccgccgccgggcagctgtgcttgctctacctgtcggcggggctcctgtcccggctcggcgcagccttcaacttggacactcgggaggacaacgtgatccggaaatatggagaccccgggagcctcttcggcttctcgctggccatgcactggcaactgcagcccgaggacaagcggctgttgctcgtgggggccccgcgcggagaagcgcttccactgcagagagccaacagaacgggagggctgtacagctgcgacatcaccgcccgggggccatgcacgcggatcgagtttgataacgatgctgaccccacgtcagaaagcaaggaagatcagtggatgggggtcaccgtccagagccaaggtccagggggcaaggtcgtgacatgtgctcaccgatatgaaaaaaggcagcatgttaatacgaagcaggaatcccgagacatctttgggcggtgttatgtcctgagtcagaatctcaggattgaagacgatatggatgggggagattggagcttttgtgatgggcgattgagaggccatgagaaatttggctcttgccagcaaggtgtagcagctacttttactaaagactttcattacattgtatttggagccccgggtacttataactggaaagggattgttcgtgtagagcaaaagaataacactttttttgacatgaacatctttgaagatgggccttatgaagttggtggagagactgagcatgatgaaagtctcgttcctgttcctgctaacagttacttaggtttttctttggactcagggaaaggtattgtttctaaagatgagatcacttttgtatctggtgctcccagagccaatcacagtggagccgtggttttgctgaagagagacatgaagtctgcacatctcctccctgagcacatattcgatggagaaggtctggcctcttcatttggctatgatgtggcggtggtggacctcaacaaggatgggtggcaagatatagttattggagccccacagtattttgatagagatggagaagttggaggtgcagtgtatgtctacatgaaccagcaaggcagatggaataatgtgaagccaattcgtcttaatggaaccaaagattctatgtttggcattgcagtaaaaaatattggagatattaatcaagatggctacccagatattgcagttggagctccgtatgatgacttgggaaaggtttttatctatcatggatctgcaaatggaataaataccaaaccaacacaggttctcaagggtatatcaccttattttggatattcaattgctggaaacatggaccttgatcgaaattcctaccctgatgttgctgttggttccctctcagattcagtaactattttcagatcccggcctgtgattaatattcagaaaaccatcacagtaactcctaacagaattgacctccgccagaaaacagcgtgtggggcgcctagtgggatatgcctccaggttaaatcctgttttgaatatactgctaaccccgctggttataatccttcaatatcaattgtgggcacacttgaagctgaaaaagaaagaagaaaatctgggctatcctcaagagttcagtttcgaaaccaaggttctgagcccaaatatactcaagaactaactctgaagaggcagaaacagaaagtgtgcatggaggaaaccctgtggctacaggataatatcagagataaactgcgtcccattcccataactgcctcagtggagatccaagagccaagctctcgtaggcgagtgaattcacttccagaagttcttccaattctgaattcagatgaacccaagacagctcatattgatgttcacttcttaaaagagggatgtggagacgacaatgtatgtaacagcaaccttaaactagaatataaattttgcacccgagaaggaaatcaagacaaattttcttatttaccaattcaaaaaggtgtaccagaactagttctaaaagatcagaaggatattgctttagaaataacagtgacaaacagcccttccaacccaaggaatcccacaaaagatggcgatgacgcccatgaggctaaactgattgcaacgtttccagacactttaacctattctgcatatagagaactgagggctttccctgagaaacagttgagttgtgttgccaaccagaatggctcgcaagctgactgtgagctcggaaatccttttaaaagaaattcaaatgtcactttttatttggttttaagtacaactgaagtcacctttgacaccccatatctggatattaatctgaagttagaaacaacaagcaatcaagataatttggctccaattacagctaaagcaaaagtggttattgaactgcttttatcggtctcgggagttgctaaaccttcccaggtgtattttggaggtacagttgttggcgagcaagctatgaaatctgaagatgaagtgggaagtttaatagagtatgaattcagggtaataaacttaggtaaacctcttacaaacctcggcacagcaaccttgaacattcagtggccaaaagaaattagcaatgggaaatggttgctttatttggtgaaagtagaatccaaaggattggaaaaggtaacttgtgagccacaaaaggagataaactccctgaacctaacggagtctcacaactcaagaaagaaacgggaaattactgaaaaacagatagatgataacagaaaattttctttatttgctgaaagaaaataccagactcttaactgtagcgtgaacgtgaactgtgtgaacatcagatgcccgctgcgggggctggacagcaaggcgtctcttattttgcgctcgaggttatggaacagcacatttctagaggaatattccaaactgaactacttggacattctcatgcgagccttcattgatgtgactgctgctgccgaaaatatcaggctgccaaatgcaggcactcaggttcgagtgactgtgtttccctcaaagactgtagctcagtattcgggagtaccttggtggatcatcctagtggctattctcgctgggatcttgatgcttgctttattagtgtttatactatggaagtgtggtttcttcaagagaaataagaaagatcattatgatgccacatatcacaaggctgagatccatgctcagccatctgataaagagaggcttacttctgatgcatagtattgatctacttctgtaattgtgtggattctttaaacgctctaggtacgatgacagtgttccccgataccatgctgtaaggatccggaaagaagagcgagagatcaaagatgaaaagtatattgataaccttgaaaaaaaacagtggatcacaaagtggaacagaaatgaaagctactcatagcgggggcctaaaaaaaaaaaagcttcacagtacccaaactgctttttccaactcagaaattcaatttggatttaaaagcctgctcaatccctgaggactgatttcagagtgactacacacagtacgaacctacagttttaactgtggatattgttacgtagcctaaggctcctgttttgcacagccaaatttaaaactgttggaatggatttttctttaactgccgtaatttaactttctgggttgcctttgtttttggcgtggctgacttacatcatgtgttggggaagggcctgcccagttgcactcaggtgacatcctccagatagtgtagctgaggaggcacctacactcacctgcactaacagagtggccgtcctaacctcgggcctgctgcgcagacgtccatcacgttagctgtcccacatcacaagactatgccattggggtagttgtgtttcaacggaaagtgctgtcttaaactaaatgtgcaatagaaggtgatgttgccatcctaccgtcttttcctgtttcctagctgtgtgaatacctgctcacgtcaaatgcatacaagtttcattctccctttcactaaaaacacacaggtgcaacagacttgaatgctagttatacttatttgtatatggtatttattttttcttttctttacaaaccattttgttattgactaacaggccaaagagtctccagtttacccttcaggttggtttaatcaatcagaattagaattagagcatgggagggtcatcactatgacctaaattatttactgcaaaaagaaaatctttataaatgtaccagagagagttgttttaataacttatctataaactataacctctccttcatgacagcctccaccccacaacccaaaaggtttaagaaatagaattataactgtaaagatgtttatttcaggcattggatattttttactttagaagcctgcataatgtttctggatttacatactgtaacattcaggaattcttggagaagatgggtttattcactgaactctagtgcggtttactcactgctgcaaatactgtatattcaggacttgaaagaaatggtgaatgcctatggaactagtggatccaaactgatccagtataagactactgaatctgctaccaaaacagttaatcagtgagtcgagtgttctattttttgttttgtttcctcccctatctgtattcccaaaaattactttggggctaatttaacaagaactttaaattgtgttttaattgtaaaaatggcagggggtggaattattactctatacattcaacagagactgaatagatatgaaagctgattttttttaattaccatgcttcacaatgttaagttatatggggagcaacagcaaacaggtgctaatttgttttggatatagtataagcagtgtctgtgttttgaaagaatagaacacagtttgtagtgccactgttgttttggggggggctttttttctttttccggaaaatccttaaaccttaagatactaaggacgttgttttggttgtacttggaattcttagtcacaaaatatattttgtttacaaaaatttctgtaaaacaggttataacagtgtttaaagtctcagtttcttgcttggggaacttgtgtccctaatgtgttagattgctagattgctaaggagctgatacttgacagttttttagacctgtgttactaaaaaaaagatgaatgtcggaaaagggtgttgggagggtggtcaacaaagaaacaaagatgttatggtgtttagacttatggttgttaaaaatgtcatctcaagtcaagtcactggtctgtttgcatttgatacatttttgtactaactagcattgtaaaattatttcatgattagaaattacctgtggatatttgtataaaagtgtgaaataaattttttataaaagtgttcattgtttcgtaacacagcattgtatatgtgaagcaaactctaaaattataaatgacaacctgaattatctatttcatcaaaaaaaaaaaaaaaaaaaa

SEQ ID NO: 422 - protein, 1073 aa, Homo sapien
MAAAGQLCLLYLSAGLLSRLGAAFNLDTREDNVIRKYGDPGSLFGFSLAMHWQLQPEDKRLLLVGAPRGEALPLQRANRTGGLYSCDITARGPCTRIEFDNDADPTSESKEDQWMGVTVQSQGPGGKVVTCAHRYEKRQHVNTKQESRDIFGRCYVLSQNLRIEDDMDGGDWSFCDGRLRGHEKFGSCQQGVAATFTKDFHYIVFGAPGTYNWKGIVRVEQKNNTFFDMNIFEDGPYEVGGETEHDESLVPVPANSYLGFSLDSGKGIVSKDEITFVSGAPRANHSGAVVLLKRDMKSAHLLPEHIFDGEGLASSFGYDVAVVDLNKDGWQDIVIGAPQYFDRDGEVGGAVYVYMNQQGRWNNVKPIRLNGTKDSMFGIAVKNIGDINQDGYPDIAVGAPYDDLGKVFIYHGSANGINTKPTQVLKGISPYFGYSIAGNMDLDRNSYPDVAVGSLSDSVTIFRSRPVINIQKTITVTPNRIDLRQKTACGAPSGICLQVKSCFEYTANPAGYNPSISIVGTLEAEKERRKSGLSSRVQFRNQGSEPKYTQELTLKRQKQKVCMEETLWLQDNIRDKLRPIPITASVEIQEPSSRRRVNSLPEVLPILNSDEPKTAHIDVHFLKEGCGDDNVCNSNLKLEYKFCTREGNQDKFSYLPIQKGVPELVLKDQKDIALEITVTNSPSNPRNPTKDGDDAHEAKLIATFPDTLTYSAYRELRAFPEKQLSCVANQNGSQADCELGNPFKRNSNVTFYLVLSTTEVTFDTPYLDINLKLETTSNQDNLAPITAKAKVVIELLLSVSGVAKPSQVYFGGTVVGEQAMKSEDEVGSLIEYEFRVINLGKPLTNLGTATLNIQWPKEISNGKWLLYLVKVESKGLEKVTCEPQKEINSLNLTESHNSRKKREITEKQIDDNRKFSLFAERKYQTLNCSVNVNCVNIRCPLRGLDSKASLILRSRLWNSTFLEEYSKLNYLDILMRAFIDVTAAAENIRLPNAGTQVRVTVFPSKTVAQYSGVPWWIILVAILAGILMLALLVFILWKCGFFKRNKKDHYDATYHKAEIHAQPSDKERLTSDA

SEQ ID NO: 423 - DNA, 782 bp, Homo sapien
aggggccttagcgtgccgcatcgccgagatccagcgcccagagagacaccagagaacccaccatggccccctttgagcccctggcttctggcatcctgttgttgctgtggctgatagcccccagcagggcctgcacctgtgtcccaccccacccacagacggccttctgcaattccgacctcgtcatcagggccaagttcgtggggacaccagaagtcaaccagaccaccttataccagcgttatgagatcaagatgaccaagatgtataaagggttccaagccttaggggatgccgctgacatccggttcgtctacacccccgccatggagagtgtctgcggatacttccacaggtcccacaaccgcagcgaggagtttctcattgctggaaaactgcaggatggactcttgcacatcactacctgcagtttcgtggctccctggaacagcctgagcttagctcagcgccggggcttcaccaagacctacactgttggctgtgaggaatgcacagtgtttccctgtttatccatcccctgcaaactgcagagtggcactcattgcttgtggacggaccagctcctccaaggctctgaaaagggcttccagtcccgtcaccttgcctgcctgcctcgggagccagggctgtgcacctggcagtccctgcggtcccagatagcctgaatcctgcccggagtggaactgaagcctgcacagtgtccaccctgttcccactcccatctttcttccggacaatgaaataaagagttaccacccagc

SEQ ID NO: 424 - protein, 207 aa, Homo sapien
MAPFEPLASGILLLLWLIAPSRACTCVPPHPQTAFCNSDLVIRAKFVGTPEVNQTTLYQRYEIKMTKMYKGFQALGDAADIRFVYTPAMESVCGYFHRSHNRSEEFLIAGKLQDGLLHITTCSFVAPWNSLSLAQRRGFTKTYTVGCEECTVFPCLSIPCKLQSGTHCLWTDQLLQGSEKGFQSRHLACLPREPGLCTWQSLRSQIA

SEQ ID NO: 425 - DNA, 1480 bp, Homo sapien
cgcgagccgggaccacgccgacccagcgtgcccaggccgaggaaagcgcggcggcggcagtccgaagacccaccggactgaaagagaaggacgaggtcatcttcggacgggaggggcaagccagccatcctgggaccccaggcgtgcaggttctctttgagggtattccaccctgcaaaaagcatgtattcatggtcagctctcagcaaggccagtagcagagtggtaaaggccttggccctccaaggctgggaaaagacaatgacaagtcaaatccagacctatgttggatgttggtctactaggtgactgtctcctggaaatgttatgcagctcagcaaggtgaagtttcgaaatcagtatgacaatgatgtcactgtttggagcccccagggcaggattcatcaaattgaatatgcaatggaagctgttaaacaaggttcagccacagttggtctgaaatcaaaaactcatgcagttttggttgcattgaaaagggcgcaatcagagcttgcagctcatcagaaaaaaattctccatgttgacaaccatattggtatctcaattgcggggcttactgctgatgctagactgttatgtaattttatgcgtcaggagtgtttggattccagatttgtattcgatagaccactgcctgtgtctcgtcttgtatctctaattggaagcaagacccagataccaacacaacgatatggccggagaccatatggtgttggtctccttattgctggttatgatgatatgggccctcacattttccaaacctgtccatctgctaactattttgactgcagagccatgtccattggagcccgttcccaatcagctcgtacttacttggagagacatatgtctgaatttatggagtgtaatttaaatgaactagttaaacatggtctgcgtgccttaagagagacgcttcctgcagaacaggacctgactacaaagaatgtttccattggaattgttggtaaagacttggagtttacaatctatgatgatgatgatgtgtctccattcctggaaggtcttgaagaaagaccacagagaaaggcacagcctgctcaacctgctgatgaacctgcagaaaaggctgatgaaccaatggaacattaagtgataagccagtctatatatgtattatcaaatatgtaagaatacaggcaccacatactgatgacaataatctatactttgaaccaaaagttgcagagtggtggaatgctatgttttaggaatcagtccagatgtgagttttttccaagcaacctcactgaaacctatataatggaatacatttttctttgaaagggtctgtataatcattttctagaaagtatgggtatctatactaatgtttttatatgaagaacataggtgtctttgtggttttaaagacaactgtgaaataaaattgtttcaccgcctggtaaaaaaaaaaaaaaaaaaaaaaaaaaaa

SEQ ID NO: 426 - protein, 269 aa, Homo sapien
MQLSKVKFRNQYDNDVTVWSPQGRIHQIEYAMEAVKQGSATVGLKSKTHAVLVALKRAQSELAAHQKKILHVDNHIGISIAGLTADARLLCNFMRQECLDSRFVFDRPLPVSRLVSLIGSKTQIPTQRYGRRPYGVGLLIAGYDDMGPHIFQTCPSANYFDCRAMSIGARSQSARTYLERHMSEFMECNLNELVKHGLRALRETLPAEQDLTTKNVSIGIVGKDLEFTIYDDDDVSPFLEGLEERPQRKAQPAQPADEPAEKADEPMEH

SEQ ID NO: 427 - DNA, 2095 bp, Homo sapien
gcgcctgtcagggaagcggcgcgcgcgcgcgggcggcgggcgggctggggatccgccgcgcagtgccagcgccagcgccagacccgcgccccgcgctctccggcccgtcgcctgccttgggactcgcgagcccgcactcccgccctgcctgttcgctgcccgagtatggagctgctgtgttgcgaaggcacccggcacgcgccccgggccgggccggacccgcggctgctgggggaccagcgtgtcctgcagagcctgctccgcctggaggagcgctacgtaccccgcgcctcctacttccagtgcgtgcagcgggagatcaagccgcacatgcggaagatgctggcttactggatgctggaggtatgtgaggagcagcgctgtgaggaggaagtcttccccctggccatgaactacctggatcgctacctgtcttgcgtccccacccgaaaggcgcagttgcagctcctgggtgcggtctgcatgctgctggcctccaagctgcgcgagaccacgcccctgaccatcgaaaaactgtgcatctacaccgaccacgctgtctctccccgccagttgcgggactgggaggtgctggtcctagggaagctcaagtgggacctggctgctgtgattgcacatgatttcctggccttcattctgcaccggctctctctgccccgtgaccgacaggccttggtcaaaaagcatgcccagacctttttggccctctgtgctacagattatacctttgccatgtacccgccatccatgatcgccacgggcagcattggggctgcagtgcaaggcctgggtgcctgctccatgtccggggatgagctcacagagctgctggcagggatcactggcactgaagtggactgcctgcgggcctgtcaggagcagatcgaagctgcactcagggagagcctcagggaagcctctcagaccagctccagcccagcgcccaaagccccccggggctccagcagccaagggcccagccagaccagcactcctacagatgtcacagccatacacctgtagccctggagaggccctctggagtggccactaagcagaggaggggccgctgccacccacctccctgcctccaggaaccacaccacatctaagcctgaaggggcgtctgttcccccttcacaaagcccaagggatctggtcctacccatccccgcagtgtgcactaaggggcccggccagccatgtctgcatttcggtggctagtcaagctcctcctccctgcatctgaccagcagcgcctttcccaactctagctgggggtgggccaggctgatgggacagaattggatacatacaccagcattccttttgaacgcccccccccacccctgggggctctcatgttttcaactgccaaaatgctctagtgccttctaaaggtgttgtcccttctagggttattgcatttggattggggtccctctaaaatttaatgcatgatagacacatatgagggggaatagtctagatggctcctctcagtactttggaggcccctatgtagtccgtgctgacagctgctcctagagggaggggcctaggcctcagccagagaagctataaattcctctttgctttgctttctgctcagcttctcctgtgtgattgacagctttgctgctgaaggctcattttaatttattaattgctttgagcacaactttaagaggacataatgggggcctggccatcccacaagtggtggtaaccctggtggttgctgttttcctcccttctgctactggcaaaaggatctttgtggccaaggagctgctatagcctggggtggggtcatgccctcctctcccattgtccctctgccccatcctccagcagggaaaatgcagcagggatgccctggaggtggctgagcccctgtctagagagggaggcaagccctgttgacacaggtctttcctaaggctgcaaggtttaggctggtggcccaggaccatcatcctactgtaataaagatgattgtgaaataaaactggctttggcttcttggaaaaaaaaaaaaaaaaaaaaaaaaaaaaaaaaaaaaaaaaaaaaa

SEQ ID NO: 428 - protein, 292 aa, Homo sapien
MELLCCEGTRHAPRAGPDPRLLGDQRVLQSLLRLEERYVPRASYFQCVQREIKPHMRKMLAYWMLEVCEEQRCEEEVFPLAMNYLDRYLSCVPTRKAQLQLLGAVCMLLASKLRETTPLTIEKLCIYTDHAVSPRQLRDWEVLVLGKLKWDLAAVIAHDFLAFILHRLSLPRDRQALVKKHAQTFLALCATDYTFAMYPPSMIATGSIGAAVQGLGACSMSGDELTELLAGITGTEVDCLRACQEQIEAALRESLREASQTSSSPAPKAPRGSSSQGPSQTSTPTDVTAIHL

SEQ ID NO: 429 - DNA, 1568 bp, Homo sapien
cgcaacgccggtgcctgaggagcgatgccgagggaaatcatcaccctacagttgggccagtgcggcaatcagattgggttcgagttctggaaacagctgtgcgccgagcatggtatcagccccgaggcgatcgtggaggagttcgccaccgagggcactgaccgcaaggacgtctttttctaccaggcagacgatgagcactacatcccccgggccgtgctgctggacttggaaccccgggtgatccactccatcctcaactccccctatgccaagctctacaacccagagaacatctacctgtcggaacatggaggaggagctggcaacaactgggccagcggattctcccagggagaaaagatccatgaggacatttttgacatcatagaccgggaggcagatggtagtgacagtctagagggctttgtgctgtgtcactccattgctggggggacaggctctggactgggttcctacctcttagaacggctgaatgacaggtatcctaagaagctggtgcagacatactcagtgtttcccaaccaggacgagatgagcgatgtggtggtccagccttacaattcactcctcacactcaagaggctgacgcagaatgcagactgtctggtggtgctggacaacacagccctgaaccggattgccacagaccgcctgcacatccagaacccatccttctcccagatcaaccagctggtgtctaccatcatgtcagccagcaccaccaccctgcgctaccctggctacatgaacaatgacctcatcggcctcatcgcctcgctcattcccaccccacggctccacttcctcatgaccggctacacccctctcactacggaccagtcagtggccagcgtgaggaagaccacggtcctggatgtcatgaggcggctgctgcagcccaagaacgtgatggtgtccacaggccgagaccgccagaccaaccactgctacatcgccatcctcaacatcatccagggagaggtggaccccacccaggtccacaagagcttgcagaggatccgggaacgcaagttggccaacttcatcccgtggggccccgccagcatccaggtggccctgtcgaggaagtctccctacctgccctcggcccaccgggtcagcgggctcatgatggccaaccacaccagcatctcctcgctcttcgagagaacctgtcgccagtatgacaagctgcgtaagcgggaggccttcctggagcagttccgcaaggaggacatgttcaaggacaactttgatgagatggacacatccagggagattgtgcagcagctcatcgatgagtaccatgcggccacacggccagactacatctcctggggcacccaggagcagtgagtcccccaggacaggggaccctcatctgccttactggttggcccaagccctgcctgactgaccaccccctcagagcacagatcagggacctcacgcatctctttctcatatacatggactctctgttggcctgcaaacacatttacttctcctcttatgagactatttatctttaataaagcactggg

SEQ ID NO: 430 - protein, 451 aa, Homo sapien
MPREIITLQLGQCGNQIGFEFWKQLCAEHGISPEAIVEEFATEGTDRKDVFFYQADDEHYIPRAVLLDLEPRVIHSILNSPYAKLYNPENIYLSEHGGGAGNNWASGFSQGEKIHEDIFDIIDREADGSDSLEGFVLCHSIAGGTGSGLGSYLLERLNDRYPKKLVQTYSVFPNQDEMSDVVVQPYNSLLTLKRLTQNADCLVVLDNTALNRIATDRLHIQNPSFSQINQLVSTIMSASTTTLRYPGYMNNDLIGLIASLIPTPRLHFLMTGYTPLTTDQSVASVRKTTVLDVMRRLLQPKNVMVSTGRDRQTNHCYIAILNIIQGEVDPTQVHKSLQRIRERKLANFIPWGPASIQVALSRKSPYLPSAHRVSGLMMANHTSISSLFERTCRQYDKLRKREAFLEQFRKEDMFKDNFDEMDTSREIVQQLIDEYHAATRPDYISWGTQEQ

SEQ ID NO: 431 - DNA, 4336 bp, Homo sapien
ggcgggtcccgcggcgaggcagctcctgggcataagctgtggccatgactactgaagtaggctctgtgtctgaagtgaagaaggactctagccagttaggaacagatgcaaccaaggaaaaacctaaagaagtagcagaaaatcagcagaatcagtcttccgatccagaggaggaaaaaggttcccagccacctcctgcagctgaaagccaaagtagtctacgccgccagaagagagagaaggaaacatcggagagcaggggtatttctcggttcataccgccatggcttaagaagcaaaagtcatataccttagtagtggccaaagatggaggagataaaaaagagcctacccaagctgttgttgaagaacaggtcttagataaagaggaaccccttccagaagaacagagacaggctaagggtgatgctgaagaaatggctcagaagaaacaagagattaaagttgaagtcaaggaagaaaaaccctcagtgagcaaggaagaaaaaccctcagtgagcaaagtggagatgcagcctactgaattagtaagtaaggagagagaagagaaggtaaaagaaacacaggaagacaaattagaaggaggagcagcaaaaagggagaccaaggaagtgcagaccaatgagctgaaagcagagaaggcatctcaaaaagtcaccaagaagaccaaaactgtccagtgtaaagtgaccctcttagatggcaccgaatacagctgtgacctggagaaacatgccaagggacaagtgttatttgacaaagtgtgtgaacacctcaatctcttggagaaagactactttggacttttgtttcaggaaagccctgagcagaaaaactggttagatcctgctaaagaaataaagagacaactgagaaaccttccatggctattcacttttaatgtgaagttttatcctcctgatccttctcaattgactgaagatatcaccagatacttcttgtgccttcagctccggcaggacattgcctctggccgcctgccctgctcttttgtgactcatgctctcctgggatcctacaccctgcaggctgaacttggtgactatgacccagaagaacatggcagcatcgacctcagtgaattccagtttgcccctactcagactaaggagctggaagagaaggtggcagagctgcacaaaacccacaggggcttatcgccagcacaagctgattcccagttcttagaaaatgcaaagaggctttccatgtatggtgttgacctacatcatgccaaggactcagaaggtgtggacatcaagctgggcgtgtgtgctaatggacttctcatttacaaagacagactgcgaatcaatcgttttgcttggccgaaaatcttaaaaatttcctataaacgcagtaacttctacattaaagtcagaccggcagagctggaacagtttgagagtaccattggattcaaactgccaaaccaccgggcagcgaaaagactatggaaagtgtgcgtggagcatcatactttctacaggcttgtttctccagagcagccaccaaaagccaagttcctgaccttggggtccaaatttcgctatagtggccgcacccaagcacagacccgccaggccagcaccctcatagataggccagcaccacactttgagcgcacttctagtaaacgggtctccaggagtctagatggagctccgattggtgtcatggaccaaagtcttatgaaggattttcctggcgctgctggggagatttcagcctatggacctggacttgtcagcattgccgtggtacaagatggggacggcaggagggaagtgagaagcccaactaaagccccacatttgcagctcattgaaggaaagaaaaattccttgagagtagaaggggataatatttatgtcagacatagcaatttaatgttggaggaactggataaggcccaggaggacatactgaaacatcaggctagcattagtgaactcaagcgcaattttatggaatccacacctgagccgcgccctaatgaatgggaaaaacgacgtatcacacctctgtccctacagacacaagggagttcacatgagactctgaatatagtggaggagaagaagcgggcagaggttgggaaagacgaaagagtaatcacagaagaaatgaatggtaaagagatatcacctgggagtggtcctggggagattcgtaaggtggagcctgtgacacaaaaagactccacctccctgtcttctgagagcagcagcagcagcagtgagagtgaggaggaagacgtgggagagtaccgtccccaccaccgagtgaccgagggcaccatcagggaggaacaggagtatgaagaagaggtggaggaagaaccccgcccggcagccaaggtagtagagagggaggaagcagtgcccgaagccagcccagtcacacaagcaggtgccagtgtaatcacagtagaaacagtgatccaggaaaatgtaggtgcccaaaagatacccggagagaagagtgtacacgaaggcgctcttaagcaagacatgggagaagaagcagaggaagagccacagaaagttaacggagaggtgtcccatgttgacattgatgttttgccacaaattatttgttgttcagagccaccagtggtaaaaacagagatggtaacaatttctgatgcctcacaaaggacagaaatctccaccaaggaagtccccattgtccaaactgagaccaaaaccatcacatatgagtctccacagattgatggcggggctggtggtgattcgggcacgttactgaccgcacaaaccatcacatctgagtccgtgtcaacaacgacaaccacacacatcaccaagactgtaaaaggtggaatttctgaaacaagaattgagaaacgcattgtgatcacaggagatggagatattgatcatgaccaggcactggctcaggcgatcagggaagccagagagcagcaccctgacatgtcggtcacaagagtggtggtacacaaagaaacagagttggctgaggaaggggaagattaagtaagaaagtcattttttaaacaacactcaactttgtgaacccctgaagattttttgaccgttccaagtcttaatgccacaccactattccagcgaatttatgctacaactggtaacaatgaccagaagcctgaagaattaaaatgccaacaccaaacctttccttaccagctctggtctatattgctcccatgcatttaatatattattttgttttataaccacttctaaatattctcagttctttctttttgttgttgttaattaaggggttttggttttgttttctgtttactttgtgtgcaactacctgcttttaatgactcactttgatcaaatgacagtgaacaaagccagcccaagctggtaaggtgctgttcacttgaacaggtgctgttgcgcagaaaggaaactctgtgactaatttagatagtggctttccttcttctggattcttttcattgaattctcacagtaaatatttacggagttttcaaattgcagcaaatatactgtatgagaaaatattaatacagattaaaagcctttcttacatcttgaaaattttctaatatttgagaatttcacagggatgttttttatattgggacccttttgactttccagtcctgtgactttctacttttagtagagagtcagaatctctggactggagaataatgaagaagttcactgactgtgcactgtgcttagagaccctgccgcaccacagtgccaatgcttgtcagacacatgcccttcggcagcattccagaacaggagggaagagaaagagaaaactttcttccctctactaaaagattcaggcagcttaaaaccttagtgctttctttcttaacatacccaaatttcaattctttccattatttgaacacttgggtagaactcttgctttgtattaaacctctttgtctacacatgtaaaacttaccttttgttattgagcaggcctatctctttcagatagttttatgattcacacaggtttgaggatgctggggagagggggagggggctgtggtggtgttctgttggttacaagaaagttataccatttaaagctggcaccagagacccgatagggacttattaactatattgaacattttttcctttgcctttgaccctatgtatagttacgatgccagattagatttatagcagcctcaagttgtattaaatgatattttgcttcctgtaatactattataaaataaagtttgtttattctctaaaaaaaaaaaaaaaaaaaa

SEQ ID NO: 432 - protein, 1005 aa, Homo sapien
MTTEVGSVSEVKKDSSQLGTDATKEKPKEVAENQQNQSSDPEEEKGSQPPPAAESQSSLRRQKREKETSESRGISRFIPPWLKKQKSYTLVVAKDGGDKKEPTQAVVEEQVLDKEEPLPEEQRQAKGDAEEMAQKKQEIKVEVKEEKPSVSKEEKPSVSKVEMQPTELVSKEREEKVKETQEDKLEGGAAKRETKEVQTNELKAEKASQKVTKKTKTVQCKVTLLDGTEYSCDLEKHAKGQVLFDKVCEHLNLLEKDYFGLLFQESPEQKNWLDPAKEIKRQLRNLPWLFTFNVKFYPPDPSQLTEDITRYFLCLQLRQDIASGRLPCSFVTHALLGSYTLQAELGDYDPEEHGSIDLSEFQFAPTQTKELEEKVAELHKTHRGLSPAQADSQFLENAKRLSMYGVDLHHAKDSEGVDIKLGVCANGLLIYKDRLRINRFAWPKILKISYKRSNFYIKVRPAELEQFESTIGFKLPNHRAAKRLWKVCVEHHTFYRLVSPEQPPKAKFLTLGSKFRYSGRTQAQTRQASTLIDRPAPHFERTSSKRVSRSLDGAPIGVMDQSLMKDFPGAAGEISAYGPGLVSIAVVQDGDGRREVRSPTKAPHLQLIEGKKNSLRVEGDNIYVRHSNLMLEELDKAQEDILKHQASISELKRNFMESTPEPRPNEWEKRRITPLSLQTQGSSHETLNIVEEKKRAEVGKDERVITEEMNGKEISPGSGPGEIRKVEPVTQKDSTSLSSESSSSSSESEEEDVGEYRPHHRVTEGTIREEQEYEEEVEEEPRPAAKVVEREEAVPEASPVTQAGASVITVETVIQENVGAQKIPGEKSVHEGALKQDMGEEAEEEPQKVNGEVSHVDIDVLPQIICCSEPPVVKTEMVTISDASQRTEISTKEVPIVQTETKTITYESPQIDGGAGGDSGTLLTAQTITSESVSTTTTTHITKTVKGGISETRIEKRIVITGDGDIDHDQALAQAIREAREQHPDMSVTRVVVHKETELAEEGED

SEQ ID NO: 433 - DNA, 4336 bp, Homo sapien; identical to SEQ ID NO: 431

SEQ ID NO: 434 - protein, 1005 aa, Homo sapien; identical to SEQ ID NO: 432

SEQ ID NO: 435 - DNA, 1542 bp, Homo sapien
tgcgtttagggcgaagacggagttgtaaacttcttaaaattcctctctcgacacttcggtaattcctctttcgagactaaagctctttttgtatgcgtgtgtgtcaagcgtatgccccgggattctcctccgcttccttttctcggtcttccttcttgctttagggaccggaagagtccttgaaccaaaatagctcggcgggcacttccggggccggcgcccagagttccgggagggtgcaggcaggagagggaaaggcagcagcggcggcagctggaggatgaagaaggagcatgtgcttcactgccagttctccgcgtggtacccgttcttccgaggcgttaccatcaagagtgtcattcttccacttcctcagaatgtgaaggattatttactcgatgatggaactctggtggtttcaggaagggatgatccaccaacacattctcagccagacagtgatgatgaagcagaagaaatacagtggtctgatgatgagaacacagccacgcttacggcaccagaatttcctgagtttgccactaaagtccaggaacctatcaattccctcgggggcagtgtctttcctaagcttaattggagtgccccaagggatgcgtattggatagcaatgaatagttctctgaaatgtaaaaccctcagcgacatctttctgcttttcaagagttccgatttcatcactcgtgacttcactcagccgtttattcattgtactgatgattctccagatccatgtatagaatatgagctcgttctccgaaaatggtgtgaattgattcctggggctgagtttcgatgttttgtcaaggaaaacaagcttattggtatttctcaaagagactacacacaatactatgatcatatttctaaacaaaaggaagaaattcgcagatgcatacaagactttttcaagaaacacatacagtacaaattcttagatgaagactttgtgttcgatatatacagagacagtagggggaaggtgtggctcattgactttaatccatttggtgaagtcacagattcactgctgttcacctgggaagaactgatatctgagaacaacttaaacggcgattttagtgaagttgacgctcaagagcaggattccccagctttccgttgcacaaacagtgaagtgacagtccagcccagcccctatttgagttaccggctacccaaggactttgtagacctctctactgggagggacgctcacaagctaatagacttccttaagctgaagagaaatcagcaggaggacgactgatgagcgtactgtaactggagaagaggaggccccgccccaccgctccgggagctgctcatcagccgcaacttcctgccgaccctgatgcgggtgggccgagcagtgtggacatcagccactttttatattcatgtacattcacctggggaaaaaaacggagggactttgctacttgtaaaaataacataataaatagatcttaaacataggaaaaccatactgttctgataataaaatgctttctatgaaat

SEQ ID NO: 436 - protein, 336 aa, Homo sapien
MKKEHVLHCQFSAWYPFFRGVTIKSVILPLPQNVKDYLLDDGTLVVSGRDDPPTHSQPDSDDEAEEIQWSDDENTATLTAPEFPEFATKVQEPINSLGGSVFPKLNWSAPRDAYWIAMNSSLKCKTLSDIFLLFKSSDFITRDFTQPFIHCTDDSPDPCIEYELVLRKWCELIPGAEFRCFVKENKLIGISQRDYTQYYDHISKQKEEIRRCIQDFFKKHIQYKFLDEDFVFDIYRDSRGKVWLIDFNPFGEVTDSLLFTWEELISENNLNGDFSEVDAQEQDSPAFRCTNSEVTVQPSPYLSYRLPKDFVDLSTGRDAHKLIDFLKLKRNQQEDD

SEQ ID NO: 437 - DNA, 2386 bp, Homo sapien
agcatacgccgagccggtctttgagcgctaacgtctttctgtctccccgcggtggtgatgacggtgaaaactgaggctgctaagggcaccctcacttactccaggatgaggggcatggtggcaattctcatcgctttcatgaagcagaggaggatgggtctgaacgactttattcagaagattgccaataactcctatgcatgcaaacaccctgaagttcagtccatcttgaagatctcccaacctcaggagcctgagcttatgaatgccaacccttctcctccaccaagtccttctcagcaaatcaaccttggcccgtcgtccaatcctcatgctaaaccatctgactttcacttcttgaaagtgatcggaaagggcagttttggaaaggttcttctagcaagacacaaggcagaagaagtgttctatgcagtcaaagttttacagaagaaagcaatcctgaaaaagaaagaggagaagcatattatgtcggagcggaatgttctgttgaagaatgtgaagcaccctttcctggtgggccttcacttctctttccagactgctgacaaattgtactttgtcctagactacattaatggtggagagttgttctaccatctccagagggaacgctgcttcctggaaccacgggctcgtttctatgctgctgaaatagccagtgccttgggctacctgcattcactgaacatcgtttatagagacttaaaaccagagaatattttgctagattcacagggacacattgtccttactgacttcggactctgcaaggagaacattgaacacaacagcacaacatccaccttctgtggcacgccggagtatctcgcacctgaggtgcttcataagcagccttatgacaggactgtggactggtggtgcctgggagctgtcttgtatgagatgctgtatggcctgccgcctttttatagccgaaacacagctgaaatgtacgacaacattctgaacaagcctctccagctgaaaccaaatattacaaattccgcaagacacctcctggagggcctcctgcagaaggacaggacaaagcggctcggggccaaggatgacttcatggagattaagagtcatgtcttcttctccttaattaactgggatgatctcattaataagaagattactcccccttttaacccaaatgtgagtgggcccaacgacctacggcactttgaccccgagtttaccgaagagcctgtccccaactccattggcaagtcccctgacagcgtcctcgtcacagccagcgtcaaggaagctgccgaggctttcctaggcttttcctatgcgcctcccacggactctttcctctgaaccctgttagggcttggttttaaaggattttatgtgtgtttccgaatgttttagttagccttttggtggagccgccagctgacaggacatcttacaagagaatttgcacatctctggaagcttagcaatcttattgcacactgttcgctggaagctttttgaagagcacattctcctcagtgagctcatgaggttttcatttttattcttccttccaacgtggtgctatctctgaaacgagcgttagagtgccgccttagacggaggcaggagtttcgttagaaagcggacgctgttctaaaaaaggtctcctgcagatctgtctgggctgtgatgacgaatattatgaaatgtgccttttctgaagagattgtgttagctccaaagcttttcctatcgcagtgtttcagttctttattttcccttgtggatatgctgtgtgaaccgtcgtgtgagtgtggtatgcctgatcacagatggattttgttataagcatcaatgtgacacttgcaggacactacaacgtgggacattgtttgtttcttccatatttggaagataaatttatgtgtagacttttttgtaagatacggttaataactaaaatttattgaaatggtcttgcaatgactcgtattcagatgcttaaagaaagcattgctgctacaaatatttctatttttagaaagggtttttatggaccaatgccccagttgtcagtcagagccgttggtgtttttcattgtttaaaatgtcacctgtaaaatgggcattatttatgtttttttttttgcattcctgataattgtatgtattgtataaagaacgtctgtacattgggttataacactagtatatttaaacttacaggcttatttgtaatgtaaaccaccattttaatgtactgtaattaacatggttataatacgtacaatccttccctcatcccatcacacaactttttttgtgtgtgataaactgattttggtttgcaataaaaccttgaaaaatatttacaaaaaaaaaaaaaaaa

SEQ ID NO: 438 - protein, 431 aa, Homo sapien
MTVKTEAAKGTLTYSRMRGMVAILIAFMKQRRMGLNDFIQKIANNSYACKHPEVQSILKISQPQEPELMNANPSPPPSPSQQINLGPSSNPHAKPSDFHFLKVIGKGSFGKVLLARHKAEEVFYAVKVLQKKAILKKKEEKHIMSERNVLLKNVKHPFLVGLHFSFQTADKLYFVLDYINGGELFYHLQRERCFLEPRARFYAAEIASALGYLHSLNIVYRDLKPENILLDSQGHIVLTDFGLCKENIEHNSTTSTFCGTPEYLAPEVLHKQPYDRTVDWWCLGAVLYEMLYGLPPFYSRNTAEMYDNILNKPLQLKPNITNSARHLLEGLLQKDRTKRLGAKDDFMEIKSHVFFSLINWDDLINKKITPPFNPNVSGPNDLRHFDPEFTEEPVPNSIGKSPDSVLVTASVKEAAEAFLGFSYAPPTDSFL

SEQ ID NO: 439 - DNA, 2708 bp, Homo sapien
ggcctgttctcgagtccgcgcttttcgtcaccgccatgtcgggaggtggtgtgattcgtggccccgcagggaacaacgattgccgcatctacgtgggtaacttacctccagacatccgaaccaaggacattgaggacgtgttctacaaatacggcgctatccgcgacatcgacctcaagaatcgccgcgggggaccgcccttcgccttcgttgagttcgaggacccgcgagacgcggaagacgcggtgtatggtcgcgacggctatgattacgatgggtaccgtctgcgggtggagtttcctcgaagcggccgtggaacaggccgaggcggcggcgggggtggaggtggcggagctccccgaggtcgctatggccccccatccaggcggtctgaaaacagagtggttgtctctggactgcctccaagtggaagttggcaggatttaaaggatcacatgcgtgaagcaggtgatgtatgttatgctgatgtttaccgagatggcactggtgtcgtggagtttgtacggaaagaagatatgacctatgcagttcgaaaactggataacactaagtttagatctcatgagggagaaactgcctacatccgggttaaagttgatgggcccagaagtccaagttatggaagatctcgatctcgaagccgtagtcgtagcagaagccgtagcagaagcaacagcaggagtcgcagttactccccaaggagaagcagaggatcaccacgctattctccccgtcatagcagatctcgctctcgtacataagatgattggtgacactttttgtagaacccatgttgtatacagttttcctttattcagtacaatcttttcattttttaattcaaactgttttgttcagaatgggctaaagtgttgaattgcattcttgtaatatccccttgctcctaacatctacattcccttcgtgtctttgataaattgtattttaagtgatgtcatagacaggattgtttaaatttagttaactccatactcttcagactgtgatattgtgtaaatgtctatctgccctggtttgtgtgaactgggatgttgggggtgtttgtggttatcttacctggggaagttcttatgtttatcttgcttttcatgtgtctttctgtagacatatctgaagagatggattaagaatgctttggattaaggattgtggagcacatttcaatcattttaggattgtcaaaaggaggattgaggaggatcagatcaataatggaggcaatggtatgactccaagtgctattgtcacagatgaaattggcagtattgaccttatactaaaaggcaggggttaaaaatgattatatacattttccttaaaacacttgcaaacattttattcagttgtctttagctacaattgctttgctttttaaaccttggcaattgtggcaaaattatattgcccattttgtagcaacttattttgctcccttccccccatttttgttttaatagggactaatgtgggaagaactggctaatttgtcacagtgcttagttacaactgttaatgtgtgacctgctgttggtgtacatgtgggtacagggtgtttttaaatccaacaagatagagtataatatcaatactgctaaatctgcatgtcctctgtgtgactgatagagcgttgctatttcatttttttaagacaaaatgaaagcaaaatatagagttccaatgtattggtgtagataatctagttgggaatacttttaagtctcaccttcccctttaaactaatattcataattggttcatatgtttaaaagactttaatttacaaattaaattgcaaatgggagcattagatttagttttagacttaggtgggtagcaatgccagtaaacttaaattacgtaacttcttgcaaccacgaaacctgtaatacgctgtacagtaacaagtgttggcattatcagttgaactgtaaatacaaaatgcttcttccaattagtctctatgatgattaagtttctaaaatttatctgaacaccattcagaaacttgttttggggaatttgatagttattgatgtgcatctgttaaactgatgacagacataactcatcattccccagaaaccttttttgattacagtatctaacattttgcctcctcttttttggttttgctggttataaaggtttggattggagagggctcactggatcccaatccttggagctggatcattggattcaaatcataatgtggataggatagggaggatgaattaccaggattcatggagcgggatcagattaccaggaacataggagtggattcctgccccaaccaaaccgcattcgtgtggatttttttattcaacttaattggctattccaaagattttttttttcctatttttgacgattggagcccttaagatgcacgatggaattgtgttttgcgttttttggtaaaaggagcaaagcgaggacctggagataaacgctggagcaatctccttggaaggattcagcacgagtagatggtaaacatttaaaggggaaagggggggtttgtttaaaatagtaaatcagtaagtcacttctaaatttaaagaaaacaaaattggagttgaagaataagtaggtttccaattggctattgccgttttctttgaaaaaataaacattttttaaaaaacaaaaaaaaaaaaaaa

SEQ ID NO: 440 - protein, 248 aa, Homo sapien
MSGGGVIRGPAGNNDCRIYVGNLPPDIRTKDIEDVFYKYGAIRDIDLKNRRGGPPFAFVEFEDPRDAEDAVYGRDGYDYDGYRLRVEFPRSGRGTGRGGGGGGGGGAPRGRYGPPSRRSENRVVVSGLPPSGSWQDLKDHMREAGDVCYADVYRDGTGVVEFVRKEDMTYAVRKLDNTKFRSHEGETAYIRVKVDGPRSPSYGRSRSRSRSRSRSRSRSNSRSRSYSPRRSRGSPRYSPRHSRSRSRT

SEQ ID NO: 441 - DNA, 5554 bp, Homo sapien
gggttaagggcccgcgcgggccgggggagtgcagcctcaggccgtgattggttgcgccacccaggcccccgcgccctgccattggccccgcggcggccccgcccctccggcactcggcgccgaagccgcgagctcgcccgctggagctgagcgcgccgctgggccaggcagccgagccgtccgagcagctgggctgggagcagggaacccggagctgggaatcgggagccgggcgcggggagctgcgcgaagccggggcggagcacgcgagctatgatgtcgacgtacaagcgggccacgctggacgaggaggacctggtggactcgctctccgagggcgacgcataccccaacggcctgcaggtgaacttccacagcccccggagtggccagaggtgctgggctgcacggacccaggtggagaagcggctggtggtgttggtggtacttctggcggcaggactggtggcctgcttggcagcactgggcatccagtaccagacaagatccccctctgtgtgcctgagcgaagcttgtgtctcagtgaccagctccatcttgagctccatggaccccacagtggacccctgccatgacttcttcagctacgcctgtgggggctggatcaaggccaacccagtccctgatggccactcacgctgggggaccttcagcaacctctgggaacacaaccaagcaatcatcaagcacctcctcgaaaactccacggccagcgtgagcgaggcagagagaaaggcgcaagtatactaccgtgcgtgcatgaacgagaccaggatcgaggagctcagggccaaacctctaatggagttgattgagaggctcgggggctggaacatcacaggtccctgggccaaggacaacttccaggacaccctgcaggtggtcaccgcccactaccgcacctcacccttcttctctgtctatgtcagtgccgattccaagaactccaacagcaacgtgatccaggtggaccagtctggcctgggcttgccctcgagagactattacctgaacaaaactgaaaacgagaaggtgctgaccggatatctgaactacatggtccagctggggaagctgctgggcggcggggacgaggaggccatccggccccagatgcagcagatcttggactttgagacggcactggccaacatcaccatcccacaggagaagcgccgtgatgaggagctcatctaccacaaagtgacggcagccgagctgcagaccttggcacccgccatcaactggttgccttttctcaacaccatcttctaccccgtggagatcaatgaatccgagcctattgtggtctatgacaaggaataccttgagcagatctccactctcatcaacaccaccgacagatgcctgctcaacaactacatgatctggaacctggtgcggaaaacaagctccttccttgaccagcgctttcaggacgccgatgagaagttcatggaagtcatgtacgggaccaagaagacctgtcttcctcgctggaagttttgcgtgagtgacacagaaaacaacctgggctttgcgttgggccccatgtttgtcaaagcaaccttcgccgaggacagcaagagcatagccaccgagatcatcctggagattaagaaggcatttgaggaaagcctgagcaccctgaagtggatggatgaggaaacccgaaaatcagccaaggaaaaggccgatgccatctacaacatgataggataccccaacttcatcatggatcccaaggagctggacaaagtgtttaatgactacactgcagttccagacctctactttgaaaatgccatgcggtttttcaacttctcatggagggtcactgccgatcagctcaggaaagcccccaacagagatcagtggagcatgaccccgcccatggtgaacgcctactactcgcccaccaagaatgagattgtgtttccggccgggatcctgcaggcaccattctacacacgctcctcacccaaggccttaaactttggtggcataggtgtcgtcgtgggccatgagctgactcatgcttttgatgatcaaggacgggagtatgacaaggacgggaacctccggccatggtggaagaactcatccgtggaggccttcaagcgtcagaccgagtgcatggtagagcagtacagcaactacagcgtgaacggggagccggtgaacgggcggcacaccctgggggagaacatcgccgacaacgggggtctcaaggcggcctatcgggcttaccagaactgggtgaagaagaacggggctgagcactcgctccccaccctgggcctcaccaataaccagctcttcttcctgggctttgcacaggtctggtgctccgtccgcacacctgagagctcccacgaaggcctcatcaccgatccccacagcccctctcgcttccgggtcatcggctccctctccaattccaaggagttctcagaacacttccgctgcccacctggctcacccatgaacccgcctcacaagtgcgaagtctggtaaggacgaagcggagagagccaagacggaggaggggaaggggctgaggacgagacccccatccagcctccagggcattgctcagcccgcttggccacccggggccctgcttcctcacactggcgggttttcagccggaaccgagcccatggtgttggctctcaacgtgacccgcagtctgatcccctgtgaagagccggacatcccaggcacacgtgtgcgccaccttcagcaggcattcgggtgctgggctggtggctcatcaggcctgggccccacactgacaagcgccagatacgccacaaataccactgtgtcaaatgctttcaagatatatttttggggaaactattttttaaacactgtggaatacactggaaatcttcagggaaaaacacatttaaacacttttttttttaaggaaagaattggtatatttattatgttctgtttttctaaataacctgtggacaagggaagccccactgatttactccctctcttccccactccctgtgaggctgggctgaggcacggatccctgggccacagagcaagtctccaaatcagacagctgcctcagcccctgggatgtgtgatttcagctcctgtcacctcatgcaagggcgtggagaccagtagaggtgtggaggccaggcagagagaggagcctgctctgcggggggcccagctcatgggcactgccccttcagctagcctgcctccgtcccctgagtccaacagtgggagccctagctgggaagttctgatccccaaagccacagcaggggactgatggctatagcagaatgaggtcgggtcaggaccctcaaacaccatctgggaacaccaagcaccctgaatcgagactgcaggagccctgcggggtgagactgtgtcagagatacactgctggccacaagtgtcccctctcagtcccaccttttcgggctgtcccatgtctatctcaggggcccgttacctctctgcagcagtcccccatcccagccacaccagggtctgtccggccaaccctcttccccagggaaaggagaaaagagaaaacaggctgggcccgcgtggctcactcctgtaatcccagcactttgggaggttgaggtgggcggatgcacctgaggtcaggagtttgagaccagcctggccaacgtggtgaaaccccatctctactaaaaaaaattacaaaaattagccgggagtggtggtgggcacctgtaatcccagttactcgggaggctgaggcaagagaatctcttgagctcaggaggcagaggttgcagtgagctgagattgcgccactgcactccagcctgggtgacagagggagactccgtcccaaaaaaaaagaaaagagaaacagctgtcacctcccgcaggacccaaatcctctctctgagcaccgtcatccaccacatggctgggcctggctcccaggaccagtccagtcctctagtgccttatctgaggctgcagccgccagtctccaccccaaggagacagcccctgctcctagatgcccttggcctccgcagtgcagcccccaggtgtcctgactgaagcacaggccatagccccatttccccggtgcctgcagggctaacctccacgggagcccaggagctctggccggcaggtccatggcacagggcatcggaagactgcaaaactgctggacttaccctgggctgcagtccattgtcggcccctgggttgaatcaagatagtacttgcagctagatggatgcttttagccaggggacattgtgaggggaagattcctccacccagtctggcctgtggtgtctgtctcctccctgagaccacagcttctccagtagcagactcatgggcgccaccaagtggaagcacctggagcggcctctgccatccagtggggaagccaggccccgagacggaggtgggggcagcacgtgccctccacagccaccgctttcccgcctcagcagcccaggcctcctggcccagccctgcctggacagtgctctcccctcacccgggaagctggaatcctcctgcccgagaggaagcagacggcacagggacacccctgccaccttgggatctgcctccaagctggtgcagggtatcgagagtggattccagatggaggtcctggtcccagcacgcagcagtcctggtagctctgcagaggagacaggaacccgagaagtagctgaagcagaagccagccgcagtccccttgccacatagaggcgggcttctcccagccatggtgtcccctctgcctcccctcccccgaccctcctgccttccgcgtggagggtggtggtcctgtagtgtcagcaccagcaccatgggcttggaccccctccctggacacaggcaggtgtcctagggctgggggtgcagcccgagggaatggagaccacactcatggctcaggtctgccggggccggcagggggttggggaagaagagggctcaggcccagcaggggtggaagcccctgccactgccactacccgctccagagctttaaggaaaatgaagtgagacccctccccttaggcctggggagccatagggctggcttctctgtgggtgcgtggacgtggggttgggagctgggaatctattttttgtattatgttttgagctactgtagttttggcgtggcactattgtaatggaaataaaatacttgtacggagggccatgtgtctgggtgtctgtcctcccaaggtgctgtgtgtcctttgaggccggcacagggctgtccaccctagcttctccagggctgggcgcatctgtccctgagagcaggggtcttggaccctgacaaatgccagaaggttgctcagtacctgtgcccccagccacccttccttcacctacaagtgtgtgagcaccccctgctggtgagaatgatgcacatcaccacctgggtccaagaggcctcctggtaaaaataatttttctgttatcttcgagcaagggagtttccaggtctcagatgttt

SEQ ID NO: 442 - protein, 845 aa, Homo sapien
  unsure 50: unknown amino acid
GLRARAGRGSAASGRDWLRHPGPRALPLAPRRPRPSGTRRRSRELARWSXARRWARQPSRPSSWAGSREPGAGNREPGAGSCAKPGRSTRAMMSTYKRATLDEEDLVDSLSEGDAYPNGLQVNFHSPRSGQRCWAARTQVEKRLVVLVVLLAAGLVACLAALGIQYQTRSPSVCLSEACVSVTSSILSSMDPTVDPCHDFFSYACGGWIKANPVPDGHSRWGTFSNLWEHNQAIIKHLLENSTASVSEAERKAQVYYRACMNETRIEELRAKPLMELIERLGGWNITGPWAKDNFQDTLQVVTAHYRTSPFFSVYVSADSKNSNSNVIQVDQSGLGLPSRDYYLNKTENEKVLTGYLNYMVQLGKLLGGGDEEAIRPQMQQILDFETALANITIPQEKRRDEELIYHKVTAAELQTLAPAINWLPFLNTIFYPVEINESEPIVVYDKEYLEQISTLINTTDRCLLNNYMIWNLVRKTSSFLDQRFQDADEKFMEVMYGTKKTCLPRWKFCVSDTENNLGFALGPMFVKATFAEDSKSIATEIILEIKKAFEESLSTLKWMDEETRKSAKEKADAIYNMIGYPNFIMDPKELDKVFNDYTAVPDLYFENAMRFFNFSWRVTADQLRKAPNRDQWSMTPPMVNAYYSPTKNEIVFPAGILQAPFYTRSSPKALNFGGIGVVVGHELTHAFDDQGREYDKDGNLRPWWKNSSVEAFKRQTECMVEQYSNYSVNGEPVNGRHTLGENIADNGGLKAAYRAYQNWVKKNGAEHSLPTLGLTNNQLFFLGFAQVWCSVRTPESSHEGLITDPHSPSRFRVIGSLSNSKEFSEHFRCPPGSPMNPPHKCEVW

SEQ ID NO: 443 - DNA, 2154 bp, Homo sapien
atataaccgcgtggcccgcgcgcgcgcttccctcccggcgcagtcaccggcgcggtctatggctgcgacttctctaatgtctgctttggctgcccggctgctgcagcccgcgcacagctgctcccttcgccttcgccctttccacctcgcggcagttcgaaatgaagctgttgtcatttctggaaggaaactggcccagcagatcaagcaggaagtgcggcaggaggtagaagagtgggtggcctcaggcaacaaacggccacacctgagtgtgatcctggttggcgagaatcctgcaagtcactcctatgtcctcaacaaaaccagggcagctgcagttgtgggaatcaacagtgagacaattatgaaaccagcttcaatttcagaggaagaattgttgaatttaatcaataaactgaataatgatgataatgtagatggcctccttgttcagttgcctcttccagagcatattgatgagagaaggatctgcaatgctgtttctccagacaaggatgttgatggctttcatgtaattaatgtaggacgaatgtgtttggatcagtattccatgttaccggctactccatggggtgtgtgggaaataatcaagcgaactggcattccaaccctagggaagaatgtggttgtggctggaaggtcaaaaaacgttggaatgcccattgcaatgttactgcacacagatggggcgcatgaacgtcccggaggtgatgccactgttacaatatctcatcgatatactcccaaagagcagttgaagaaacatacaattcttgcagatattgtaatatctgctgcaggtattccaaatctgatcacagcagatatgatcaaggaaggagcagcagtcattgatgtgggaataaatagagttcacgatcctgtaactgccaaacccaagttggttggagatgtggattttgaaggagtcagacaaaaagctgggtatatcactccagttcctggaggtgttggccccatgacagtggcaatgctaatgaagaataccattattgctgcaaaaaaggtgctgaggcttgaagagcgagaagtgctgaagtctaaagagcttggggtagccactaattaactactgtgtcttctgtgtcacaaacagcactccaggccagctcaagaagcaaagcaggccaatagaaatgcaatatttttaatttattctactgaaatggtttaaaatgatgccttgtatttattgaaagcttaaatgggtgggtgtttctgcacatacctctgcagtacctcaccagggagcattccagtatcatgcagggtcctgtgatctagccaggagcagccattaacctagtgattaatatgggagacattaccatatggaggatggatgcttcactttgtcaagcacctcagttacacattcgccttttctaggattgcatttcccaagtgctattgcaataacagttgatactcattttaggtaccagaccttttgagttcaactgatcaaaccaaaggaaaagtgttgctagagaaaattggggaaaaggtgaaaaagaaaaaatggtagtaattgagcagaaaaaaattaatttatatatgtattgattggcaaccagatttatctaagtagaactgaattggctaggaaaaaagaaaaactgcatgttaatcattttcctaagctgtccttttgaggcttagtcagtttattgggaaaatgtttaggattattccttgctattagtactcattttatgtatgttacccttcagtaagttctccccattttagttttctaggactgaaaggattcttttctacattatacatgtgtgttgtcatatttggcttttgctatatactttaacttcattgttaaatttttgtattgtatagtttctttggtgtatcttaaaacctatttttgaaaaacaaacttggcttgataatcatttgggcagcttgggtaagtacgcaacttacttttccaccaaagaactgtcagcagctgcctgcttttctgtgatgtatgtatcctgttgacttttccagaaattttttaagagtttgagttactattgaatttaatcagactttctgattaaagggttttctttcttttttaataaaacacatctgtctggtatggta

SEQ ID NO: 444 - protein, 344 aa, Homo sapien
MSALAARLLQPAHSCSLRLRPFHLAAVRNEAVVISGRKLAQQIKQEVRQEVEEWVASGNKRPHLSVILVGENPASHSYVLNKTRAAAVVGINSETIMKPASISEEELLNLINKLNNDDNVDGLLVQLPLPEHIDERRICNAVSPDKDVDGFHVINVGRMCLDQYSMLPATPWGVWEIIKRTGIPTLGKNVVVAGRSKNVGMPIAMLLHTDGAHERPGGDATVTISHRYTPKEQLKKHTILADIVISAAGIPNLITADMIKEGAAVIDVGINRVHDPVTAKPKLVGDVDFEGVRQKAGYITPVPGGVGPMTVAMLMKNTIIAAKKVLRLEEREVLKSKELGVATN

SEQ ID NO: 445 - DNA, 5766 bp, Homo sapien
cgccgccgcagccgccgccaccaacgccaacaacaacgtgtcgggagcagccgcggccgaagccggagcaggggccggagtcgcggctggagtggggcctgcgcgtgtgagtggccgagagttgcccgtgccggagacctcaaactccgggcgggagcgctttcggtgggccgagccgccgtcgcccgcggcaccgtgtccccaaggcccagacagcggggcgggggtctatcaggcgcgggactggcttctctcaggccgacccttctagccgggctccggatcttcctcggcctcgggcccccttcacgttcaggacggaggccggagaacggtgatcatcacacaccccagccggcttcctggccagggcattttctctgcggccaagcagtgttgggattgtagctgctgggagccccctcctgccgccacctctcctgcaaggaagggactgacgcgttcccactttcttactctgcacctccccactctcttcccattcaagaacgagtttctcttccctctccattggaaatcctgctccggaggtccaaaacacgtattttaagcgtgcccttcctcacctcctggagcacccttagaagtattgcctacttatccgggctgagaatccttcatttttgacctggcttttttttcgccctttgggagataaaggtccctctccaccctctactaacactctgcacccaaggccttatcctttggggtcaccagctccttggccatttctatgtgatttcccccacccatctgagttccagtttcctctgggctccaatctccagtccctggcggatctggtcagtcccacccctaggtgggagtgaccagggggctctggcccaggattcccaaccctggaaggcagctccaaggcaggaagagaattgggcatcgggtacgaacctggcagctcaggagtcggggctccactcaccccacacaaaaagatgaaaaagcgcaaagagctcaatgcattgattggtttggctggggacagccggagaaagaagcccaagaaaggcccaagcagtcaccgcctgcttcgcactgagcctcccgactcagactctgagtccagctccgaagaggaagaggaattcggtgtggttggaaatcgctctcgctttgccaagggagactatttacgatgctgcaagatctgttatccgctctgtggttttgtcatccttgctgcctgtgttgtggcctgtgttggcttggtgtggatgcaggttgctctcaaggaggatctggatgccctcaaggaaaaatttcgaacaatggaatctaatcagaaaagctcattccaagaaatccccaaacttaatgaagaactactcagcaagcaaaaacaacttgagaagattgaatctggagagatgggtttgaacaaagtctggataaacatcacagaaatgaataagcagatttctctgttgacttctgcagtgaaccacctcaaagccaatgttaagtcagctgcagacttgattagcctgcctaccactgtagagggacttcagaagagtgtagcttccattggcaatactttaaacagcgtccatcttgctgtggaagcactacagaaaactgtggatgaacacaagaaaacgatggaattactgcagagtgatatgaatcagcacttcttgaaggagactcctggaagcaaccagatcattccgtcaccttcagccacatcagaacttgacaataaaacccacagtgagaatttgaaacaggatatcctgtaccttcacaactctttagaggaggtaaacagtgccctagtggggtaccagagacagaatgatcttaaactcgagggaatgaacgagacagtcagtaatcttacccagagagtcaacctgatagaaagcgatgtggttgctatgagcaaggtagaaaagaaagcaaacctgtccttcagcatgatgggtgatagatctgccactctgaaaagacagtctttggatcaagtcaccaacagaacagatacagtaaaaatccaaagcataaagaaagaagatagttcaaattctcaggtatccaagctaagagagaaactccagctgatcagtgctcttacaaacaaacctgagagcaacaggcctccagagaccgccgatgaagagcaagtagagagtttcacatcaaagccatcagcattgccaaaattttcacagtttcttggagacccagttgagaaagctgcccaactaagacctatctccctaccaggagtttctagcactgaagatcttcaggatttattccgcaagactggccaggacgtggatgggaagctgacctaccaggaaatctggacctccctaggttctgctatgccagaaccagagagcttgagagcatttgattccgatggagatggaagatactcattcctggagctaagggtagctttaggtatctagcttcatcaggcatattttagaaatggactgcctaatatctatttacctaacaacaaaacaacccttacttacccatcagtcctctagtcctccaaactactgtagcagatactttgccaccttttaacttgtttgaagaagctatataaaagttatttttttaaagaagaagaccattttacttatgatgttcagaaatctatgatttcctacaaccagtaagatcttacattttaaaattgccagaaaaaaaattaaagccctctttttttctctttcctttttttgaggggaggagaccttatcttttaaagctgggaaatgtatatagagagagaataagccacttttatatttcacttaaatttgccttaaattagctgcactttatagagactcagaaaatgtcttttctttaaaagataggccttttctgtttgtaaatatttaaatgaaagaaagcattgtgcatattgtgtggaaagtaggaagaatggttttgaacaggatatgaacaaatgacttattaaaaattgctgatctggtgtaggtggcagctgaaactacatccatgtctccataaggcatccctcaaaggcccaggcgctgccagggggtttgtcctggtagctggaggaaccgatttcagggaatagacactggagacaatactgactccaggcatggctcatggaagtaggattctggttctttgttcctattccctcagctaatcccaacctgggaatcagagaagtcttggggatttttctcatttttagtactatttcagggtttatgagcataaaaagttatccattggggagctccattttccctgctgagtgagctagattgccttccccacccacccacttaagtctgtcttaaagccgtagctggctcccaccaccagtaccatctccatttgaatggcagggctaaattcccccagccattatctcacactgaccacccagagctttagaagagagctgtgcttctaattttgacccagaaaaccataccccttgagattttacctagaggctaaccaagagcctaatatgtttctctgggggatgactaaagccaaaaaggctgtgagatgaaacatgtgaaataatattcagtttccttaccattaccagctcagaagtagctagaggctttctacccaaaggatgccaaagtatagcagggcaggcctggagctagggccttcacatggtggtagcaagtttttcaaatctaatacaatcaagtacaatacttcctttaaatgcttctgtggacctggcatgaaagatccctagattgaaaggaataatacctccatgtctcctgtatgttgagtctagaattgctgtgttgttcttagaagcagtctttgggcaacaacttgaaaggggaaaaaaaaactacaaaaacttaactttggtataggccaagtcagggagaaagtagagaaagctgtcatgccacagacttctttagtggagatcatttcctttttaactttgttcaggttgcccttcaccatggatacagtccggtacccttaaacatttaagggctgtttttttttttctttatatgatgttcagcttggtattaaccaaacttaaattttttttccagaagtattaaaatttagttaaagcaagatgaagtcttttcccatgaatgtgtccccttatctcattatagcttatgctcagtttcactttcttggaaaggttaaaacaaattagcctggcactttaggtaacttgaaaataactctcacccttctgactgccttccatccactctcaccccacacctttttttaatatatatacacccttacagattttctaacaaccaaataaaattctagcaataaattgaattatactgctatatttgtatatactgtaccataaatagtatgtctgtacctggaaggtatttttttgagaactgatttatatgaaatatacttgagggtaatgtagcttgtcctttttagtttcaaattcttattcataggcagatactttgaagacaccttaactctttgttgtgtgtattttcccttgcatcagataactatacatggagaaatccattttgttttttggtttatcttctgttcttcctaccttgtgcttgtctgactagtatcacccctgagccagtatacagtaccatcctctccccctaccaagtttggcagaggtgtttatactgcattctcagatctatgaatatttttgtcatcctgcctgagaaagtacatcttccaggcaaaagtagggtatcttgaactcctttcttctgagttgagcagactcactggcttaagcatcccataagcctattatttagtgtgaatttgggacttttatttgtatgttgtcttaacttactgagcctgtgacttgtatttagctgtagtcaagcctcaccagccatatctcatctctgagaggaagactggatagtgagtttggttttggttttggttttaaacccttttaccttttcagtctggcagctcctactgctgctttcctaagttactcaaagcactgcttcttggtccttgttttcttttgccttgtactatcttgtataatgtttactaaaagagcctccccataaatcagagaggcaaaaaggtagcatataaaaagaagaaccaaaagaagagaaaacctgacttctagatgactgtggtgtcatctaaaaggcagaggtgcctgaccctcaggaatgtgtatgatgcaacagagctgaagaatgggttcccttcacctactgctggccattgtcccttctgttggagattcctttctttatggttgctgttcataaccccttcaacacccccccttgctggtcctgccggtcacagttgaggattttggctgtgatgggctcatactcataatggcctgttgagttgtttttagtgacaggttttgtttgctgcacacctcattggcttgcttaccaacaccagctagaagtggtccctctttcatatccaaaccagaacacatttgggtattcctgagactttatagagcgtgtattgtttgttatacgaacctaacctaccttgttgttttctcatattaagaaatttaaatctactttgttttagtgaagctattttggtaatgtataagcaattttggttctgtttagggagaattcagggtttccatgacttgatttgagctttgcatatttcaaataagtaacacagccattttaatttagctaaataaaaaaatttcttttttctctc

SEQ ID NO: 446 - protein, 495 aa, Homo sapien
MKKRKELNALIGLAGDSRRKKPKKGPSSHRLLRTEPPDSDSESSSEEEEEFGVVGNRSRFAKGDYLRCCKICYPLCGFVILAACVVACVGLVWMQVALKEDLDALKEKFRTMESNQKSSFQEIPKLNEELLSKQKQLEKIESGEMGLNKVWINITEMNKQISLLTSAVNHLKANVKSAADLISLPTTVEGLQKSVASIGNTLNSVHLAVEALQKTVDEHKKTMELLQSDMNQHFLKETPGSNQIIPSPSATSELDNKTHSENLKQDILYLHNSLEEVNSALVGYQRQNDLKLEGMNETVSNLTQRVNLIESDVVAMSKVEKKANLSFSMMGDRSATLKRQSLDQVTNRTDTVKIQSIKKEDSSNSQVSKLREKLQLISALTNKPESNRPPETADEEQVESFTSKPSALPKFSQFLGDPVEKAAQLRPISLPGVSSTEDLQDLFRKTGQDVDGKLTYQEIWTSLGSAMPEPESLRAFDSDGDGRYSFLELRVALGI

SEQ ID NO: 447 - DNA, 3714 bp, Homo sapien
ccgggttgctgtgcgactattctccgggagccgttcgtgtcaccgccggaacctggcgcaggttaattatagaaaatgccaagtaggaaatttgccgatggtgaagtggtaagaggtcgatggcctgggagttcactttattatgaagtagaaattctgagccacgacagcacctcccagctttacactgtgaagtataaagatggaacagagcttgaattgaaagagaatgatattaagcctttaacttcctttaggcaaaggaaaggtggctcaacttccagttccccttccagacgccgagggagtcgatcaaggtcacgctcccgatcccctggtcgaccacctaaaagtgcccgccgatctgcttctgcttcccaccaggccgacattaaggaagcaaggagggaagtggaagttaaattgactccgctgattctgaagccatttggaaatagcatcagcagatataatggggagcctgagcatattgagagaaatgacgcacctcataaaaatacacaggaaaaattcagtttgtcacaagaaagcagttacatagcaacacagtatagccttcgtccaagaagagaagaagtcaaattaaaagaaatagattctaaggaagaaaaatacgttgcaaaagaactggcagtgagaacctttgaagtgacccccatccgggcaaaggacttggagtttggaggagtacctggtgtgtttctcatcatgtttggcctgcctgtgttcctcttcctgttgctgttgatgtgtaaacagaaagatcccagtcttctgaatttccctcctcctttgccagctttgtatgagttatgggaaaccagagtatttggggtctacctcctgtggtttttgattcaagtcctgttctacctactgccaattggaaaggttgtagaaggaacgcctcttattgatggaagaagactcaagtatagattaaatggattctatccttttatcctgacatctgcagtcatcggaacatctctcttccagggcgtagagtttcattacgtgtacagtcattttcttcagtttgcacttgcggccactgttttttgtgtggtcttgagtgtgtatctctacatgcgctctttgaaagcgccccggaatgacctgtcgcctgccagctctggaaatgctgtctatgatttcttcattggccgtgaattaaaccctcgaattggtacttttgatctcaaatacttttgtgaattgcgccccggattgattggatgggtggttattaacttggtgatgcttttggctgaaatgaaaatacaggaccgcgctgttccatccttggccatgattttagttaatagtttccagcttctctatgtggtggatgctctctggaatgaggaagcgttgttgacgaccatggacatcatccacgatggatttggattcatgctggcttttggagacttggtgtgggttccctttatttacagcttccaagccttttatttagtcagtcatccaaatgaagtgtcttggccaatggcttctctaattattgttctgaaactttgtggttatgtaatcttccgaggtgcaaattctcagaaaaatgcattccggaaaaatcccagtgatccaaagcttgcacatttaaaaaccattcatacttcaagtggaaaaaatcttctagtttctggatggtggggctttgttcgccaccccaattacttgggtgatctcatcatggccttggcgtggtccctcccatgtggttttaaccacattctgccttatttctacataatttatttcaccatgttgcttgtccaccgagaagctcgtgacgagtaccactgtaagaagaaatacggcgtggcttgggaaaagtactgtcagcgtgtgccctaccgtatatttccatacatctactaatgctcttctggcttttctacaaaatactcctgcaattccagctgccatttgcaaaaacaggaaaaaaatccgaaactttcttttgttgcactgacagggtctgtacttttttttttctttttgagtcaggactatggagccgagtagttgatcttttaatatagccgtgtttacttgtattaacttacagttaacataggaaaaatacaagtaaggatgtgagaatttgcattttaatgggaaattttcaacccttaatctgaaaacagaagacagtcttaatataaatgtactgtgaagaatgctattgatgtttatggtttctgattacttttcaaattttgatgtttttttgccagttggcttttcttaaatgaaaacactgttccatttaaagtacatttatgttttattcagtaagagaatagaattttcatttgtttttctttaaatcctttactaattatataatttgaaagcaaaaagaagggcctatattaaatgctgaaagtgaaaagtgatgacattattagcagacactgcttaaaggagaccatttgtagcagttggcttaacctcaacttctaaaactacattgaaaatgtaaatacatagcttagttttttgtaatatatggtgacttcagatttttttgtacagtattttgaatgtgagatgattgtcaggactaactgtctttttaacaaaacattttcagtattttaaataaaattttgtaaagtaatgtgaattaaaaattttggaacaattagaattcattcactattgtatagaagatgctgttaaaacataggaagggtatttttcttgatccaaagtttgtgaatttggctttgctacctcaattgcaggtgtttgtttgcctttataaactgttgcaaatagaaaaaaaatagaataagtatatatttttggagtaacatcaatatttaaacatttttacacagatcggtgtttgaaaatttgccatttcaggctaatatttttatatatttttgactttttaaaagttcatcagtgtttttgctactgttaagcttatgcagtttatactgtattttttatgtatcctttatatttaccaaacctgactccctgtaaaggagtgctgtcttaaaaacaactgaaggggttaaagtcgtttcttttagtttaatagatgtgcataaggtagctttagcaattaaattctagtgaagttgatatagtctcatttttaattgtcctgtaatggaacagtagcaaattcactaaacttttgtgttcagagttaaattgttctcagtactttcaatgtaggggaatgtaataaacatagtgtgtatgtttgggttttaattacacattttatatatgagccatttagatatgcagtgttaattctatactgcatttgaagtgtatgtaacttagcttatgttaatgcagtcatgaagttggtttgctccagcatccggtagtctttaaacattcttttagtgaaattgtcattgttttatcagtgctaatgtgtgcaagcagtttttttattttgcttttctcctggcatcagaaagtggtggcgttttctgtactggattgcaccaaggaagcttttggggaggaaggaaggacattaaattctttccctggtaatgaaaagagccctttatcaatacagtgctgcaatttctggatatcagctacactttgtttttaagtttgtttttgacatgtttatttggcaaattttataatgaagttttaagttgaaaataaaatgtagcaaca

SEQ ID NO: 448 - protein, 615 aa, Homo sapien
MPSRKFADGEVVRGRWPGSSLYYEVEILSHDSTSQLYTVKYKDGTELELKENDIKPLTSFRQRKGGSTSSSPSRRRGSRSRSRSRSPGRPPKSARRSASASHQADIKEARREVEVKLTPLILKPFGNSISRYNGEPEHIERNDAPHKNTQEKFSLSQESSYIATQYSLRPRREEVKLKEIDSKEEKYVAKELAVRTFEVTPIRAKDLEFGGVPGVFLIMFGLPVFLFLLLLMCKQKDPSLLNFPPPLPALYELWETRVFGVYLLWFLIQVLFYLLPIGKVVEGTPLIDGRRLKYRLNGFYPFILTSAVIGTSLFQGVEFHYVYSHFLQFALAATVFCVVLSVYLYMRSLKAPRNDLSPASSGNAVYDFFIGRELNPRIGTFDLKYFCELRPGLIGWVVINLVMLLAEMKIQDRAVPSLAMILVNSFQLLYVVDALWNEEALLTTMDIIHDGFGFMLAFGDLVWVPFIYSFQAFYLVSHPNEVSWPMASLIIVLKLCGYVIFRGANSQKNAFRKNPSDPKLAHLKTIHTSSGKNLLVSGWWGFVRHPNYLGDLIMALAWSLPCGFNHILPYFYIIYFTMLLVHREARDEYHCKKKYGVAWEKYCQRVPYRIFPYIY

SEQ ID NO: 449 - DNA, 4092 bp, Homo sapien
gtcacaaaggggggaacacgtgggcgccggctgccggggcggcgatcttagggaactagggtcacctggagagccgcccaccgtctctgcccgctcgactcctccgcccgggccgctcggccggtccagccgcggccggcgcctggctgtgaggtggattcccggcccagtctgaccatctccctccagtttttccacttcgttcggaccttctcataactatgtccaccctctacgtctcccctcacccagatgccttccccagcctccgagccctcatagccgctcgctatggggaggctggggagggtcccggatggggaggagcccacccccgcatctgtctccagccacccccgactagcaggactccctttcccccaccccgcctgccggccctggagcaggggcccggtgggctctgggtgtggggggccacggctgtggcccagctgctgtggccagcaggcctggggggcccagggggcagccgggcggctgtccttgtccaacagtgggtcagttacgccgacacggagttaataccagctgcctgtggagcaacgctgccggccctgggactccgaagctcggcccaggacccccaggctgtgctgggggccctgggcagggccctgagccccttggaggagtggcttcggctgcacacctacttggccggggaggcccccactctggctgacctggcggctgtcacagccttgctgctgcctttccgatacgtcctagacccacctgcccgccggatctggaataatgtgactcgctggtttgtcacgtgtgtccggcagccagaattccgagccgtgctaggagaagtggttctatactcaggagccaggcctctctctcatcagccaggccccgaggctcctgccctcccaaagacagctgctcagctcaagaaagaggcaaagaaacgggagaagctagagaaattccaacagaagcagaagatccaacagcagcagccacctccaggggagaagaaaccaaaaccagagaagagggagaaacgggatcctggggtcattacctatgacctcccaaccccacccggggaaaagaaagatgtcagtggccccatgcccgactcctacagccctcggtatgtggaggctgcctggtacccttggtgggagcagcagggcttcttcaagccagagtatgggcgtcctaatgtgtcagcagcaaatccccgaggtgtcttcatgatgtgcatcccaccccccaatgtgacaggctccctgcacctgggccatgcactcaccaacgccatccaggactccctgactcgatggcaccgcatgcgtggggagaccaccctgtggaaccctggctgtgaccatgcaggtattgccacccaggtggtggtggagaagaagctatggcgtgagcagggactgagccggcaccagctgggccgcgaggcctttctacaggaagtctggaagtggaaggaggagaaaggtgaccggatttaccaccagttgaagaagcttggcagctccttggactgggatcgagcctgtttcaccatggaccctaaactctcagcagctgtgacagaggcctttgtccggcttcacgaggaaggcatcatctatcgcagtacccgccttgttaactggtcctgcaccctcaactccgccatctctgacattgaggtggataagaaggagctgacaggtcgcaccctgctctccgtgcctggctacaaggagaaggtggagttcggggtcctcgtgtcctttgcctataaggtccaaggctcagatagcgacgaggaggtggtggtggcaacaactcggatcgagacaatgctgggagatgtggctgtagctgtgcaccccaaagataccagataccagcacctgaaggggaagaacgtgatccacccattcctgtctcggagccttcccattgtcttcgatgaatttgtggacatggactttggcacaggtgctgtgaagatcacccccgcacatgaccaaaatgactatgaagttgggcagcggcacgggctggaggccatcagcatcatggactcccggggggccctcatcaatgtgcctccgcctttcctgggcctgcccaggtttgaggccaggaaagcggtgctggtggcgctgaaggagcggggactgttccgtggcattgaggacaaccccatggtggtgccactttgcaaccggtcgaaggacgtggtagagcctctgctgcggccgcagtggtacgttcgctgcggggagatggcccaggctgccagcgccgctgtgactcggggtgacctccgcatcctgcctgaggcccatcagcgcacatggcatgcctggatggacaacatccgggagtggtgcatttccaggcagctgtggtggggccatcgcatcccagcctactttgtcactgtcagtgacccagcggtgccccctggggaggaccctgatgggcggtactgggtgagtggacgcaatgaggcggaggcccgggagaaggcagccaaggagttcggagtgtcccctgacaagatcagtctccagcaagatgaggatgtattggatacctggttctcctctggcctcttccccttatccattttgggctggcccaaccagtcagaagacctgagtgtgttctaccccgggacactgctggagaccggtcatgacatcctcttcttctgggtggcccggatggtcatgctgggcctgaagctcacgggcaggctgccctttagagaggtctacctccatgccatcgtgcgagatgctcacggccggaagatgagcaagtctctaggcaatgtcatcgatcccctggatgtcatctatggaatctccctgcagggcctccacaaccagctgctgaacagcaacctggatcccagcgaggtggagaaggccaaagaagggcagaaagctgacttcccagcggggattcctgaatgtggcaccgatgctctccggtttggattatgtgcctacatgtcccagggtcgtgacatcaacctggatgtgaaccggatactgggttaccgccacttctgcaacaagctctggaatgccaccaagtttgcccttcgtggccttgggaagggttttgtgccctcacccacctcccagcccggaggccatgagagcctggtggaccgctggatccgcagccgcctgacagaggctgtgaggctcagcaatcaaggcttccaggcctacgacttcccggccgtcaccactgcccagtacagcttctggctctatgagctctgtgatgtctacttggagtgcctgaaacctgtactgaatggggtggaccaggtggcagctgagtgtgcccgccagaccctgtacacttgcctggacgttggcctgcggctgctctcacccttcatgcccttcgtgacggaggagctgttccagaggctgccccggaggatgccgcaagctccccctagcctctgtgttaccccctacccggagccctcagagtgctcctggaaggaccccgaggcagaagccgcccttgagctggcgctaagcatcacgcgagccgtgcgctccctgcgggccgactacaacctcacccggatccggcctgactgtttcctggaagtggcggatgaggccacgggcgccctggcatcggcggtgtcgggctacgtgcaggccctggccagcgcaggtgtggtggctgttctggccctgggggctcccgccccccagggttgcgctgtggctctggcttctgatcgctgctccatccacctgcagcttcaggggctggtggaccctgcacgggagctgggcaagctgcaagccaagcgagttgaggcccagcggcaggcccagcgtctgcgggaacgccgtgctgcctcgggctatcctgtcaaggtgccgctcgaagtccaggaggcagatgaagccaagctccaacagacagaagcagagctcaggaaggtggatgaggccatcgccctattccagaagatgctgtgatccaccacccagcttcacccctcacccccagcggctcaccatggggatggcagcaataaaatattttcccacaaaa

SEQ ID NO: 450 - protein, 1264 aa, Homo sapien
MSTLYVSPHPDAFPSLRALIAARYGEAGEGPGWGGAHPRICLQPPPTSRTPFPPPRLPALEQGPGGLWVWGATAVAQLLWPAGLGGPGGSRAAVLVQQWVSYADTELIPAACGATLPALGLRSSAQDPQAVLGALGRALSPLEEWLRLHTYLAGEAPTLADLAAVTALLLPFRYVLDPPARRIWNNVTRWFVTCVRQPEFRAVLGEVVLYSGARPLSHQPGPEAPALPKTAAQLKKEAKKREKLEKFQQKQKIQQQQPPPGEKKPKPEKREKRDPGVITYDLPTPPGEKKDVSGPMPDSYSPRYVEAAWYPWWEQQGFFKPEYGRPNVSAANPRGVFMMCIPPPNVTGSLHLGHALTNAIQDSLTRWHRMRGETTLWNPGCDHAGIATQVVVEKKLWREQGLSRHQLGREAFLQEVWKWKEEKGDRIYHQLKKLGSSLDWDRACFTMDPKLSAAVTEAFVRLHEEGIIYRSTRLVNWSCTLNSAISDIEVDKKELTGRTLLSVPGYKEKVEFGVLVSFAYKVQGSDSDEEVVVATTRIETMLGDVAVAVHPKDTRYQHLKGKNVIHPFLSRSLPIVFDEFVDMDFGTGAVKITPAHDQNDYEVGQRHGLEAISIMDSRGALINVPPPFLGLPRFEARKAVLVALKERGLFRGIEDNPMVVPLCNRSKDVVEPLLRPQWYVRCGEMAQAASAAVTRGDLRILPEAHQRTWHAWMDNIREWCISRQLWWGHRIPAYFVTVSDPAVPPGEDPDGRYWVSGRNEAEAREKAAKEFGVSPDKISLQQDEDVLDTWFSSGLFPLSILGWPNQSEDLSVFYPGTLLETGHDILFFWVARMVMLGLKLTGRLPFREVYLHAIVRDAHGRKMSKSLGNVIDPLDVIYGISLQGLHNQLLNSNLDPSEVEKAKEGQKADFPAGIPECGTDALRFGLCAYMSQGRDINLDVNRILGYRHFCNKLWNATKFALRGLGKGFVPSPTSQPGGHESLVDRWIRSRLTEAVRLSNQGFQAYDFPAVTTAQYSFWLYELCDVYLECLKPVLNGVDQVAAECARQTLYTCLDVGLRLLSPFMPFVTEELFQRLPRRMPQAPPSLCVTPYPEPSECSWKDPEAEAALELALSITRAVRSLRADYNLTRIRPDCFLEVADEATGALASAVSGYVQALASAGVVAVLALGAPAPQGCAVALASDRCSIHLQLQGLVDPARELGKLQAKRVEAQRQAQRLRERRAASGYPVKVPLEVQEADEAKLQQTEAELRKVDEAIALFQKML

SEQ ID NO: 451 - DNA, 2570 bp, Homo sapien
tcggaggagccagccgaaatcctgccgcctgcccgggacgaggaggaggaggaggaagaggggatggagcaggggctggaggaggaagaagaggtggatccccggatccagggagaactggagaagttaaatcagtccacggatgatatcaacagacgggagactgaacttgaggatgctcgtcagaagttccgctctgttctggttgaagcaacggtgaaactggatgaactggtgaagaaaattggcaaagctgtggaagactccaagccctactgggaggcacggagggtggcgaggcaggctcagctggaagctcagaaagccacgcaggacttccagagggccacagaggtgctccgtgccgccaaggagaccatctccctggccgagcagcggctgctggaggatgacaagcggcagttcgactccgcctggcaggagatgctgaatcacgccactcagagggtcatggaggcggagcagaccaagaccaggagcgagctggtgcataaggagacggcagccaggtacaatgccgccatgggccgcatgcgacagctggagaagaaactcaagagagccatcaacaagtccaagccttattttgaactcaaggcaaagtactatgtgcagctcgagcaactgaaaaagactgtggatgacctgcaggccaaactgaccctggcaaaaggcgagtacaagatggccctgaagaacctggagatgatctcagatgagatccacgagcggcggcgctccagtgccatggggcctcggggatgcggtgttggtgctgagggcagcagcacatctgtggaggatctgccagggagcaaacctgagcctgatgccatttctgtggcctcggaggcctttgaagatgacagctgtagcaactttgtgtctgaagatgactcggaaacccagtccgtgtccagctttagttcaggaccaacaagcccgtctgagatgcctgaccagttccctgcggttgtgaggcctggcagcctggatctgcccagccctgtgtccctgtcagagtttgggatgatgttcccagtgttgggccctcgaagtgaatgcagcggggcctcctcccctgaatgtgaagtagaacgaggagacagggcagaaggggcagagaataaaacaagtgacaaagccaacaacaaccggggcctcagcagtagcagtggcagtggtggcagcagtaagagccaaagcagcacctcccctgagggccaggccttggagaaccggatgaagcagctctccctacagtgctcaaagggaagagatggaattattgctgacataaaaatggtgcagattggctgattcatcctgggccctggccgatgtgcatatcaacatttatacatggaactggagaacattgtgccaataatcatttaatatatgccaaatcttacacgtctactctaaactgctctaatgaagtttcagtgaccttgagggctaaagattgttcttctgggtaagagctcttgggctggtttttcagagcagagttcttgttgtgggtagactgtgactaggttcacagcctttgtggaacattccgtataacggcattgtggaagcaataactagttcctatgaaagaaccagagctgggaagatggctgggaagccaggccaaagtgggggcaacagcttgcttctctttctcttctcaccctcagtttgtatgggaaaatggagatgtcctctccactttatcccacgatatctaaatgaaaaagaaagaaaacccacacacaaagcaaaaactcaagtattaagagcacatatttttgacccagtggaggcttaaaaaaaaaaaaatccaagaacacaattcattttcaccacctctggtgttcagagggggcttttaaaaaagcgtgtatgctgggatacccattaaaaccattttctagaaggctaccatgagctgcactttttggggtgggaaaggtgaatgccagtggggatgcggggggatgagggtaggagggacttatagaaggggatttgtggctgtgggggagaaggttctacagcataagccttatcctgccagccaaggggatttattctaagagaagtgcatgtgaagaatggttgccactgttattagattgacaagatgttaatttctctgtaggttgtaactttaaaaataaatgaaattatttaagggttatgctgcactagtattccttagaggaaacagttctttaaagttaggaaagggagtaggcaggcatgtgttggcaaaggctgttaatagtagttaagtgttaagactgcttttctttaacgttttcatggtaatgcatatttagagcactgtatttttgtcttgttaagaaaatttagcatttctaaaagaaaaaagcaaccctctttcaaactgttaattctgtcacagcctgtatattttagtcatttgtaaatctcttcatacaatagtgacttcttttttgactgatacagtatcttaattacaaggttattttgtacttgtcttaatacactaagtgtaataaaaacggcttgag

SEQ ID NO: 452 - protein, 425 aa, Homo sapien
MEQGLEEEEEVDPRIQGELEKLNQSTDDINRRETELEDARQKFRSVLVEATVKLDELVKKIGKAVEDSKPYWEARRVARQAQLEAQKATQDFQRATEVLRAAKETISLAEQRLLEDDKRQFDSAWQEMLNHATQRVMEAEQTKTRSELVHKETAARYNAAMGRMRQLEKKLKRAINKSKPYFELKAKYYVQLEQLKKTVDDLQAKLTLAKGEYKMALKNLEMISDEIHERRRSSAMGPRGCGVGAEGSSTSVEDLPGSKPEPDAISVASEAFEDDSCSNFVSEDDSETQSVSSFSSGPTSPSEMPDQFPAVVRPGSLDLPSPVSLSEFGMMFPVLGPRSECSGASSPECEVERGDRAEGAENKTSDKANNNRGLSSSSGSGGSSKSQSSTSPEGQALENRMKQLSLQCSKGRDGIIADIKMVQIG

SEQ ID NO: 453 - DNA, 2570 bp, Homo sapien; identical to SEQ ID NO: 451

SEQ ID NO: 454 - protein, 425 aa, Homo sapien; identical to SEQ ID NO: 452

SEQ ID NO: 455 - DNA, 1645 bp, Homo sapien
agtcaagatggaggagtacgcgcgagagccttgcccatggcgaattgtggatgactgtggtggggcctttacgatgggtaccattggtggtggtatctttcaagcaatcaaaggttttcgcaattctccagtgggagtaaaccacagactacgagggagtttgacagctattaaaaccagggctccacagttaggaggtagctttgcagtttggggagggctgttttccatgattgactgtagtatggttcaagtcagaggaaaggaagatccctggaactccatcacaagtggtgccttaacgggagccatactggcagcaagaaatggaccagtggccatggttgggtcagccgcaatgggtggcattctcctagctttaattgaaggagctggtatcttgttgacaagatttgcctctgcacagtttcccaatggtcctcagtttgcagaagacccctcccagttgccttcaactcagttaccttcctcaccttttggagactatcgacaatatcagtaggacttctttcctaggatttctttaacagaacgagttgtggttcgagaaggatttcagaagatcaagttacagtctgtttttaaaaccataggtgggacagctatggccaataggctataaagagacatttagcacttttttctatttaaaggaacaagcggggaagggtgctaaaagataatacgtttatttattcacacttgaattgcatttgtgatcaaaataaatgtttaaatcgctaaaggaaaatacagtaagtgcttgaaagatgaaggaccaaaaggccaaaaaacagtgaaatatgatcatcatctcttgcggacttctctgcctggttttgtgtgttctgttattcaaacaataaaaagctggtggaacttactctttcttttaagataagttgtagacttcgatgtttcatgctcatgtacttcaaataatgcatgttttatagttagtccctcatcacttgaagtgacttctgagaattatgcagagtcaacatggatcatttcacagtgagatgctttatggattgaaggatatggtaaaatgtttatagtttactttgaaagtaaaatatactatgtcttggttttgaggatattggatacaaaactctcttcctttagggctactgagtcttgattcctgatcatcagaaatttcaccagaaacaacttgcttccaatatacccaattctatatgaagaattcatggagagtgtactggcactggaagagtttagtgtttcttgtatgcttgaaaataaagtatgtactgttttgaatgtgttccaagtcctctgcataaacgatgtattttggggtctggttgggcctggaaaatggatgagcacttcagaacaggtcattttcctgatattggaagtgacatgtggccctataggaggcatgatgttagttaattacacatttgcctacatctgtgggaaatggagaacaaagccatgtgggtactgtaaacacacgtttatcttttggcccaatgccatacatatggtaggcatttaattactgattgtgtttggataatttgggaattttcgactgtggtaaaatatacataaaataatacttattaaaaaaaaaaaaaaaaaa

SEQ ID NO: 456 - protein, 171 aa, Homo sapien
MEEYAREPCPWRIVDDCGGAFTMGTIGGGIFQAIKGFRNSPVGVNHRLRGSLTAIKTRAPQLGGSFAVWGGLFSMIDCSMVQVRGKEDPWNSITSGALTGAILAARNGPVAMVGSAAMGGILLALIEGAGILLTRFASAQFPNGPQFAEDPSQLPSTQLPSSPFGDYRQYQ

SEQ ID NO: 457 - DNA, 3236 bp, Homo sapien
ctccaccgcggcgagaggcatgggcacgtggctgccgagggtggccgagctctgggaagaaaagcccgtgtgcctctgcatagcgtcgctacagcgctgactcggtgtggattgattggaaaggtttgagggagtacttgggaagcatggtggcacatgatgagactggaggtctcctacctattaaaaggaccatacgagtcctagatgtcaataaccagtccttcagagaacaagaggagccaagcaataaaagagttcgacctctggctcgtgtcacgtccttggcaaatttaatctctcctgtaagaaatggagctgtcagacgttttggtcaaacaatacagtcatttacccttcgtggtgaccacagatccccagcctctgcccagaagttttctagcaggtcaacagtcccaacacccgccaagagaaggagcagtgcactgtggtcagagatgctggacatcaccatgaaggagtctctcaccaccagggagatcagacggcaggaggcaatatatgaaatgtcccgaggtgaacaggatttaattgaggatctcaaacttgcaagaaaggcctaccatgaccccatgttaaagttgtccatcatgtcagaagaggaactcacacatatatttggtgatctggactcttacatacctctgcatgaagatttgttgacaagaataggagaagcaaccaagcctgatggaacagtggagcagattggtcacattctcgtgagctggttaccgcgcttgaatgcctacagaggttactgtagtaaccagctggcagccaaagctcttcttgatcaaaagaaacaggatccaagagtccaagacttcctccagcgatgtctcgagtctcccttcagtcgaaaactagatctttggagtttcctagatatccctcgaagtcgcctagtcaaataccctttactgttaaaagaaattcttaaacacactccaaaagagcaccctgatgttcagcttctggaggatgctatattgataatacagggagtcctctctgatatcaacttgaagaaaggtgaatccgagtgccagtattacatcgacaagctggagtacctggatgaaaagcagagggaccccagaatcgaagcgagcaaagtgctgctgtgccatggggagctgcggagcaagagtggacataaactttacattttcctgtttcaagacatcttggttctgactcggcccgtcacacggaacgaacggcactcttaccaggtttaccggcagccaatcccagtccaagagctagtcctagaagacctgcaggatggagatgtgagaatgggaggctcctttcgaggagctttcagtaactcagagaaagctaaaaatatctttagaattcgcttccatgacccctctccagcccagtctcacactctgcaagccaatgacgtgttccacaagcagcagtggttcaactgtattcgagcggccattgcccccttccagtcggcaggcagtccacctgagctgcagggcctgccggagctgcacgaagagtgtgaggggaaccacccctctgcgaggaaactcacagcccagaggagggcatccacagtttccagtgttactcaggtagaagttgatgaaaacgcttacagatgtggctctggcatgcagatggcagaggacagcaagagcttaaagacacaccagacacagcccggcatccgaagagcgagggacaaagccctttctggtggcaaacggaaagagactttggtgtagagaaggctctgtgtgttaactgatgggagagactgtttgtttataaatgtgtacagttttgttttctcgtaaggggagcatcatagggttactttataccagttgtaacattttcattgtttttggttgttcttttttctttttttaatggcagctaaagatatacagattactgttaaattgcagtcctttttttttttaaagatattttcttgaattatttagaacatggtaagcctggtattttttaatcaaacaaaatatttatgaaatgggttttctcttaattctggattcatcatggctttctaataccaattgtaatatttacaatattcaccaaaacttagaattttgcaaatgctggaattctgccagtgtttctttgctaagccttgcatgcaaaatttgaaattttaacattggcacccaaaacctacatggaatgtatgtctggagtatttcaaactttacattgaaacataatttccttggaaaacaaaccataagcctgaggaggtttttatcaactggaatgctttatattagtttgtttttcactgtacattcctcattttacattcatttaacctgccgattatttaatttttttattgtaaagtagtttttagcatttgcttttatttttttactttgatgccttttcaaattggcatgtctttaaagtatttttcttcctgattaaaaatgtgtgtgtatgtgtgtgtgtgtgtgtatatatatatatttttttaaatcacattaattttaccaagtgaaaccaagccatactgtttttgagccaattaagaaaattgccatttttaaagtgtagcatttcagggtaaagacccatgaaatggcttgatgtattctagactactgaaagaaaaccacttcaaagattttgttgaaagttttagtgttgtctgaaatgcaagagggaaggtgattggtagtgagttaaaagaaaaagagaggaaaagagagtagttttgtcttcaagtaaaatgtctggttgtgccagacatttcacaagtgtgaaaggagataggagaagctcaacttgagggcgtgtagtaagttgtagaaggctcgaggggacgtggacttatttgccttggtttgcaatacctgcaaataatgagtttgaaaagaaacaatgaaatgtgttaaaaatttgaccatattagataaattttggtggatttagtcataagatggaaaaagactggtgaatcttttattacaaaatgtttctgttaaaatgggatcatcatctttgaaaggggggaggaggagtaaaagcccgattataatggtgatcaattcaagtcagtgttgactattctgtgaaatatatttggccagtggaaatgataatcagaaaagactgtaaatagatccatccaaatgatttctctgtacaaatgaatgatactattaaaaaaaaaaaaaaaa

SEQ ID NO: 458 - protein, 542 aa, Homo sapien
MVAHDETGGLLPIKRTIRVLDVNNQSFREQEEPSNKRVRPLARVTSLANLISPVRNGAVRRFGQTIQSFTLRGDHRSPASAQKFSSRSTVPTPAKRRSSALWSEMLDITMKESLTTREIRRQEAIYEMSRGEQDLIEDLKLARKAYHDPMLKLSIMSEEELTHIFGDLDSYIPLHEDLLTRIGEATKPDGTVEQIGHILVSWLPRLNAYRGYCSNQLAAKALLDQKKQDPRVQDFLQRCLESPFSRKLDLWSFLDIPRSRLVKYPLLLKEILKHTPKEHPDVQLLEDAILIIQGVLSDINLKKGESECQYYIDKLEYLDEKQRDPRIEASKVLLCHGELRSKSGHKLYIFLFQDILVLTRPVTRNERHSYQVYRQPIPVQELVLEDLQDGDVRMGGSFRGAFSNSEKAKNIFRIRFHDPSPAQSHTLQANDVFHKQQWFNCIRAAIAPFQSAGSPPELQGLPELHEECEGNHPSARKLTAQRRASTVSSVTQVEVDENAYRCGSGMQMAEDSKSLKTHQTQPGIRRARDKALSGGKRKETLV

SEQ ID NO: 459 - DNA, 865 bp, Homo sapien
ctcaaacaccgcctgctaaaaatacccgactggaggagcataaaagcgcagccgagcccagcgccccgcacttttctgagcagacgtccagagcagagtcagccagcatgaccgagcgccgcgtccccttctcgctcctgcggggccccagctgggaccccttccgcgactggtacccgcatagccgcctcttcgaccaggccttcgggctgccccggctgccggaggagtggtcgcagtggttaggcggcagcagctggccaggctacgtgcgccccctgccccccgccgccatcgagagccccgcagtggccgcgcccgcctacagccgcgcgctcagccggcaactcagcagcggggtctcggagatccggcacactgcggaccgctggcgcgtgtccctggatgtcaaccacttcgccccggacgagctgacggtcaagaccaaggatggcgtggtggagatcaccggcaagcacgaggagcggcaggacgagcatggctacatctcccggtgcttcacgcggaaatacacgctgccccccggtgtggaccccacccaagtttcctcctccctgtcccctgagggcacactgaccgtggaggcccccatgcccaagctagccacgcagtccaacgagatcaccatcccagtcaccttcgagtcgcgggcccagcttgggggcccagaagctgcaaaatccgatgagactgccgccaagtaaagccttagcctggatgcccacccctgctgccgccactggctgtgcctcccccgccacctgtgtgttcttttgatacatttatcttctgtttttctcaaataaagttcaaagcaaccacctgtaaaaaaaaaaaaaaaaaa

SEQ ID NO: 460 - protein, 205 aa, Homo sapien
MTERRVPFSLLRGPSWDPFRDWYPHSRLFDQAFGLPRLPEEWSQWLGGSSWPGYVRPLPPAAIESPAVAAPAYSRALSRQLSSGVSEIRHTADRWRVSLDVNHFAPDELTVKTKDGVVEITGKHEERQDEHGYISRCFTRKYTLPPGVDPTQVSSSLSPEGTLTVEAPMPKLATQSNEITIPVTFESRAQLGGPEAAKSDETAAK

SEQ ID NO: 461 - DNA, 2493 bp, Homo sapien
actgcgactcgagacagcggcccggcaggacagctccagaatgaaaatgcggttcttggggttggtggtctgtttggttctctggcccctgcattctgaggggtctggagggaaactgacagctgtggatcctgaaacaaacatgaatgtgagtgaaattatctcttactggggattccctagtgaggaatacctagttgagacagaagatggatatattctgtgccttaaccgaattcctcatgggaggaagaaccattctgacaaaggtcccaaaccagttgtcttcctgcaacatggcttgctggcagattctagtaactgggtcacaaaccttgccaacagcagcctgggcttcattcttgctgatgctggttttgacgtgtggatgggcaacagcagaggaaatacctggtctcggaaacataagacactctcagtttctcaggatgaattctgggctttcagttatgatgagatggcaaaatatgacctaccagcttccattaacttcattctgaataaaactggccaagaacaagtgtattatgtgggtcattctcaaggcaccactataggttttatagcattttcacagatccctgagctggctaaaaggattaaaatgttttttgccctgggtcctgtggcttccgtcgccttctgtactagccctatggccaaattaggacgattaccagatcatctcattaaggacttatttggagacaaagaatttcttccccagagtgcgtttttgaagtggctgggtacccacgtttgcactcatgtcatactgaaggagctctgtggaaatctctgttttcttctgtgtggatttaatgagagaaatttaaatatgtctagagtggatgtatatacaacacattctcctgctggaacttctgtgcaaaacatgttacactggagccaggctgttaaattccaaaagtttcaagcctttgactggggaagcagtgccaagaattattttcattacaaccagagttatcctcccacatacaatgtgaaggacatgcttgtgccgactgcagtctggagcgggggtcacgactggcttgcagatgtctacgacgtcaatatcttactgactcagatcaccaacttggtgttccatgagagcattccggaatgggagcatcttgacttcatttggggcctggatgccccttggaggctttataataaaattattaatctaatgaggaaatatcagtgaaagctggacttgagctgtgtaccaccaagtcaatgattatgtcatgtgaaaatgtgtttgcttcatttctgtaaaacacttgtttttctttcccaggtcttttgtttttttatatccaagaaaatgataactttgaagatgcccagttcactctagtttcaattagaaacatactagctattttttctttaattagggctggaataggaagccagtgtctcaaccatagtattgtctctttaagtcttttaaatatcactgatgtgtaaaaaggtcattatatccattctgtttttaaaatttaaaatatattgactttttgcccttcataggacaaagtaatatatgtgttggaattttaaaattgtgttgtcattggtaaatctgtcactgacttaagcgaggtataaaagtacgcagttttcatgtccttgccttaaagagctctctagtctaacggtcttgtagttagagatctaaatgacattttatcatgttttcctgcagcaggtgcatagtcaaatccagaaatatcacagctgtgccagtaataaggatgctaacaattaattttatcaaacctaactgtgacagctgtgatttgacacgttttaattgctcaggttaaatgaaatagttttccggcgtcttcaaaaacaaattgcactgataaaacaaaaacaaaagtatgttttaaatgctttgaagactgatacactcaaccatctatattcatgagctctcaatttcatggcaggccatagttctacttatctgagaagcaaatccctgtggagactataccactattttttctgagattaatgtactcttggagcccgctactgtcgttattgatcacatctgtgtgaagccaaagccccgtggttgcccatgagaagtgtccttgttcattttcacccaaatgaagtgtgaacgtgatgttttcggatgcaaactcagctcagggattcattttgtgtcttagttttatatgcatccttatttttaatacacctgcttcacgtccctatgttgggaagtccatatttgtctgcttttcttgcagcatcatttccttacaatactgtccggtggacaaaatgacaattgatatgtttttctgatataattactttagctgcactaacagtacaatgcttgttaatggttaatataggcagggcgaatactactttgtaacttttaaagtcttaaacttttcaataaaattgagtgagacttataggccc

SEQ ID NO: 462 - protein, 399 aa, Homo sapien
MKMRFLGLVVCLVLWPLHSEGSGGKLTAVDPETNMNVSEIISYWGFPSEEYLVETEDGYILCLNRIPHGRKNHSDKGPKPVVFLQHGLLADSSNWVTNLANSSLGFILADAGFDVWMGNSRGNTWSRKHKTLSVSQDEFWAFSYDEMAKYDLPASINFILNKTGQEQVYYVGHSQGTTIGFIAFSQIPELAKRIKMFFALGPVASVAFCTSPMAKLGRLPDHLIKDLFGDKEFLPQSAFLKWLGTHVCTHVILKELCGNLCFLLCGFNERNLNMSRVDVYTTHSPAGTSVQNMLHWSQAVKFQKFQAFDWGSSAKNYFHYNQSYPPTYNVKDMLVPTAVWSGGHDWLADVYDVNILLTQITNLVFHESIPEWEHLDFIWGLDAPWRLYNKIINLMRKYQ

SEQ ID NO: 463 - DNA, 1535 bp, Homo sapien
cctccgctcagtccgggagcgcacgtgggccgcggcgctccgacctccgctttcccaccgcccgcagctgaagcacatcccgcagcccggcgcggactccgatcgccgcagttgccctctggcgccatgtcgcagaacggagcgcccgggatgcaggaggagagcctgcagggctcctgggtagaactgcacttcagcaataatgggaacgggggcagcgttccagcctcggtttctatttataatggagacatggaaaaaatactgctggacgcacagcatgagtctggacggagtagctccaagagctctcactgtgacagcccacctcgctcgcagacaccacaagataccaacagggcttctgaaacagatacccatagcattggagagaaaaacagctcacagtctgaggaagatgatattgaaagaaggaaagaagttgaaagcatcttgaagaaaaactcagattggatatgggattggtcaagtcggccggaaaatattccccccaaggagttcctctttaaacacccgaagcgcacggccaccctcagcatgaggaacacgagcgtcatgaagaaagggggcatattctctgcagaatttctgaaagttttccttccatctctgctgctctctcatttgctggccatcggattggggatctatattggaaggcgtctgacaacctccaccagcaccttttgatgaagaactggagtctgacttggttcgttagtggattacttctgagcttgcaacatagctcactgaagagctgttagatcctggggtggccacgtcacttgtgtttatttgttctgtaaatgctgcgttcctaatttagtaaaataaaagaatagacactaaaatcatgttgatctataattacacctatgggatcaataagcatgtcagactgattaatgtctactgtgaaaatttggtagtaaattttcatttgatattagatataaatatctgaatataaataattttaatatactagtcatgatgtgtgttgtattttaaaaattatctgcaaccttaattcagctgaagtactttatatttcaaaagaatgaataacattgataataaaatcgctactttaaggggtttgtccaaaataaatattgtggccttatatatcacactattgtagaaagtattatttaatttaaatggatgcaggttgtctactaaagaaagattatatataactatgctaattgttcataatcaacagaaaccaagatagagctacaaactcagctgtacagttcgtacactaaactcttcttgcttttgcattataaggaattaagtctccgattattaggtgatcaccctggatgatcagttttctgctgaaggcacctactcagtatcttttcctctttatcactctgcattggtgaatttaatcctctcctttgtgttcaacttttgtgtgcttttaaaatcagctttattctaagcaaatctgtgtctactttaaaaaactggaaatggaaaaaaaaataaatctt

SEQ ID NO: 464 - protein, 194 aa, Homo sapien
MSQNGAPGMQEESLQGSWVELHFSNNGNGGSVPASVSIYNGDMEKILLDAQHESGRSSSKSSHCDSPPRSQTPQDTNRASETDTHSIGEKNSSQSEEDDIERRKEVESILKKNSDWIWDWSSRPENIPPKEFLFKHPKRTATLSMRNTSVMKKGGIFSAEFLKVFLPSLLLSHLLAIGLGIYIGRRLTTSTSTF

SEQ ID NO: 465 - DNA, 1221 bp, Homo sapien
cgcaggctggaaggaagacgaacctacgaagcagagatctgaagacagcatgtacacagccattccccagagtggctctccattcccaggctcagtgcaggatccaggcctgcatgtgtggcgggtggagaagctgaagccggtgcctgtggcgcaagagaaccagggcgtcttcttctcgggggactcctacctagtgctgcacaatggcccagaagaggtttcccatctgcacctgtggataggccagcagtcatcccgggatgagcagggggcctgtgccgtgctggctgtgcacctcaacacgctgctgggagagcggcctgtgcagcaccgcgaggtgcagggcaatgagtctgacctcttcatgagctacttcccacggggcctcaagtaccaggaaggtggtgtggagtcagcatttcacaagacctccacaggagccccagctgccatcaagaaactctaccaggtgaaggggaagaagaacatccgtgccaccgagcgggcactgaactgggacagcttcaacactggggactgcttcatcctggacctgggccagaacatcttcgcctggtgtggtggaaagtccaacatcctggaacgcaacaaggcgagggacctggccctggccatccgggacagtgagcgacagggcaaggcccaggtggagattgtcactgatggggaggagcctgctgagatgatccaggtcctgggccccaagcctgctctgaaggagggcaaccctgaggaagacctcacagctgacaaggcaaatgcccaggccgcagctctgtataaggtctctgatgccactggacagatgaacctgaccaaggtggctgactccagcccctttgcccttgaactgctgatatctgatgactgctttgtgctggacaacgggctctgtggcaagatctatatctggaaggggcgaaaagcgaatgagaaggagcggcaggcagccctgcaggtggccgagggcttcatctcgcgcatgcagtacgccccgaacactcaggtggagattctgcctcagggccgtgagagtcccatcttcaagcaatttttcaaggactggaaatgagggtgggcgtcttcctgccccatgctcccctgccccccaccacctgcctgcttgcttctctggctgcctggtcagtgcagaggtgccccctgcagatgttcaataaaggagacaagtgctttccc

SEQ ID NO: 466 - protein, 348 aa, Homo sapien
MYTAIPQSGSPFPGSVQDPGLHVWRVEKLKPVPVAQENQGVFFSGDSYLVLHNGPEEVSHLHLWIGQQSSRDEQGACAVLAVHLNTLLGERPVQHREVQGNESDLFMSYFPRGLKYQEGGVESAFHKTSTGAPAAIKKLYQVKGKKNIRATERALNWDSFNTGDCFILDLGQNIFAWCGGKSNILERNKARDLALAIRDSERQGKAQVEIVTDGEEPAEMIQVLGPKPALKEGNPEEDLTADKANAQAAALYKVSDATGQMNLTKVADSSPFALELLISDDCFVLDNGLCGKIYIWKGRKANEKERQAALQVAEGFISRMQYAPNTQVEILPQGRESPIFKQFFKDWK

SEQ ID NO: 467 - DNA, 3195 bp, Homo sapien
agaggcttccctggctggtgcctgagcccggcgtccctcgccccccgccctccccgcatccctctcctccctcgcgcctggccctgtggctcttcctccctccctccttccccccccccccacccctcgcccgctgcctccctcggcccagccagctgtgccggcgtttgttggctgccctgcgcccggccctccagccagccttctgccggccccgccgcgatggaggtgccccagccggagcccgcgccaggctcggctctcagtccagcaggcgtgtgcggtggcgcccagcgtccgggccacctcccgggcctcctgctgggatctcatggcctcctggggtccccggtgcgggcggccgcttcctcgccggtcaccaccctcacccagaccatgcacgacctcgccgggctcggcagccgcagccgcctgacgcacctatccctgtctcgacgggcatccgaatcctccctgtcgtctgaatcctccgaatcttctgatgcaggtctctgcatggattcccccagccctatggacccccacatggcggagcagacgtttgaacaggccatccaggcagccagccggatcattcgaaacgagcagtttgccatcagacgcttccagtctatgccggtgaggctgctgggccacagccccgtgcttcggaacatcaccaactcccaggcgcccgacggccggaggaagagcgaggcgggcagtggagctgccagcagctctggggaagacaaggagaatgtgcgcttctggaaggccggggtgggagctctccgggaagaggagggggcatgctggggtggttccctggcatgtgaggaccctcctctcccatcttggctgcaggatggatttgtcttcaagatgccatggaagcccacacatcccagctccacccatgctctggcagagtgggccagccgcagggaagcctttgcccagagacccagctcggcccccgacctgatgtgtctcagtcctgaccggaagatggaagtggaggagctcagccccctggccctaggtcgcttctctctgacccctgcagagggggatactgaggaagatgatggatttgtggacatcctagagagtgacttaaaggatgatgatgcagttcccccaggcatggagagtctcattagtgccccactggtcaagaccttggaaaaggaagaggaaaaggacctcgtcatgtacagcaagtgccagcggctcttccgctctccgtccatgccctgcagcgtgatccggcccatcctcaagaggctggagcggccccaggacagggacacgcccgtgcagaataagcggaggcggagcgtgacccctcctgaggagcagcaggaggctgaggaacctaaagcccgcgtcctccgctcaaaatcactgtgtcacgatgagatcgagaacctcctggacagtgaccaccgagagctgattggagattactctaaggccttcctcctacagacagtagacggaaagcaccaagacctcaagtacatctcaccagaaacgatggtggccctattgacgggcaagttcagcaacatcgtggataagtttgtgattgtagactgcagatacccctatgaatatgaaggcgggcacatcaagactgcggtgaacttgcccctggaacgcgacgccgagagcttcctactgaagagccccatcgcgccctgtagcctggacaagagagtcatcctcattttccactgtgaattctcatctgagcgtgggccccgcatgtgccgtttcatcagggaacgagaccgtgctgtcaacgactaccccagcctctactaccctgagatgtatatcctgaaaggcggctacaaggagttcttccctcagcacccgaacttctgtgaaccccaggactaccggcccatgaaccacgaggccttcaaggatgagctaaagaccttccgcctcaagactcgcagctgggctggggagcggagccggcgggagctctgtagccggctgcaggaccagtgaggggcctgcgccagtcctgctacctcccttgcctttcgaggcctgaagccagctgccctatgggcctgccgggctgagggcctgctggaggcctcaggtgctgtccatgggaaagatggtgtggtgtcctgcctgtctgccccagcccagattcccctgtgtcatcccatcattttccatatcctggtgccccccacccctggaagagcccagtctgttgagttagttaagttgggttaataccagcttaaaggcagtattttgtgtcctccaggagcttcttgtttccttgttagggttaacccttcatcttcctgtgtcctgaaacgctcctttgtgtgtgtgtcagctgaggctggggagagccgtggtccctgaggatgggtcagagctaaactccttcctggcctgagagtcagctctctgccctgtgtacttcccgggccagggctgcccctaatctctgtaggaaccgtggtatgtctgccatgttgcccctttctcttttcccctttcctgtcccaccatacgagcacctccagcctgaacagaagctcttactctttcctatttcagtgttacctgtgtgcttggtctgtttgactttacgcccatctcaggacacttccgtagactgtttaggttcccctgtcaaatatcagttacccactcggtcccagttttgttgccccagaaagggatgttattatccttgggggctcccagggcaagggttaaggcctgaatcatgagcctgctggaagcccagcccctactgctgtgaaccctggggcctgactgctcagaacttgctgctgtcttgttgcggatggatggaaggttggatggatgggtggatggccgtggatggccgtggatgcgcagtgccttgcatacccaaaccaggtgggagcgttttgttgagcatgacacctgcagcaggaatatatgtgtgcctatttgtgtggacaaaaatatttacacttagggtttggagctattcaagaggaaatgtcacagaagcagctaaaccaaggactgagcaccctctggattctgaatctcaagatgggggcagggctgtgcttgaaggccctgctgagtcatctgttagggccttggttcaataaagcactgagcaagttgagaaaaaaaaaaaaaaaaaaa

SEQ ID NO: 468 - protein, 601 aa, Homo sapien
MEVPQPEPAPGSALSPAGVCGGAQRPGHLPGLLLGSHGLLGSPVRAAASSPVTTLTQTMHDLAGLGSRSRLTHLSLSRRASESSLSSESSESSDAGLCMDSPSPMDPHMAEQTFEQAIQAASRIIRNEQFAIRRFQSMPVRLLGHSPVLRNITNSQAPDGRRKSEAGSGAASSSGEDKENVRFWKAGVGALREEEGACWGGSLACEDPPLPSWLQDGFVFKMPWKPTHPSSTHALAEWASRREAFAQRPSSAPDLMCLSPDRKMEVEELSPLALGRFSLTPAEGDTEEDDGFVDILESDLKDDDAVPPGMESLISAPLVKTLEKEEEKDLVMYSKCQRLFRSPSMPCSVIRPILKRLERPQDRDTPVQNKRRRSVTPPEEQQEAEEPKARVLRSKSLCHDEIENLLDSDHRELIGDYSKAFLLQTVDGKHQDLKYISPETMVALLTGKFSNIVDKFVIVDCRYPYEYEGGHIKTAVNLPLERDAESFLLKSPIAPCSLDKRVILIFHCEFSSERGPRMCRFIRERDRAVNDYPSLYYPEMYILKGGYKEFFPQHPNFCEPQDYRPMNHEAFKDELKTFRLKTRSWAGERSRRELCSRLQDQ

SEQ ID NO: 469 - DNA, 4788 bp, Homo sapien
tttttagaaaaaaaaaatatatttccctcctgctccttctgcgttcacaagctaagttgtttatctcggctgcggcgggaactgcggacggtggcgggcgagcggctcctctgccagagttgatattcactgatggactccaaagaatcattaactcctggtagagaagaaaaccccagcagtgtgcttgctcaggagaggggagatgtgatggacttctataaaaccctaagaggaggagctactgtgaaggtttctgcgtcttcaccctcactggctgtcgcttctcaatcagactccaagcagcgaagacttttggttgattttccaaaaggctcagtaagcaatgcgcagcagccagatctgtccaaagcagtttcactctcaatgggactgtatatgggagagacagaaacaaaagtgatgggaaatgacctgggattcccacagcagggccaaatcagcctttcctcgggggaaacagacttaaagcttttggaagaaagcattgcaaacctcaataggtcgaccagtgttccagagaaccccaagagttcagcatccactgctgtgtctgctgcccccacagagaaggagtttccaaaaactcactctgatgtatcttcagaacagcaacatttgaagggccagactggcaccaacggtggcaatgtgaaattgtataccacagaccaaagcacctttgacattttgcaggatttggagttttcttctgggtccccaggtaaagagacgaatgagagtccttggagatcagacctgttgatagatgaaaactgtttgctttctcctctggcgggagaagacgattcattccttttggaaggaaactcgaatgaggactgcaagcctctcattttaccggacactaaacccaaaattaaggataatggagatctggttttgtcaagccccagtaatgtaacactgccccaagtgaaaacagaaaaagaagatttcatcgaactctgcacccctggggtaattaagcaagagaaactgggcacagtttactgtcaggcaagctttcctggagcaaatataattggtaataaaatgtctgccatttctgttcatggtgtgagtacctctggaggacagatgtaccactatgacatgaatacagcatccctttctcaacagcaggatcagaagcctatttttaatgtcattccaccaattcccgttggttccgaaaattggaataggtgccaaggatctggagatgacaacttgacttctctggggactctgaacttccctggtcgaacagttttttctaatggctattcaagccccagcatgagaccagatgtaagctctcctccatccagctcctcaacagcaacaacaggaccacctcccaaactctgcctggtgtgctctgatgaagcttcaggatgtcattatggagtcttaacttgtggaagctgtaaagttttcttcaaaagagcagtggaaggacagcacaattacctatgtgctggaaggaatgattgcatcatcgataaaattcgaagaaaaaactgcccagcatgccgctatcgaaaatgtcttcaggctggaatgaacctggaagctcgaaaaacaaagaaaaaaataaaaggaattcagcaggccactacaggagtctcacaagaaacctctgaaaatcctggtaacaaaacaatagttcctgcaacgttaccacaactcacccctaccctggtgtcactgttggaggttattgaacctgaagtgttatatgcaggatatgatagctctgttccagactcaacttggaggatcatgactacgctcaacatgttaggagggcggcaagtgattgcagcagtgaaatgggcaaaggcaataccaggtttcaggaacttacacctggatgaccaaatgaccctactgcagtactcctggatgtttcttatggcatttgctctggggtggagatcatatagacaatcaagtgcaaacctgctgtgttttgctcctgatctgattattaatgagcagagaatgactctaccctgcatgtacgaccaatgtaaacacatgctgtatgtttcctctgagttacacaggcttcaggtatcttatgaagagtatctctgtatgaaaaccttactgcttctctcttcagttcctaaggacggtctgaagagccaagagctatttgatgaaattagaatgacctacatcaaagagctaggaaaagccattgtcaagagggaaggaaactccagccagaactggcagcggttttatcaactgacaaaactcttggattctatgcatgaagtggttgaaaatctccttaactattgcttccaaacatttttggataagaccatgagtattgaattccccgagatgttagctgaaatcatcaccaatcagataccaaaatattcaaatggaaatatcaaaaaacttctgtttcatcaaaagtgactgccttaataagaatggttgccttaaagaaagtcgaattaatagcttttattgtataaactatcagtttgtcctgtagaggttttgttgttttattttttattgttttcatctgttgttttgttttaaatacgcactacatgtggtttatagagggccaagacttggcaacagaagcagttgagtcgtcatcacttttcagtgatgggagagtagatggtgaaatttattagttaatatatcccagaaattagaaaccttaatatgtggacgtaatctccacagtcaaagaaggatggcacctaaaccaccagtgcccaaagtctgtgtgatgaactttctcttcatactttttttcacagttggctggatgaaattttctagactttctgttggtgtatcccccccctgtatagttaggatagcatttttgatttatgcatggaaacctgaaaaaaagtttacaagtgtatatcagaaaagggaagttgtgccttttatagctattactgtctggttttaacaatttcctttatatttagtgaactacgcttgctcattttttcttacataattttttattcaagttattgtacagctgtttaagatgggcagctagttcgtagctttcccaaataaactctaaacattaatcaatcatctgtgtgaaaatgggttggtgcttctaacctgatggcacttagctatcagaagaccacaaaaattgactcaaatctccagtattcttgtcaaaaaaaaaaaaaaaaaagctcatattttgtatatatctgcttcagtggagaattatataggttgtgcaaattaacagtcctaactggtatagagcacctagtccagtgacctgctgggtaaactgtggatgatggttgcaaaagactaatttaaaaaataactaccaagaggccctgtctgtacctaacgccctatttttgcaatggctatatggcaagaaagctggtaaactatttgtctttcaggaccttttgaagtagtttgtataacttcttaaaagttgtgattccagataaccagctgtaacacagctgagagacttttaatcagacaaagtaattcctctcactaaactttacccaaaaactaaatctctaatatggcaaaaatggctagacacccattttcacattcccatctgtcaccaattggttaatctttcctgatggtacaggaaagctcagctactgatttttgtgatttagaactgtatgtcagacatccatgtttgtaaaactacacatccctaatgtgtgccatagagtttaacacaagtcctgtgaatttcttcactgttgaaaattattttaaacaaaatagaagctgtagtagccctttctgtgtgcaccttaccaactttctgtaaactcaaaacttaacatatttactaagccacaagaaatttgatttctattcaaggtggccaaattatttgtgtaatagaaaactgaaaatctaatattaaaaatatggaacttctaatatatttttatatttagttatagtttcagatatatatcatattggtattcactaatctgggaagggaagggctactgcagctttacatgcaatttattaaaatgattgtaaaatagcttgtatagtgtaaaataagaatgatttttagatgagattgttttatcatgacatgttatatattttttgtaggggtcaaagaaatgctgatggataacctatatgatttatagtttgtacatgcattcatacaggcagcgatggtctcagaaaccaaacagtttgctctaggggaagagggagatggagactggtcctgtgtgcagtgaaggttgctgaggctctgacccagtgagattacagaggaagttatcctctgcctcccattctgaccacccttctcattccaacagtgagtctgtcagcgcaggtttagtttactcaatctccccttgcactaaagtatgtaaagtatgtaaacaggagacaggaaggtggtgcttacatccttaaaggcaccatctaatagcgggttactttcacatacagccctcccccagcagttgaatgacaacagaagcttcagaagtttggcaatagtttgcatagaggtaccagcaatatgtaaatagtgcagaatctcataggttgccaataatacactaattcctttctatcctacaacaagagtttatttccaaataaaatgaggacatgtttttgttttctttgaatgctttttgaatgttatttgttattttcagtattttggagaaattatttaataaaaaaacaatcatttgctttttg

SEQ ID NO: 470 - protein, 777 aa, Homo sapien
MDSKESLTPGREENPSSVLAQERGDVMDFYKTLRGGATVKVSASSPSLAVASQSDSKQRRLLVDFPKGSVSNAQQPDLSKAVSLSMGLYMGETETKVMGNDLGFPQQGQISLSSGETDLKLLEESIANLNRSTSVPENPKSSASTAVSAAPTEKEFPKTHSDVSSEQQHLKGQTGTNGGNVKLYTTDQSTFDILQDLEFSSGSPGKETNESPWRSDLLIDENCLLSPLAGEDDSFLLEGNSNEDCKPLILPDTKPKIKDNGDLVLSSPSNVTLPQVKTEKEDFIELCTPGVIKQEKLGTVYCQASFPGANIIGNKMSAISVHGVSTSGGQMYHYDMNTASLSQQQDQKPIFNVIPPIPVGSENWNRCQGSGDDNLTSLGTLNFPGRTVFSNGYSSPSMRPDVSSPPSSSSTATTGPPPKLCLVCSDEASGCHYGVLTCGSCKVFFKRAVEGQHNYLCAGRNDCIIDKIRRKNCPACRYRKCLQAGMNLEARKTKKKIKGIQQATTGVSQETSENPGNKTIVPATLPQLTPTLVSLLEVIEPEVLYAGYDSSVPDSTWRIMTTLNMLGGRQVIAAVKWAKAIPGFRNLHLDDQMTLLQYSWMFLMAFALGWRSYRQSSANLLCFAPDLIINEQRMTLPCMYDQCKHMLYVSSELHRLQVSYEEYLCMKTLLLLSSVPKDGLKSQELFDEIRMTYIKELGKAIVKREGNSSQNWQRFYQLTKLLDSMHEVVENLLNYCFQTFLDKTMSIEFPEMLAEIITNQIPKYSNGNIKKLLFHQK

SEQ ID NO: 471 - DNA, 3568 bp, Homo sapien
ccggtcctgagacacgctgtgtggctgaaaagtgaaggcaagagctcatttggcctctgtgctcccctccgcaagggatcgtttctccagaagagctggatattctttcgcccagttatggcagacaagttaacgagaattgctattgtcaaccatgacaaatgtaaacctaagaaatgtcgacaggaatgcaaaaagagttgtcctgtagttcgaatgggaaaattatgcatagaggttacaccccagagcaaaatagcatggatttccgaaactctttgtattggttgtggtatctgtattaagaaatgcccctttggcgccttatcaattgtcaatctaccaagcaacttggaaaaagaaaccacacatcgatattgtgccaatgccttcaaacttcacaggttgcctatccctcgtccaggtgaagttttgggattagttggaactaatggtattggaaagtcagctgctttaaaaattttagcaggaaaacaaaagccaaaccttggaaagtacgatgatcctcctgactggcaggagattttgacttatttccgtggatctgaattacaaaattactttacaaagattctagaagatgacctaaaagccatcatcaaacctcaatatgtagccagattcctaaggctggcaaaggggacagtgggatctattttggaccgaaaagatgaaacaaagacacaggcaattgtatgtcagcagcttgatttaacccacctaaaagaacgaaatgttgaagatctttcaggaggagagttgcagagatttgcttgtgctgtcgtttgcatacagaaagctgatattttcatgtttgatgagccttctagttacctagatgtcaagcagcgtttaaaggctgctattactatacgatctctaataaatccagatagatatatcattgtggtggaacatgatctaagtgtattagactatctctccgacttcatctgctgtttatatggtgtaccaagcgcctatggagttgtcactatgccttttagtgtaagagaaggcataaacatttttttggatggctatgttccaacagaaaacttgagattcagagatgcatcacttgtttttaaagtggctgagacagcaaatgaagaagaagttaaaaagatgtgtatgtataaatatccaggaatgaagaaaaaaatgggagaatttgagctagcaattgtagctggagagtttacagattctgaaattatggtgatgctgggggaaaatggaacgggtaaaacgacatttatcagaatgcttgctggaagacttaaacctgatgaaggaggagaagtaccagttctaaatgtcagttataagccacagaaaattagtcccaaatcaactggaagtgttcgccagttactacatgaaaagataagagatgcttatactcacccacaatttgtgaccgatgtaatgaagcctctgcaaattgaaaacatcattgatcaagaggtgcagacattatctggtggtgaactacagcgagtacgtttacgcctttgcttgggcaaacctgctgatgtctatttaattgatgaaccatctgcatatttggattctgagcaaagactgatggcagctcgagttgtcaaacgtttcatactccatgcaaaaaagacagcctttgttgtggaacatgacttcatcatggccacctatctagcggatcgcgtcatcgtttttgatggtgttccatctaagaacacagttgcaaacagtcctcaaacccttttggctggcatgaataaatttttgtctcagcttgaaattacattcagaagagatccaaacaactataggccacgaataaacaaacttaattcaattaaggatgtagaacaaaagaagagtggaaactactttttcttggatgattagactgactctgagaatattgataagccatttattaaaaggagtatttactagaattttttgtcatataaaacttgaatcaggattttatgccccacatactctggaacttgaagtataatatacttaatataacataaaaagccagttgggttctaaattgtagttgaaacacagaaaatgccacttttctgttcctgaagaggctcttttgtgcataatattctaaaatgaagacatttcaagctatacaaattacttccaagttttcatgatgtatgggaagattttcagtaggtgtattatattcacggtaccaaatgctgaccagtgttgctccattttttaaatcttgaaaagggtttctgtacttacctggtttgccaagtatgccagtgtaatgaaactgcccttattttaaaagccagtcaaagattccactgattgacatttgataaataaacatcaggattatgtttattgtttgttttcagtctttgcactatattaccagtatatggtttccgaggaagattatctactgcaaaacaccactgttggaaaaataggtatttttaaattgtttttaatccttttttggtgcttttaaacatgtttaagcaaaaaccaattcagtccattccccgcaaaaaacccctaactttactctgaactttttttgtttttgcattccatgaggttctgtattcagtcattctctaggtaatgtcatttttgtacacatatatttatataatcactgattgagatttaggaaaaagcatttctaaagaatatttgcttcccttagaactacagactcgaaatctttaaagatggtgcctaagcatctatgtattttttttaagttccacagatttttctgttgggcaggccaaggattataaaccacttccctaaaggcaacattaatgcaaaagtccccagatggcaatacaaagtatcccctggtaccacatatattcatttgtgagtttggatatagagcacattatctaaaccattttgtagttccaaaaacccatctaaatttcttgagttcctgaattttgaacaggattacctggagcctggagccactttaagttgtacttctgactaaactggaattatgagtgaggaagagtgtttactaaataaatgactggggcaagcaaaattgaggaggaaattagaaactgtttgacaaactttaagagctacttgaaataacagaagtcttgattaatatgcaaataatggctagaaagtatggtttaactggaccctattatgccttttaaaaataatttcagtaacccataaatacatgttgtaaaaaattcaaatatacagaatggaataaaaaaatgatctccctttattaccctcccaaaggttaccagcgtttgaatttaataatgtatattctttcatgcttttttctgtgcacttacctaagtgtgaatatgtaaagggtttgttttgtatacaaatgggattatactaaaataagtaatgcctatttttaaggataggttaaatttgtgaatgatcatttcaaatatattgaataaaataagcaaaagctattgttatttactgatcctgaaaaaaaaaaaaaaaaaaaaaaaaaaaaaaaaaaaaaaaaaaa

SEQ ID NO: 472 - protein, 599 aa, Homo sapien
MADKLTRIAIVNHDKCKPKKCRQECKKSCPVVRMGKLCIEVTPQSKIAWISETLCIGCGICIKKCPFGALSIVNLPSNLEKETTHRYCANAFKLHRLPIPRPGEVLGLVGTNGIGKSAALKILAGKQKPNLGKYDDPPDWQEILTYFRGSELQNYFTKILEDDLKAIIKPQYVARFLRLAKGTVGSILDRKDETKTQAIVCQQLDLTHLKERNVEDLSGGELQRFACAVVCIQKADIFMFDEPSSYLDVKQRLKAAITIRSLINPDRYIIVVEHDLSVLDYLSDFICCLYGVPSAYGVVTMPFSVREGINIFLDGYVPTENLRFRDASLVFKVAETANEEEVKKMCMYKYPGMKKKMGEFELAIVAGEFTDSEIMVMLGENGTGKTTFIRMLAGRLKPDEGGEVPVLNVSYKPQKISPKSTGSVRQLLHEKIRDAYTHPQFVTDVMKPLQIENIIDQEVQTLSGGELQRVRLRLCLGKPADVYLIDEPSAYLDSEQRLMAARVVKRFILHAKKTAFVVEHDFIMATYLADRVIVFDGVPSKNTVANSPQTLLAGMNKFLSQLEITFRRDPNNYRPRINKLNSIKDVEQKKSGNYFFLDD

SEQ ID NO: 473 - DNA, 4064 bp, Homo sapien
ctgcggccgcctggtttcttgccttaaggagcccattgcctttcccgctgaagtctagatgttgacatgtaataaagcgggcagcaggatggtggtggatgcggccaactccaatgggcctttccagcccgtggtccttctccatattcgagatgttcctcctgctgatcaagagaagctttttatccagaagttacgtcagtgttgcgtcctctttgactttgtttctgatccactaagtgacctaaagtggaaggaagtaaaacgagctgctttaagtgaaatggtagaatatatcacccataatcggaatgtgatcacagagcctatttacccagaagtagtccatatgtttgcagttaacatgtttcgaacattaccaccttcctccaatcctacgggagcggaatttgacccggaggaagatgaaccaacgttagaagcagcctggcctcatctacagcttgtttatgaatttttcttaagatttttagagtctccagatttccaacctaatatagcgaagaaatatattgatcagaagtttgtattgcagcttttagagctctttgacagtgaagatcctcgggagagagattttcttaaaaccacccttcacagaatctatgggaaattcctaggcttgagagcttacatcagaaaacagataaataatatattttataggtttatttatgaaacagagcatcataatggcatagcagagttactggaaatattgggaagtataattaatggatttgccttaccactaaaagaagagcacaagattttcttattgaaggtgttactacctttgcacaaagtgaaatctctgagtgtctaccatccccagctggcatactgtgtagtgcagtttttagaaaaggacagcaccctcacggaaccagtggtgatggcacttctcaaatactggccaaagactcacagtccaaaagaagtaatgttcttaaacgaattagaagagattttagatgtcattgaaccatcagaatttgtgaagatcatggaacccctcttccggcagttggccaaatgtgtctccagcccacacttccaggtggcagagcgagctctctattactggaataatgaatacatcatgagtttaatcagtgacaacgcagcgaagattctgcccatcatgtttccttccttgtaccgcaactcaaagacccattggaacaagacaatacatggcttgatatacaacgccctgaagctcttcatggagatgaaccaaaagctatttgatgactgtacacaacagttcaaagcagagaaactaaaagagaagctaaaaatgaaagaacgggaagaagcatgggttaaaatagaaaatctagccaaagccaatccccagtacacagtgtatagtcaagccagcaccatgagcattccggttgcaatggagacagatgggcctttatttgaagatgtgcagatgctgagaaagacagtgaaggacgaggctcatcaggcacagaaagatccgaagaaggaccgtcctcttgcactccgcaagtccgagctgcctcaggacccccacaccaagaaagccttggaagctcactgcagggccgatgagctggcctcccaggacggccgctagcctccggggcgccgcgtcggggccgggcccgccagttcttttccggattctgtagaaaatacatacttcctgtgccataccaatcagttacactcaaagctttcttggaccccgttccgtaggcaataacgtgcgtccgcctcagcgcgagattaggagttcaaacaatggtgacttcccagagcccgctggcagagccgcgggttgacgacggtgtcctcgcagtgtcgccgccaccccagcgtagtccaagtcagactatttcacaaagtcagagcgataggaaagcaccctgcccttcatcttcatgttctcccaaatggaacttaggatcttttaacataggtggttctgtgataacatcagtgttttccaaatcaaaggaacgctttaaaaaataggacctattttttaagactttacagcctttgaaatggtttccacgtgattgttacgccagcagttcttttgtttgtttttcaatctcagtgaaatggctctttgctttcgagttctcacgcaacgtactgggcaaatgacaatcctcagccgctggtattttctaaggggtctcttcactttgatgagtgacatgaacaccgtgtctccttctcttgtgtgtacctaaagccatatttccaagtctgtggtactccaggattccaggagtaagcctgtagaagagatttattttaaaagagattgctctgaaatttatcttaaaagagcttgctctgtctaccttgacagaaattggagttttaaaattatgtgttaatatttttatttgcagatttcgtttccgtcaacttaaacattgttgcccttcaacaaggctcttgaattaataaaattatagtctctaagaattccacattttatggaaagttagagcaaaatcattttgagttaagccagttcttagcctaatgcaaactgcagcgcctttaagcataaagtaacacaacagcattgcacggggccggcactgccgctgccttcactgaaggctgcagtgctgttctgagagcttggaggaggcaccagcgaggatgacgtttagtggagctctttctgttgaaaagagctcacgttatcaacaccttgtaaggaaaatacagtgtctgagttttcatcggtcttcacatgctgctatatattccacagagttccttgcatgtactgagcttttgttttagatggaatagcacaaggagaaaaatctttaaacttagtgctttgtctattctttatttctctcagggtggccagtattttgacttatttatcctgcttgaaagctacttgagatgtgtactgctattctaaacacgtgatctagtttctttcatctctggcataagattatataacttaatgttaagtgtcttgaggcataaaagacaaaatgtggcttattttaggatctgttttttcatcgaggtctcgggtatcctttcaaagatagtgagaagcagacactgctccttgtgcagctctggtacctcctgcccactgctgtcacttcaagccactggcaatgcttctgtcctcgtgtcttggaggaaaatcacctggggggaggggacttcttgtggtaagagcaagtgcaggtatgaaatgcgaagattgccccagctaaaagtggacaagtccgctttgtgagatgaatacttcctgagaaacttgacaagtatctctccattttaccattatgaaaactatcattaaaaaaaacagtttagatgccttctccttttgagggaaaaagggtgctttttattgtataaagcagcgtcttatgtattttgatataccattgtttgaacttccgtctttagctgatagattctcaaatatccttgattttggatgttcagtatgtttgtgagagaggtttctgggaagactctctttttgccctcgggaaaaagcaaaatatcaatgtttgggtgactgtgtaaagctcagtgtgtaagaacatctttttgtctaggttttctttctgctctttattgaagacaaacactcaccaaaaagaaaaataaaagttttcagagaaactaattttctttggcaagagtattacttaatattttggcctcctaaagtttccctagttagtactcggactcctgtgctaattgtcagcttacatatcattgtatagagactgtttattctgtaccaaactgatttcaaaagtactacattgaaaataaaccggtgactgtttttcttcataaagttctgcgtttggcatcttcactctttccaaaatgtatctgtacatcagaaatgtcactattccaagtgtctttttagtgtggcctttagtatggcttccttttaatattgtacatacattgtatctttgttttatggtaataagtaataaaaatgtagacttcaaaaaaaaaagcggccgcag

SEQ ID NO: 474 - protein, 514 aa, Homo sapien [sequence omitted]

SEQ ID NO: 475 - DNA, 2475 bp, Homo sapien
ccggaggagtccgagaggaagcggaggcgcgagctggaggcggcggctcccgtcggcctccggcaggactgagcgctgggaggccggaaggcgggcgcgcacggcggagaggcgggcgggaggccggagcatattaatgaaaagtgccataaactgaaaaaccaaacatgagggtagcaggtgctgcaaagttggtggtagctgtggcagtgtttttactgacattttatgttatttctcaagtatttgaaataaaaatggatgcaagtttaggaaatctatttgcaagatcagcattggacacagctgcacgttctacaaagcctcccagatataagtgtgggatctcaaaagcttgccctgagaagcattttgcttttaaaatggcaagtggagcagccaacgtggtgggacccaaaatctgcctggaagataatgttttaatgagtggtgttaagaataatgttggaagagggatcaatgttgccttggcaaatggaaaaacaggagaagtattagacactaaatattttgacatgtggggaggagatgtggcaccatttattgagtttctgaaggccatacaagatggaacaatagttttaatgggaacatacgatgatggagcaaccaaactcaatgatgaggcacggcggctcattgctgatttggggagcacatctattactaatcttggttttagagacaactgggtcttctgtggtgggaagggcattaagacaaaaagcccttttgaacagcacataaagaacaataaggatacaaacaaatatgaaggatggcctgaagttgtagaaatggaaggatgcatcccccagaagcaagactaatggaaatgtggagagaattgaagaaagcgcactttcactcttaatgggagagctataaatggcagagctatgtgtaaatattttaagagcatgcagccatcttggtgtgtgcatgagtattgtctcttttgatatcaggattatttattgctaacgtaaatagatagcattgtaaataatcatcacaatgatcaaatcactgaaccatgtctccgcacatttccctaaaagtacaatgtttagactgctatggtaatacatattttaaattctaaaagcatacacaatgtgtaactgaatggtttgtgaaaaatatattgatatatatactagttgctatgaaaatatcatggaataatagggattttagggtggatactttattttcttttatgtttctatatgttgcgttgtgatgacattatcttttaaattaaaaagagatttggctagttgtgtgtgtaatgttactttacagtccgactctcctgatgtacctcttttcatgatctttttctttccttcccaagaaactgaggaatgtttaatatgaaaacatacatcggatatgtgaaaagcacaacaaaattcttaatgtacacagtaaaaaagtaaatatataaatgtagatggcatttaggaccacagcttgctggatttgtgttagctatgggaataacttgattttgtataagctatttagagtgaggctggaggtggcagcttcacagaactggagaaccaggccaagtcccctccccaacctaattaggtcattcaggacagctaagtcagtatatttagagcaatactagcatacgtttttcttaattgttatcagcattgaccaagtggtttggaaggaggcatgctttaatatcacaataattttgatttgtaaaccaagaaattaatcctgtgtttatctaacttcataatagcaattattgcccgaagctatagtggcatatttacaaaagttcttattactgggcggactgataacatttaaaaaataattgtgtttgaccccaaatgactttatacccaattctacataaaaatatagaagatctatctttttttgttaccttcagatgttcactaaataactcagtttttaagcagaagttttcagggcattaaatatatgttgtgtatgaagtatctcaaactggaacataaatttagtgatcaaactgccattcacagtgtaaggcagcacttaaatttcgaacctaaagtttagatgcattgtataaaaaaacctaaaagcagtatctgttatttagctgtaaaccaagttggaagctattcggataatttcttaaatattgatgaactttggagtactgtttcttccttcaaactgaatgtaattaattcatgaataaatgcaccttatatgtttaaacaatctttgtatacttttgggatttttggtgcttatatgctaaatcacattcagcatgtgtattttgacatttaaaatacttccctcaattctgtaaattaaaagaatagttattttacagttccagggattgtgaaataaatgttgcagttttttaaaataatgaaaataaatactcttggttttgctttgtgaaaaaaaaaaaaaaaa

SEQ ID NO: 476 - protein, 227 aa, Homo sapien
MRVAGAAKLVVAVAVFLLTFYVISQVFEIKMDASLGNLFARSALDTAARSTKPPRYKCGISKACPEKHFAFKMASGAANVVGPKICLEDNVLMSGVKNNVGRGINVALANGKTGEVLDTKYFDMWGGDVAPFIEFLKAIQDGTIVLMGTYDDGATKLNDEARRLIADLGSTSITNLGFRDNWVFCGGKGIKTKSPFEQHIKNNKDTNKYEGWPEVVEMEGCIPQKQD

SEQ ID NO: 477 - DNA, 2562 bp, Homo sapien
agaggctacctatggtgaacgtgttgtagcctttgctgcagtggaaggcattttcttttccggttcttttgcgtcgatattctggctcaagaaacgaggactgatgcctggcctcacattttctaatgaacttattagcagagatgagggtttacactgtgattttgcttgcctgatgttcaaacacctggtacacaaaccatcggaggagagagtaagagaaataattatcaatgctgttcggatagaacaggagttcctcactgaggccttgcctgtgaagctcattgggatgaattgcactctaatgaagcaatacattgagtttgtggcagacagacttatgctggaactgggttttagcaaggttttcagagtagagaacccatttgactttatggagaatatttcactggaaggaaagactaacttctttgagaagagagtaggcgagtatcagaggatgggagtgatgtcaagtccaacagagaattcttttaccttggatgctgacttctaaatgaactgaagatgtgcccttacttggctgattttttttttccatctcataagaaaaatcagctgaagtgttaccaactagccacaccatgaattgtccgtaatgttcattaacagcatctttaaaactgtgtagctacctcacaaccagtcctgtctgtttatagtgctggtagtatcaccttttgccagaaggcctggctggctgtgacttaccatagcagtgacaatggcagtcttggctttaaagtgaggggtgaccctttagtgagcttagcacagcgggattaaacagtcctttaaccagcacagccagttaaaagatgcagcctcactgcttcaacgcagattttaatgtttacttaaatataaacctggcactttacaaacaaataaacattgtttgtactcacaaggcgataatagcttgatttatttggtttctacaccaaatacattctcctgaccactaatgggagccaattcacaattcactaagtgactaaagtaagttaaacttgtgtagactaagcatgtaatttttaagttttattttaatgaattaaaatatttgttaaccaactttaaagtcagtcctgtgtatacctagatattagtcagttggtgccagatagaagacaggttgtgtttttatcctgtggcttgtgtagtgtcctgggattctctgccccctctgagtagagtgttgtgggataaaggaatctctcagggcaaggagcttcttaagttaaatcactagaaatttaggggtgatctgggccttcatatgtgtgagaagccgtttcattttatttctcactgtattttcctcaacgtctggttgatgagaaaaaattcttgaagagttttcatatgtgggagctaaggtagtattgtaaaatttcaagtcatccttaaacaaaatgatccacctaagatcttgcccctgttaagtggtgaaatcaactagaggtggttcctacaagttgttcattctagttttgtttggtgtaagtaggttgtgtgagttaattcatttatatttactatgtctgttaaatcagaaattttttattatctatgttcttctagattttacctgtagttcatacttcagtcacccagtgtcttattctggcattgtctaaatctgagcattgtctagggggatcttaaactttagtaggaaaccatgagctgttaatacagtttccattcaaatattaatttcagaatgaaacataatttttttttttttttttgagatggagtctcgctctgttgcccaggctggagtgcagtggcgcgattttggctcactgtaacctccatctcctgggttcaagcaattctcctgtctcagcctccctagtagctgggactgcaggtatgtgctaccacacctggctaatttttgtatttttagtagagatggagtttcaccatattggccaggctggtcttgaactcctgacctcaggtgatccacccacctcggcctcccaaagtgctgggattgcaggcgtgataaacaaatattcttaatagggctactttgaattaatctgcctttatgtttgggagaagaaagctgagacattgcatgaaagatgatgagagataaatgttgatcttttggccccatttgttaattgtattcagtatttgaacgtcgtcctgtttattgttagttttcttcatcatttattgtatagacaatttttaaatctctgtaatatgatacattttcctatcttttaagttattgttacctaaagttaatccagattatatggtccttatatgtgtacaacattaaaatgaaaggctttgtcttgcattgtgaggtacaggcggaagttggaatcaggttttaggattctgtctctcattagctgaataatgtgaggattaacttctgccagctcagaccatttcctaatcagttgaaagggaaacaagtatttcagtctcaaaattgaataatgcacaagtcttaagtgattaaaataaaactgttcttatgtcaaaaaaaaaaaaaaa

SEQ ID NO: 478 - DNA, 1654 bp, Homo sapien
gaattcgggcggtcctcggagacacgcggcggtgtcctgtgttggccatggccgactacctgattagtgggggcacgtcctacgtgccagacgacggactcacagcacagcagctcttcaactgcggagacggcctcacctacaatgactttctcattctccctgggtacatcgacttcactgcagaccaggtggacctgacttctgctctgaccaagaaaatcactcttaagaccccactggtttcctctcccatggacacagtcacagaggctgggatggccatagcaatggcgcttacaggcggtattggcttcatccaccacaactgtacacctgaattccaggccaatgaagttcggaaagtgaagaaatatgaacagggattcatcacagaccctgtggtcctcagccccaaggatcgcgtgcgggatgtttttgaggccaaggcccggcatggtttctgcggtatcccaatcacagacacaggccggatggggagccgcttggtgggcatcatctcctccagggacattgattttctcaaagaggaggaacatgactgtttcttggaagagataatgacaaagagggaagacttggtggtagccccccgcagcatcacactgaaggaggcaaatgaaattctgcagcgcagcaagaagggaaagttgcccattgtaaatgaagatgatgagcttgtggccatcattgcccggacagacctgaagaagaatcgggactacccactagcctccaaagatgccaagaaacagctgctgtgtggggcagccattggcactcatgaggatgacaagtataggctggacttgctcgcccaggctggtgtggatgtagtggttttggactcttcccagggaaattccatcttccagatcaatatgatcaagtacatcaaagacaaataccctaatctccaagtcattggaggcaatgtggtcactgctgcccaggccaagaacctcattgatgcaggtgtggatgccctgcgggtgggcatgggaagtggctccatctgcattacgcaggaagtgctggcctgtgggcggccccaagcaacagcagtgtacaaggtgtcagagtatgcacggcgctttggtgttccggtcattgctgatggaggaatccaaaatgtgggtcatattgcgaaagccttggcccttggggcctccacagtcatgatgggctctctcctggctgccaccactgaggcccctggtgaatacttcttttccgatgggatccggctaaagaaatatcgcggtatgggttctctcgatgccatggacaagcacctcagcagccagaacagatatttcagtgaagctgacaaaatcaaagtggcccagggagtgtctggtgctgtgcaggacaaagggtcaatccacaaatttgtcccttacctgattgctggcatccaacactcatgccaggacattggtgccaagagcttgacccaagtccgagccatgatgtactctggggagcttaagtttgagaagagaacgtcctcagcccaggtggaaggtggcgtccatagcctccattcgtatgagaagcggcttttctgaaaagggatccagcacacctcctcggtttttttttcaataaaagtttagaaagacccgaattc

SEQ ID NO: 479 - protein, 514 aa, Homo sapien
MADYLISGGTSYVPDDGLTAQQLFNCGDGLTYNDFLILPGYIDFTADQVDLTSALTKKITLKTPLVSSPMDTVTEAGMAIAMALTGGIGFIHHNCTPEFQANEVRKVKKYEQGFITDPVVLSPKDRVRDVFEAKARHGFCGIPITDTGRMGSRLVGIISSRDIDFLKEEEHDCFLEEIMTKREDLVVAPRSITLKEANEILQRSKKGKLPIVNEDDELVAIIARTDLKKNRDYPLASKDAKKQLLCGAAIGTHEDDKYRLDLLAQAGVDVVVLDSSQGNSIFQINMIKYIKDKYPNLQVIGGNVVTAAQAKNLIDAGVDALRVGMGSGSICITQEVLACGRPQATAVYKVSEYARRFGVPVIADGGIQNVGHIAKALALGASTVMMGSLLAATTEAPGEYFFSDGIRLKKYRGMGSLDAMDKHLSSQNRYFSEADKIKVAQGVSGAVQDKGSIHKFVPYLIAGIQHSCQDIGAKSLTQVRAMMYSGELKFEKRTSSAQVEGGVHSLHSYEKRLF

SEQ ID NO: 480 - DNA, 717 bp, Mus musculus
agagcgatcatgtcgcacaaacaaatttactattcggacaaatacgacgacgaggagtttgagtatcgacatgtcatgctgcccaaggacatagccaagctggtccctaaaacccatctgatgtctgaatctgaatggaggaatcttggcgttcagcagagtcagggatgggtccattatatgatccatgaaccagaacctcacatcttgctgttccggcgcccactacccaagaaaccaaagaaatgaagctggcaagctacttttcagcctcaagctttacacagctgtccttacttcctaacatctttctgataacattattatgttgccttcttgtttctcactttgatatttaaaagatgttcaatacactgtttgaatgtgctggtaactgctttgcttcttgagtagagccaccaccaccatagcccagccagatgagtgctctgtggacccacagcctaagctgagtgtgaccccagaagccacgatgtgctctgtatccagaacacacttggcagatggaggaagcatctgagtttgagaccatggctgttacagggatcatgtaaacttgctgtttttgttttttctgccgggtgttgtatgtgtggtgacttgcggatttatgtttcagtgtactggaaactttccattttattcaagaaatctgttcatgttaaaagccttgattaaagaggaagtttttataat

SEQ ID NO: 481 - protein, 79 aa, Mus musculus [sequence omitted]

SEQ ID NO: 482 - DNA, 1985 bp, Homo sapien
tactgactttcagcaccaacttgtggtcccaggtaagtttccacgctggtactttagccctgggctcgaacctgcggacacgctgtggctgcaactccccgcccgccagacctcagtacgcagcgcggctggtgagaaacataatgcactctgacttccacgcgtggaatggggagatggactgcacggcgggcggacctgctcgggctgatggacggcaggtggactgatgtgcgcagggactggcggcagcgcggtcagagccagtcagccaaagccaggccagcacaatagactgtcccggttcccgccaggaggcggccgagcaccaactgtacggtactgcgcctgcgccgcgaccgccaacgcgcccagtctacgcttgcgcggcgcaacagggccgactgcagctggaagatggcggcgtccgtggtctgtcgggccgctaccgccggggcacaagtgctattgcgcgcccgccgctcgccggccctgctgcggacgccagccttgcggagtacggcaaccttcgctcaggcgctccagttcgtgccggagacgcaggttagcctgctggacaacggcctgcgtgtggcctccgagcagtcctctcagcccacttgcacggtgggagtgtggattgatgttggcagccgttttgagactgagaagaataatggggcaggctactttttggagcatctggctttcaagggaacaaagaatcggcctggcagtgccctggagaaggaggtggagagcatgggggcccatcttaatgcctacagcacccgggagcacacagcttactacatcaaggcgctgtccaaggatctgccgaaagctgtggagctcctgggtgacattgtgcagaactgtagtctggaagactcacagattgagaaggaacgtgatgtgatcctgcgggagatgcaggagaatgatgcatctatgcgagatgtggtctttaactacctgcatgccacagcattccagggcacacctctagcccaggctgtggaggggcccagtgagaatgtcaggaagctgtctcgtgcagacttgaccgagtacctcagcacacattacaaggcccctcgaatggtgctggcagcagctggaggagtggagcaccagcaactgttagacctcgcccagaagcacctcggtggcatcccatggacatatgcagaggacgctgtgcccactcttactccatgccgcttcactggcagtgagatccgccaccgtgatgatgctctaccttttgcccacgtggccattgcagtagagggtcctggctgggccagcccggacagtgtggccttgcaagtggccaatgccatcatcggccactatgactgcacttatggtggtggcgtgcacctgtccagcccactggcttcaggtgctgtggccaacaagctatgccagagtttccagaccttcagcatctgctatgcagagacgggcttgctgggtgcacactttgtctgtgaccgaatgaaaatcgatgacatgatgttcgtcctgcaagggcagtggatgcgcctgtgtaccagtgccacggagagtgaggtggcccggggcaaaaacatcctcagaaatgccctggtatctcatctagatggcactactcctgtgtgtgaggacatcggacgcagcctcctgacctatggccgccgcatccccctggctgaatgggaaagccggattgcggaggtggatgccagtgtggtacgtgagatctgctccaagtacatctatgaccagtgcccagcagtggctggatatggccccattgagcagctcccagactacaaccggatccgtagcggcatgttctggctgcgcttctaggcgggaagcctatgtaagcaagagggcagggccggggtttgtggtcccccccccaccacaaacacagcacttcggctcctctaacctgtgccacaggtgaccaccaataaaatcctctgctgaga

SEQ ID NO: 483 - protein, 480 aa, Homo sapien
MAASVVCRAATAGAQVLLRARRSPALLRTPALRSTATFAQALQFVPETQVSLLDNGLRVASEQSSQPTCTVGVWIDVGSRFETEKNNGAGYFLEHLAFKGTKNRPGSALEKEVESMGAHLNAYSTREHTAYYIKALSKDLPKAVELLGDIVQNCSLEDSQIEKERDVILREMQENDASMRDVVFNYLHATAFQGTPLAQAVEGPSENVRKLSRADLTEYLSTHYKAPRMVLAAAGGVEHQQLLDLAQKHLGGIPWTYAEDAVPTLTPCRFTGSEIRHRDDALPFAHVAIAVEGPGWASPDSVALQVANAIIGHYDCTYGGGVHLSSPLASGAVANKLCQSFQTFSICYAETGLLGAHFVCDRMKIDDMMFVLQGQWMRLCTSATESEVARGKNILRNALVSHLDGTTPVCEDIGRSLLTYGRRIPLAEWESRIAEVDASVVREICSKYIYDQCPAVAGYGPIEQLPDYNRIRSGMFWLRF

SEQ ID NO: 484 - DNA, 931 bp, Homo sapien
cagagtttcgccatggcccggggccccaagaagcacttaaagcgtgttgcagcgccgaagcattggatgcttgacaaactaacgggtgtatttgcacctcgtccatcgacaggtccccacaagctgagggaatgtcttcctctgatcgtcttcctcaggaatagactcaagtatgcgttgactggagatgaggtaaagaagatatgtatgcaacgtttcatcaaaattgatggcaaggttcgagtggatgtcacataccctgctggattcatggatgtcatcagcatcgagaagacaggtgaacatttccgcctggtctatgacaccaagggccgttttgctgttcaccgcatcacagtggaagaggcaaagtacaagttgtgcaaagtgaggaagattactgtgggagtgaagggaatccctcacctggtgactcatgatgctcgaaccatccgctacccagatcctgtcatcaaggtgaacgatactgtgcagattgatttagggactggcaagataatcaactttatcaaatttgatacaggcaatttgtgtatggtgattggtggagccaacctcggtcgtgttggtgtgatcaccaacagggaaagacatcctggttcttttgatgtggtgcatgtgaaggatgccaatggcaacagctttgccacgaggctttccaacatttttgtcattggcaatggcaataaaccttggatttccctgcccaggggaaagggcattcgacttactgttgctgaagagagagataagaggctggccaccaaacagagcagtggctaaattgcagtagcagcatatctttttttctttgcacaaataaacagtgaattctcgtttaaaaaaaaaaaaaaaaaaaaaaaaaaaaaaaaaaaaaaaaaaaaaaaaaaaaaaaaaaaaaaaaaaaaaa

SEQ ID NO: 485 - protein, 263 aa, Homo sapien
MARGPKKHLKRVAAPKHWMLDKLTGVFAPRPSTGPHKLRECLPLIVFLRNRLKYALTGDEVKKICMQRFIKIDGKVRVDVTYPAGFMDVISIEKTGEHFRLVYDTKGRFAVHRITVEEAKYKLCKVRKITVGVKGIPHLVTHDARTIRYPDPVIKVNDTVQIDLGTGKIINFIKFDTGNLCMVIGGANLGRVGVITNRERHPGSFDVVHVKDANGNSFATRLSNIFVIGNGNKPWISLPRGKGIRLTVAEERDKRLATKQSSG

SEQ ID NO: 486 - DNA, 2587 bp, Homo sapien
ggcacacacgaggaggagggttgagctgctgccgccgccgcctctgtcgtcgtcgcgagtgtggagtcgggactggagctgctgccgcggcgacgccggggatctttgtcgctagctcccggcccttctgccccgccgccttccctcagtcagcgttgcccactcctctccggccgggcgcccctgcctccatttctcgctctctgtccaccacacacacggcccccccgatcatggatccgggcagtggcggcggcggcggcggcggcggcggcggcgggagcagcagcggcagcagcagcagcgactcggcgcctgactgctgggaccaggcggacatggaagcccccgggccgggcccttgcggcggcggcggcttccctggcggcggcggccgaggcccagcgggagaacctcagcgcggccttcagccggcaactcaacgtcaacgccaagcccttcgtgcccaacgtccacgccgccgagttcgtgccgtccttcctgcggggcccggcagcgccgccacccccagctggcggcgccgccaataaccacggagccggcagcggcgcgggaggccgtgcggcacctgtggaatcctctcaagaggaacagtcattgtgtgaaggttcaaattcagctgttagcatggaactttcagaacctattgtagaaaatggagagacagaaatgtctccagaagaatcatgggagcacaaagaagaaataagtgaagcagagccagggggtggttccttgggagatggaaggccgccagaggaaagtgcccatgaaatgatggaggaggaagaggaaatcccaaaacctaagtctgtggttgcaccgccaggtgctcctaagaaagagcatgtaaatgtagtattcattgggcacgtagatgctggcaagtcaaccattggaggacaaataatgtatttgactggaatggttgacaaaaggacgcttgaaaagtatgaaagagaagctaaagagaaaaacagagaaacttggtacttgtcttgggccttagacacaaatcaggaagaacgagacaagggtaaaacagtagaagtgggtcgtgcctattttgaaaccgaaaagaagcatttcacaattctagatgcccctggccacaagagttttgtcccaaatatgattggtggtgcctctcaagctgatttggctgtgctggtaatctcagccaggaaaggagagtttgaaactggatttgaaaaaggaggacagacaagagaacatgcaatgttggcaaagacagcaggtgtaaaacacctaattgtgctaattaataagatggatgatccaacagtaaattggagcaatgagagatatgaagaatgtaaggagaaactagtgccatttttgaaaaaagttggcttcaatcccaaaaaggacattcactttatgccctgctcaggacttactggagcaaatctcaaagagcagtcggatttctgtccttggtacattggattaccgtttattccatatctggataatttgccgaacttcaatagatcagttgatggaccaatcaggctgccaattgtggataagtacaaggatatgggcactgtggtcctgggaaagctggaatcaggatctatttgtaaaggccagcagcttgtgatgatgccaaacaagcacaacgtggaagttcttggaatactttccgatgatgtagagactgataccgtagccccaggtgaaaacctcaaaatcagactgaaaggaattgaagaagaggagattcttccagggtttatactttgtgatcctaataatctttgtcattctggacgcacatttgatgcccagatagtgattatagagcacaaatccatcatctgcccaggctataatgcggtgctgcatattcatacctgtattgaggaggtggaaataacagccttaatctgcttggtagacaaaaaatcaggagaaaaaagtaagacccgaccccgttttgtgaaacaagatcaagtatgcattgctcgcttaaggacagcaggaaccatctgccttgagacctttaaagacttccctcagatgggtcgtttcaccttaagagatgagggtaagaccattgcaattggaaaagttctgaaactggttccagagaaagactaagcattttcttgatgaccctgcacaatactgtgaggaaaattgactgcagaagcctacttcacaccgccttctcttattttctgcccattgataaacctctccccatattttgcaaagaggaaattcacagcaaaagtccacattatgtcagctttctcatattgagagctctgctatgccactgttgaatttttcccaagattcctgtccctagccctcacttcaaactctgcttccttggacagatttggcaatagctttgtaagtgatgtggacataattgcctacaataatgaaaacctacaggaatttttttatttttcattttccccttaggcatatttagtatttttcccccaggccagatcattcgtgagtgtgcgagtgtgtgtgcacatgttacaaaggcaactaccatgttaataaaatattcaatttg

SEQ ID NO: 487 - protein, 499 aa, Homo sapien
MELSEPIVENGETEMSPEESWEHKEEISEAEPGGGSLGDGRPPEESAHEMMEEEEEIPKPKSVVAPPGAPKKEHVNVVFIGHVDAGKSTIGGQIMYLTGMVDKRTLEKYEREAKEKNRETWYLSWALDTNQEERDKGKTVEVGRAYFETEKKHFTILDAPGHKSFVPNMIGGASQADLAVLVISARKGEFETGFEKGGQTREHAMLAKTAGVKHLIVLINKMDDPTVNWSNERYEECKEKLVPFLKKVGFNPKKDIHFMPCSGLTGANLKEQSDFCPWYIGLPFIPYLDNLPNFNRSVDGPIRLPIVDKYKDMGTVVLGKLESGSICKGQQLVMMPNKHNVEVLGILSDDVETDTVAPGENLKIRLKGIEEEEILPGFILCDPNNLCHSGRTFDAQIVIIEHKSIICPGYNAVLHIHTCIEEVEITALICLVDKKSGEKSKTRPRFVKQDQVCIARLRTAGTICLETFKDFPQMGRFTLRDEGKTIAIGKVLKLVPEKD

SEQ ID NO: 488 - DNA, 2001 bp, Homo sapien
gaagggcggcgcgcttaggcaggcggtggcgcggctggagtgccgcggggagggctgtgccggttgctttctgcagccgcatctcggccagctctcctcgccgtccccggggcgctgtgcgtctccagtccgggaccgaagccgcctgccgtagcgggcggccagatccgcgtcccgcctcagcggccggaggacatgcgggagagagaatgagccagagggacacgctggtgcatctgtttgccggaggatgtggtggtacagtgggagctattctgacatgtccactggaagttgtaaaaacacgactgcagtcatcttctgtgacgctttatatttctgaagttcagctgaacaccatggctggagccagtgtcaaccgagtagtgtctcccggacctcttcattgcctaaaggtgatcttggaaaaagaagggcctcgttccttgtttagaggactaggccccaatttagtgggggtagccccttccagagcaatatactttgctgcttattcaaactgcaaggaaaagttgaatgatgtatttgatcctgattctacccaagtacatatgatttcagctgcaatggcaggttttactgcaatcacagcaaccaaccccatttggcttataaagactcggttacagcttgatgcaaggaaccgcggggaaaggcgaatgggtgcttttgaatgtgttcgtaaagtgtatcagacagatggactaaaaggattttataggggcatgtctgcttcatatgctggtatatcagagactgttatccattttgttatttatgaaagtataaaacaaaaactactggaatataagactgcttctacaatggaaaatggtgaagagtctgtgaaagaagcatcagattttgtgggaatgatgctagctgctgccacctcaaaaacttgtgccacaactatagcatatccacatgttgtaagaacaagactacgtgaagagggaacaaaatacagatctttttttcagactctatctttgcttgttcaagaagaaggttatgggtctctttatcgtggtctgacaactcatctagtgagacagattccaaacacagccattatgatggccacctatgaattggtggtttacctactcaatggatagcagcacgaggactgctgtactgcaaaaaaagaagaccaaaagattacagtggaccatgggatacagaagccagcatggcagacagaagaaaaatagtttgggaacatgtaactattctaagtggaagttttgttgtaggaattatagtaatcacaccacattacttggcctttcggtaatgtgaaaaaaaaaaaaaaacctcagagcctccaaggaaatgcctttagaagcactcctctctcaaaattgccattttctctaccatgtcccccagacacagttgggttttgttgatttatggcagtcttctaaacaaagccatccttaattttacatactgtattgtaactatccaaagatagtattggcagtcataaatttataacttctggcctttgtttaattccagtaaaataacagcaatgacaatgagatcgtcagtattattttcacatttccctgagaggacctggcacaatattttaaatttaattatttggcagtagtcactgtttttgacaaccaatgaaatagcgtctaaatatcttgtatattttttagcatcaaaatgttttggtttccactgctgacaggtgcttgttgtttagcctaatgtggatatttaaattgttaacataccaaacacacatggtaatagtttgggacaaaataactagtaaaatgttgatttctcggctatttcactgactgcggcatgtcctcgtgtcttctctgattttgtggtacatgaatgaatgcatttatctttttagtgacttactagttacgaacttgaattatcacctctttgtcatacttaagtatcatttacataaagtgtaaaagattttttcacttt

SEQ ID NO: 489 - protein, 310 aa, Homo sapien
MSQRDTLVHLFAGGCGGTVGAILTCPLEVVKTRLQSSSVTLYISEVQLNTMAGASVNRVVSPGPLHCLKVILEKEGPRSLFRGLGPNLVGVAPSRAIYFAAYSNCKEKLNDVFDPDSTQVHMISAAMAGFTAITATNPIWLIKTRLQLDARNRGERRMGAFECVRKVYQTDGLKGFYRGMSASYAGISETVIHFVIYESIKQKLLEYKTASTMENGEESVKEASDFVGMMLAAATSKTCATTIAYPHVVRTRLREEGTKYRSFFQTLSLLVQEEGYGSLYRGLTTHLVRQIPNTAIMMATYELVVYLLNG

SEQ ID NO: 490 - DNA, 3220 bp, Homo sapien
gagctgtccccggtgccgccgacccgggccgtgccgtgtgcccgtggctccagccgctgccgcctcgatctcctcgtctcccgctccgccctcccttttccctggatgaacttgcgtcctttctcttctccgccatggaattctgctccgtgcttttagccctcctgagccaaagaaaccccagacaacagatgcccatacgcagcgtatagcagtaactccccagctcggtttctgtgccgtagtttacagtatttaattttatataatatatattatttattatagcatttttgatacctcatattctgtttacacatcttgaaaggcgctcagtagttctcttactaaacaaccactactccagagaatggcaacgctgattaccagtactacagctgctaccgccgcttctggtcctttggtggactacctatggatgctcatcctgggcttcattattgcatttgtcttggcattctccgtgggagccaatgatgtagcaaattcttttggtacagctgtgggctcaggtgtagtgaccctgaagcaagcctgcatcctagctagcatctttgaaacagtgggctctgtcttactgggggccaaagtgagcgaaaccatccggaagggcttgattgacgtggagatgtacaactcgactcaagggctactgatggccggctcagtcagtgctatgtttggttctgctgtgtggcaactcgtggcttcgtttttgaagctccctatttctggaacccattgtattgttggtgcaactattggtttctccctcgtggcaaaggggcaggagggtgtcaagtggtctgaactgataaaaattgtgatgtcttggttcgtgtccccactgctttctggaattatgtctggaattttattcttcctggttcgtgcattcatcctccataaggcagatccagttcctaatggtttgcgagctttgccagttttctatgcctgcacagttggaataaacctcttttccatcatgtatactggagcaccgttgctgggctttgacaaacttcctctgtggggtaccatcctcatctcggtgggatgtgcagttttctgtgcccttatcgtctggttctttgtatgtcccaggatgaagagaaaaattgaacgagaaataaagtgtagtccttctgaaagccccttaatggaaaaaaagaatagcttgaaagaagaccatgaagaaacaaagttgtctgttggtgatattgaaaacaagcatcctgtttctgaggtagggcctgccactgtgcccctccaggctgtggtggaggagagaacagtctcattcaaacttggagatttggaggaagctccagagagagagaggcttcccagcgtggacttgaaagaggaaaccagcatagatagcaccgtgaatggtgcagtgcagttgcctaatgggaaccttgtccagttcagtcaagccgtcagcaaccaaataaactccagtggccactcccagtatcacaccgtgcataaggattccggcctgtacaaagagctactccataaattacatcttgccaaggtgggagattgcatgggagactccggtgacaaacccttaaggcgcaataatagctatacttcctataccatggcaatatgtggcatgcctctggattcattccgtgccaaagaaggtgaacagaagggcgaagaaatggagaagctgacatggcctaatgcagactccaagaagcgaattcgaatggacagttacaccagttactgcaatgctgtgtctgaccttcactcagcatctgagatagacatgagtgtcaaggcagcgatgggtctaggtgacagaaaaggaagtaatggctctctagaagaatggtatgaccaggataagcctgaagtctctctcctcttccagttcctgcagatccttacagcctgctttgggtcattcgcccatggtggcaatgacgtaagcaatgccattgggcctctggttgctttatatttggtttatgacacaggagatgtttcttcaaaagtggcaacaccaatatggcttctactctatggtggtgttggtatctgtgttggtctgtgggtttggggaagaagagttatccagaccatggggaaggatctgacaccgatcacaccctctagtggcttcagtattgaactggcatctgccctcactgtggtgattgcatcaaatattggccttcccatcagtacaacacattgtaaagtgggctctgttgtgtctgttggctggctccggtccaagaaggctgttgactggcgtctctttcgtaacatttttatggcctggtttgtcacagtccccatttctggagttatcagtgctgccatcatggcaatcttcagatatgtcatcctcagaatgtgaagctgtttgagattaaaatttgtgtcaatgtttgggaccatcttaggtattcctgctcccctgaagaatgattacagtgttaacagaagactgacaagagtctttttatttgggagcagaggagggaagtgttacttgtgctataactgcttttgtgctaaatatgaattgtctcaaaattagctgtgtaaaatagcccgggttccactggctcctgctgaggtcccctttccttctgggctgtgaattcctgtacatatttctctactttttgtatcaggcttcaattccattatgttttaatgttgtctctgaagatgacttgtgatttttttttcttttttttaaaccatgaagagccgtttgacagagcatgctctgcgttgttggtttcaccagcttctgccctcacatgcacagggatttaacaacaaaaatataactacaacttcccttgtagtctcttatataagtagagtccttggtactctgccctcctgtcagtagtggcaggatctattggcatattcgggagcttcttagagggatgaggttctttgaacacagtgaaaatttaaattagtaacttttttgcaagcagtttattgactgttattgctaagaagaagtaagaaagaaaaagcctgttggcaatcttggttatttctttaagatttctggcagtgtgggatggatgaatgaagtggaatgtgaactttgggcaagttaaatgggacagccttccatgttcatttgtctacctcttaactgaataaaaaagcctacagtttttagaaaaaacccgaattc

SEQ ID NO: 491 - protein, 679 aa, Homo sapien
MATLITSTTAATAASGPLVDYLWMLILGFIIAFVLAFSVGANDVANSFGTAVGSGVVTLKQACILASIFETVGSVLLGAKVSETIRKGLIDVEMYNSTQGLLMAGSVSAMFGSAVWQLVASFLKLPISGTHCIVGATIGFSLVAKGQEGVKWSELIKIVMSWFVSPLLSGIMSGILFFLVRAFILHKADPVPNGLRALPVFYACTVGINLFSIMYTGAPLLGFDKLPLWGTILISVGCAVFCALIVWFFVCPRMKRKIEREIKCSPSESPLMEKKNSLKEDHEETKLSVGDIENKHPVSEVGPATVPLQAVVEERTVSFKLGDLEEAPERERLPSVDLKEETSIDSTVNGAVQLPNGNLVQFSQAVSNQINSSGHSQYHTVHKDSGLYKELLHKLHLAKVGDCMGDSGDKPLRRNNSYTSYTMAICGMPLDSFRAKEGEQKGEEMEKLTWPNADSKKRIRMDSYTSYCNAVSDLHSASEIDMSVKAAMGLGDRKGSNGSLEEWYDQDKPEVSLLFQFLQILTACFGSFAHGGNDVSNAIGPLVALYLVYDTGDVSSKVATPIWLLLYGGVGICVGLWVWGRRVIQTMGKDLTPITPSSGFSIELASALTVVIASNIGLPISTTHCKVGSVVSVGWLRSKKAVDWRLFRNIFMAWFVTVPISGVISAAIMAIFRYVILRM

SEQ ID NO: 492 - DNA, 1470 bp, Homo sapien
agagccgccagcgaggctggggatgggggcgccgctgctctctcccggctggggagccggggctgccggccggcgctggtggatgctgctggcgcccctgctgccggcgctgctgctggtgcggcccgcgggggccctggtggaggggctctactgcggcacgcgggactgctacgaggtgctgggcgtgagccgctcggcgggcaaggcggagatcgcgcgggcctaccgccagctggcccggcgctaccaccctgaccgctaccggccccagcccggagacgagggccccgggcggacgccgcagagcgccgaggaggctttcctgctggtggcaaccgcctacgagacactcaaggtctctcaggcagctgcagagcttcaacagtactgtatgcagaatgcctgcaaggatgccctgctggtgggtgttccagctggaagtaaccccttccgggagcctagatcctgtgctttactctgaagactcgagagaagtttgctgaggaatgccttcaagcacaaagtgatgaatgactgccttcaagtctcaagaaaacacttttccctaacttttagagatatttcagccctttcctgtggcctggtcctatagccaaaatcacagatattcatgagtttctacttgagtgagaaaactgggtgaaggaatagaattttaaatagtaataactgcttgttttttttgtgcaagtacttttatacataagataaacaaaaaccttaccaccaaacataccaaaatgcacctctttcataagtgagttactaagatttctatacctggaatatcatgtatgtttcatttactggatgtttacattttaggaaggaaaatagttttgtttatttaaacaactgaatacttataaactgttgttcctggaagttatttattccataaaaaatttgttcttttgtcatgaatttataattcctaaatgaagaccagaaagtacaaattgctgggaggaagaataggctttattaatcaactgatgtcttgatttttctaaatgggaagattgctttatttttaacactaattatgggagcagattcttagcaaacttctttggaaaagttaatgttatgatgtgcattaggctgccccatcgtgtatataaatgaagcagatttgatttttgtattcttacgtttctctgctttgtagttgtggctgtacttaaagaaatacagaatttcatatatttaaaaatgtttaaaatgtgacccacagaacattgtaaatgattaaaaactaacatgaaaatattacaacctaaaagaattcttaacttcacaagtgttttacttcgacgatgtgcctttgatttaatttgggacacttttttagaaggatacattattcgtgtttgcaacggtctttgaagagcttggaaataaaatttctgcttaattaatcaaaaaaaaaaaaaaaaaaaaaaa

SEQ ID NO: 493 - protein, 153 aa, Homo sapien
MGAPLLSPGWGAGAAGRRWWMLLAPLLPALLLVRPAGALVEGLYCGTRDCYEVLGVSRSAGKAEIARAYRQLARRYHPDRYRPQPGDEGPGRTPQSAEEAFLLVATAYETLKVSQAAAELQQYCMQNACKDALLVGVPAGSNPFREPRSCALL

SEQ ID NO: 494 - DNA, 921 bp, Homo sapien
gcggcgctcgcgccaagggacgtgtttctgcgctcgcgtggtcatggaggcgctgccgctgctagccgcgacaactccggaccacggccgccaccgaaggctgcttctgctgccgctactgctgttcctgctgccggctggagctgtgcagggctgggagacagaggagaggccccggactcgcgaagaggagtgccacttctacgcgggtggacaagtgtacccgggagaggcatcccgggtatcggtcgccgaccactccctgcacctaagcaaagcgaagatttccaagccagcgccctactgggaaggaacagctgtgatcgatggagaatttaaggagctgaagttaactgattatcgtgggaaatacttggttttcttcttctacccacttgatttcacatttgtgtgtccaactgaaattatcgcttttggcgacagacttgaagaattcagatctataaatactgaagtggtagcatgctctgttgattcacagtttacccatttggcctggattaatacccctcgaagacaaggaggacttgggccaataaggattccacttctttcagatttgacccatcagatctcaaaggactatggtgtatacctagaggactcaggccacactcttagaggtctcttcattattgatgacaaaggaatcctaagacaaattactctgaatgatcttcctgtgggtagatcagtggatgagacactacgtttggttcaagcattccagtacactgacaaacacggagaagtctgccctgctggctggaaacctggtagtgaaacaataatcccagatccagctggaaagctgaagtatttcgataaactgaattgagaaatacttcttcaagttatgatgcttgaaagttctcaataaagttcacggtttcattacca

SEQ ID NO: 495 - protein, 271 aa, Homo sapien
MEALPLLAATTPDHGRHRRLLLLPLLLFLLPAGAVQGWETEERPRTREEECHFYAGGQVYPGEASRVSVADHSLHLSKAKISKPAPYWEGTAVIDGEFKELKLTDYRGKYLVFFFYPLDFTFVCPTEIIAFGDRLEEFRSINTEVVACSVDSQFTHLAWINTPRRQGGLGPIRIPLLSDLTHQISKDYGVYLEDSGHTLRGLFIIDDKGILRQITLNDLPVGRSVDETLRLVQAFQYTDKHGEVCPAGWKPGSETIIPDPAGKLKYFDKLN

SEQ ID NO: 496 - DNA, 2102 bp, Homo sapien
ccgctgggcgtagctgcgactcggcggagtcccggcggcgcgtccttgttctaacccggcgcgccatgaccgtcgcgcggccgagcgtgcccgcggcgctgcccctcctcggggagctgccccggctgctgctgctggtgctgttgtgcctgccggccgtgtggggtgactgtggccttcccccagatgtacctaatgcccagccagctttggaaggccgtacaagttttcccgaggatactgtaataacgtacaaatgtgaagaaagctttgtgaaaattcctggcgagaaggactcagtgatctgccttaagggcagtcaatggtcagatattgaagagttctgcaatcgtagctgcgaggtgccaacaaggctaaattctgcatccctcaaacagccttatatcactcagaattattttccagtcggtactgttgtggaatatgagtgccgtccaggttacagaagagaaccttctctatcaccaaaactaacttgccttcagaatttaaaatggtccacagcagtcgaattttgtaaaaagaaatcatgccctaatccgggagaaatacgaaatggtcagattgatgtaccaggtggcatattatttggtgcaaccatctccttctcatgtaacacagggtacaaattatttggctcgacttctagtttttgtcttatttcaggcagctctgtccagtggagtgacccgttgccagagtgcagagaaatttattgtccagcaccaccacaaattgacaatggaataattcaaggggaacgtgaccattatggatatagacagtctgtaacgtatgcatgtaataaaggattcaccatgattggagagcactctatttattgtactgtgaataatgatgaaggagagtggagtggcccaccacctgaatgcagaggaaaatctctaacttccaaggtcccaccaacagttcagaaacctaccacagtaaatgttccaactacagaagtctcaccaacttctcagaaaaccaccacaaaaaccaccacaccaaatgctcaagcaacacggagtacacctgtttccaggacaaccaagcattttcatgaaacaaccccaaataaaggaagtggaaccacttcaggtactacccgtcttctatctgggcacacgtgtttcacgttgacaggtttgcttgggacgctagtaaccatgggcttgctgacttagccaaagaagagttaagaagaaaatacacacaagtatacagactgttcctagtttcttagacttatctgcatattggataaaataaatgcaattgtgctcttcatttaggatgctttcattgtctttaagatgtgttaggaatgtcaacagagcaaggagaaaaaaggcagtcctggaatcacattcttagcacacctacacctcttgaaaatagaacaacttgcagaattgagagtgattcctttcctaaaagtgtaagaaagcatagagatttgttcgtatttagaatgggatcacgaggaaaagagaaggaaagtgatttttttccacaagatctgtaatgttatttccacttataaaggaaataaaaaatgaaaaacattatttggatatcaaaagcaaataaaaacccaattcagtctcttctaagcaaaattgctaaagagagatgaaccacattataaagtaatctttggctgtaaggcattttcatctttccttcgggttggcaaaatattttaaaggtaaaacatgctggtgaaccaggggtgttgatggtgataagggaggaatatagaatgaaagactgaatcttcctttgttgcacaaatagagtttggaaaaagcctgtgaaaggtgtcttctttgacttaatgtctttaaaagtatccagagatactacaatattaacataagaaaagattatatattatttctgaatcgagatgtccatagtcaaatttgtaaatcttattcttttgtaatatttatttatatttatttatgacagtgaacattctgattttacatgtaaaacaagaaaagttgaagaagatatgtgaagaaaaatgtatttttcctaaatagaaataaatgatcccattttttggt

SEQ ID NO: 497 - protein, 381 aa, Homo sapien
MTVARPSVPAALPLLGELPRLLLLVLLCLPAVWGDCGLPPDVPNAQPALEGRTSFPEDTVITYKCEESFVKIPGEKDSVICLKGSQWSDIEEFCNRSCEVPTRLNSASLKQPYITQNYFPVGTVVEYECRPGYRREPSLSPKLTCLQNLKWSTAVEFCKKKSCPNPGEIRNGQIDVPGGILFGATISFSCNTGYKLFGSTSSFCLISGSSVQWSDPLPECREIYCPAPPQIDNGIIQGERDHYGYRQSVTYACNKGFTMIGEHSIYCTVNNDEGEWSGPPPECRGKSLTSKVPPTVQKPTTVNVPTTEVSPTSQKTTTKTTTPNAQATRSTPVSRTTKHFHETTPNKGSGTTSGTTRLLSGHTCFTLTGLLGTLVTMGLLT

SEQ ID NO: 498 - DNA, 2102 bp, Homo sapien; identical to SEQ ID NO: 496

SEQ ID NO: 499 - protein, 381 aa, Homo sapien; identical to SEQ ID NO: 497

SEQ ID NO: 500 - DNA, 3744 bp, Homo sapien
ccacgcgtccggtggcggtcgagcgtggcgtaggcgaatcctcggcactaagcatatggacctcgcggcggcagcggagccgggcgccggcagccagcacctggaggtccgcgacgaggtggccgagaagtgccagaaactgttcctggacttcttggaggagtttcagagcagcgatggagaaattaaatacttgcaattagcagaggaactgattcgtcctgagagaaacacattggttgtgagttttgtggacctggaacaatttaaccagcaactttccaccaccattcaagaggagttctatagagtttacccttacctgtgtcgggccttgaaaacattcgtcaaagaccgtaaagagatccctcttgccaaggatttttatgttgcattccaagacctgcctaccagacacaagattcgagagctcacctcatccagaattggtttgctcactcgcatcagtgggcaggtggtgcggactcacccagttcacccagagcttgtgagcggaacttttctgtgcttggactgtcagacagtgatcagggatgtagaacagcagttcaaatacacacagccaaacatctgccgaaatccagtttgtgccaacaggaggagattcttactggatacaaataaatcaagatttgttgattttcaaaaggttcgtattcaagagacccaagctgagcttcctcgagggagtatcccccgcagtttagaagtaattttaagggctgaagctgtggaatcagctcaagctggtgacaagtgtgactttacagggacactgattgttgtgcctgacgtctccaagcttagcacaccaggagcacgtgcagaaactaattcccgtgtcagtggtgttgatggatatgagacagaaggcattcgaggactccgggcccttggtgttagggacctttcttataggctggtctttcttgcctgctgtgttgcgccaaccaacccaaggtttggggggaaagagctcagagatgaggaacagacagctgagagcattaagaaccaaatgactgtgaaagaatgggagaaagtgtttgagatgagtcaagataaaaatctataccacaatctttgtaccagcctgttccctactatacatggcaatgatgaagtaaaacggggtgtcctgctgatgctctttggtggcgttccaaagacaacaggagaagggacctctcttcgaggggacataaatgtttgcattgttggtgacccaagtacagctaagagccaatttctcaagcacgtggaggagttcagccccagagctgtctacaccagtggtaaagcgtccagtgctgctggcttaacagcagctgttgtgagagatgaagaatctcatgagtttgtcattgaggctggagctttgatgttggctgataatggtgtgtgttgtattgatgaatttgataagatggacgtgcgggatcaagttgctattcatgaagctatggaacagcagaccatatccatcactaaagcaggagtgaaggctactctgaacgcccggacgtccattttggcagcagcaaacccaatcagtggacactatgacagatcaaaatcattgaaacagaatataaatttgtcagctcccatcatgtcccgattcgatctcttctttatccttgtggatgaatgtaatgaggttacagattatgccattgccaggcgcatagtagatttgcattcaagaattgaggaatcaattgatcgtgtctattccctcgatgatatcagaagatatcttctctttgcaagacagtttaaacccaagatttccaaagagtcagaggacttcattgtggagcaatataaacatctccgccagagagatggttctggagtgaccaagtcttcatggaggattacagtgcgacagcttgagagcatgattcgtctctctgaagctatggctcggatgcactgctgtgatgaggtccaacctaaacatgtgaaggaagctttccggttactgaataaatcaatcatccgtgtggaaacacctgatgtcaatctagatcaagaggaagagatccagatggaggtagatgagggtgccggtggcatcaatggtcatgctgacagccctgctcctgtgaacgggatcaatggctacaatgaagacataaatcaagagtctgctcccaaagcctccttaaggctgggcttctctgagtactgccgaatctctaaccttattgtgcttcacctcagaaaggtggaagaagaagaggacgagtcagcattaaagaggagcgagcttgttaactggtacttgaaggaaatcgaatcagagatagactctgaagaagaacttataaataaaaaaagaatcatagagaaagttattcatcgactcacacactatgatcatgttctaattgagctcacccaggctggattgaaaggctccacagagggaagtgagagctatgaagaagatccctacttggtagttaaccctaactacttgctcgaagattgagatagtgaaagtaactgaccagagctgaggaactgtggcacagcacctcgtggcctggagcctggctggagctctgctagggacagaagtgtttctggaagtgatgcttccaggatttgttttcagaaacaagaattgagttgatggtcctatgtgtcacattcatcacaggtttcataccaacacaggcttcagcacttcctttggtgtgtttcctgtcccagtgaagttggaaccaaataatgtgtagtctctataaccaatacctttgttttcatgtgtaagaaaaggcccattacttttaaggtatgtgctgtcctattgagcaaataactttttttcaattgccagctactgcttttattcatcaaaataaaataacttgttctgaagttgtctattggatttctttctactgtaccctgattattacttccatctacttctgaatgtgagactttccctttttgcttaacctggagtgaagaggtagaactgtggtattatggatgaggtttctatgagaaggagtcattagagaactcatatgaaagctagaggccttagagatgactttccaaggttaattccagttttttttttttttaagtttataaaagtttattatacttttttaaaattactctttagtaatttattttacttctgtgtcctaagggtaatttctcaggattgttttcaaattgcttttttaggggaaataggtcatttgctatattacaagcaatccccaaattttatggtcttccaggaaaagttattaccgtttatgatactaacagttcctgagacttagctatgatcagtatgttcatgaggtggagcagttcctgtgttgcagcttttaacaacagatggcattcattaaatcacaaagtatgttaaaggtcacaaaagcaaaataactgtctgaggctaaggcccacgtgggacagtctaatacccatgagtactcaacttgccttgatgtctgagctttccagtgcaatgtgaatttgagcagccagaaatctattagtagaaagcaagacagattaatataggttaaaacaatgatttaaatatgtttctcccaataattatctctttccctggaatcaacttgtatgaaaccttgtcaaaatgtactccacaagtatgtacaattaagtattttaaaaataaatggcaaacattaaaaaaaaaaaaaaaaaaaaaaaaaa

SEQ ID NO: 501 - protein, 821 aa, Homo sapien
MDLAAAAEPGAGSQHLEVRDEVAEKCQKLFLDFLEEFQSSDGEIKYLQLAEELIRPERNTLVVSFVDLEQFNQQLSTTIQEEFYRVYPYLCRALKTFVKDRKEIPLAKDFYVAFQDLPTRHKIRELTSSRIGLLTRISGQVVRTHPVHPELVSGTFLCLDCQTVIRDVEQQFKYTQPNICRNPVCANRRRFLLDTNKSRFVDFQKVRIQETQAELPRGSIPRSLEVILRAEAVESAQAGDKCDFTGTLIVVPDVSKLSTPGARAETNSRVSGVDGYETEGIRGLRALGVRDLSYRLVFLACCVAPTNPRFGGKELRDEEQTAESIKNQMTVKEWEKVFEMSQDKNLYHNLCTSLFPTIHGNDEVKRGVLLMLFGGVPKTTGEGTSLRGDINVCIVGDPSTAKSQFLKHVEEFSPRAVYTSGKASSAAGLTAAVVRDEESHEFVIEAGALMLADNGVCCIDEFDKMDVRDQVAIHEAMEQQTISITKAGVKATLNARTSILAAANPISGHYDRSKSLKQNINLSAPIMSRFDLFFILVDECNEVTDYAIARRIVDLHSRIEESIDRVYSLDDIRRYLLFARQFKPKISKESEDFIVEQYKHLRQRDGSGVTKSSWRITVRQLESMIRLSEAMARMHCCDEVQPKHVKEAFRLLNKSIIRVETPDVNLDQEEEIQMEVDEGAGGINGHADSPAPVNGINGYNEDINQESAPKASLRLGFSEYCRISNLIVLHLRKVEEEEDESALKRSELVNWYLKEIESEIDSEEELINKKRIIEKVIHRLTHYDHVLIELTQAGLKGSTEGSESYEEDPYLVVNPNYLLED

SEQ ID NO: 502 - DNA, 1627 bp, Homo sapien
gcccccaccatcaaggggaagaaagtgctcttcggattccggttcgccctggcctcccgcagccgccgcgggaccggcccccagcacacccccggggcgccgggcgcggggcagccgcccggacgcgcgcgggcctcaggcgccgccgggaccccagccccccaaactttggcaagttgcgggcgccgagcgcacccggaggcgcggggcgcggccgcaggcggagccgccccctgacgccgggccgccccctcccggccccggccgccccgccggctccgcggaaagtttgcggccgcccctgcgccgcacccggggcctgggtgagactgcggcggcggcagggcgcggacggccatatttgccggcgcggcccgagccgccgacaacaaaaagtgcgcgggcgctcggcgggcgctcggacgggcgcggggctgcagcgctaccgcccggcctcgccgccgccgccgccgccctcgcggcctggccccgccgcgcccggcgcgcccgccgcccggggggatgtcttacaaaccgaacttggccgcgcacatgcccgccgccgccctcaacgccgctgggagtgtccactcgccttccaccagcatggcaacgtcttcacagtaccgccagctgctcagtgactacgggccaccgtccctaggctacacccagggaactgggaacagccaggtgccccaaagcaaatacgcggagctgctggccatcattgaagagctggggaaggagatcagacccacgtacgcagggagcaagagtgccatggagaggctgaagcgcggcatcattcacgctagaggactggttcgggagtgcttggcagaaacggaacggaatgccagatcctagctgccttgttggttttgaaggatttccatctttttacaagatgagaagttacagttcatctcccctgttcagatgaaacccttgttttcaaaatggttacagtttcgtttttcctcccatggttcacttggctctgaacctacagtctcaaagattgagaaaagattttgcagttaattaggatttgcattttaagtagttaggaactgcccaggttttttttgttttttaagcattgatttaaaagatgcacggaaagttatcttacagcaaactgtagtttgcctccaagacaccattgtctccctttaatcttctcttttgtatacatttgttacccatggtgttctttgttccttttcataagctaataccactgtagggattttgttttgaacgcatattgacagcacgctttacttagtagccggttcccatttgccatacaatgtaggttctgcttaatgtaacttcttttttgcttaagcatttgcatgactattagtgcttcaaagtcaatttttaaaaatgcacaagttataaatacagaagaaagagcaacccaccaaacctaacaaggacccccgaacactttcatactaagactgtaagtagatctcagttctgcgtttattgtaagttgataaaaacatctggaagaaaatgactaaaactgtttgcatctttgtatgtatttattacttgatgtaataaagcttattttcattaacaatttgtattaaaaaaaaaaaaaaaa

SEQ ID NO: 503 - protein, 115 aa, Homo sapien
MSYKPNLAAHMPAAALNAAGSVHSPSTSMATSSQYRQLLSDYGPPSLGYTQGTGNSQVPQSKYAELLAIIEELGKEIRPTYAGSKSAMERLKRGIIHARGLVRECLAETERNARS

SEQ ID NO: 504 - DNA, 4180 bp, Homo sapien
gcggggaagcagcagcggccaggatgaatcccaggtgctctggagctggatggtgaaggtcggcactcttcaccctcccgagccctgcccgtctcggccccatgcccccaccagtcagccccgggccacaggcagtgagcaggcacctgggagccgaggccctgtgaccaggccaaggagacgggcgctccagggtcccagccacctgtcccccccatggagctgaggccctggttgctatgggtggtagcagcaacaggaaccttggtcctgctagcagctgatgctcagggccagaaggtcttcaccaacacgtgggctgtgcgcatccctggaggcccagcggtggccaacagtgtggcacggaagcatgggttcctcaacctgggccagatcttcggggactattaccacttctggcatcgaggagtgacgaagcggtccctgtcgcctcaccgcccgcggcacagccggctgcagagggagcctcaagtacagtggctggaacagcaggtggcaaagcgacggactaaacgggacgtgtaccaggagcccacagaccccaagtttcctcagcagtggtacctgtctggtgtcactcagcgggacctgaatgtgaaggcggcctgggcgcagggctacacagggcacggcattgtggtctccattctggacgatggcatcgagaagaaccacccggacttggcaggcaattatgatcctggggccagttttgatgtcaatgaccaggaccctgacccccagcctcggtacacacagatgaatgacaacaggcacggcacacggtgtgcgggggaagtggctgcggtggccaacaacggtgtctgtggtgtaggtgtggcctacaacgcccgcattggaggggtgcgcatgctggatggcgaggtgacagatgcagtggaggcacgctcgctgggcctgaaccccaaccacatccacatctacagtgccagctggggccccgaggatgacggcaagacagtggatgggccagcccgcctcgccgaggaggccttcttccgtggggttagccagggccgaggggggctgggctccatctttgtctgggcctcggggaacgggggccgggaacatgacagctgcaactgcgacggctacaccaacagtatctacacgctgtccatcagcagcgccacgcagtttggcaacgtgccgtggtacagcgaggcctgctcgtccacactggccacgacctacagcagtggcaaccagaatgagaagcagatcgtgacgactgacttgcggcagaagtgcacggagtctcacacgggcacctcagcctctgcccccttagcagccggcatcattgctctcaccctggaggccaataagaacctcacatggcgggacatgcaacacctggtggtacagacctcgaagccagcccacctcaatgccaacgactgggccaccaatggtgtgggccggaaagtgagccactcatatggctacgggcttttggacgcaggcgccatggtggccctggcccagaattggaccacagtggccccccagcggaagtgcatcatcgacatcctcaccgagcccaaagacatcgggaaacggctcgaggtgcggaagaccgtgaccgcgtgcctgggcgagcccaaccacatcactcggctggagcacgctcaggcgcggctcaccctgtcctataatcgccgtggcgacctggccatccacctggtcagccccatgggcacccgctccaccctgctggcagccaggccacatgactactccgcagatgggtttaatgactgggccttcatgacaactcattcctgggatgaggatccctctggcgagtgggtcctagagattgaaaacaccagcgaagccaacaactatgggacgctgaccaagttcaccctcgtactctatggcaccgcccctgaggggctgcccgtacctccagaaagcagtggctgcaagaccctcacgtccagtcaggcctgtgtggtgtgcgaggaaggcttctccctgcaccagaagagctgtgtccagcactgccctccagggttcgccccccaagtcctcgatacgcactatagcaccgagaatgacgtggagaccatccgggccagcgtctgcgccccctgccacgcctcatgtgccacatgccaggggccggccctgacagactgcctcagctgccccagccacgcctccttggaccctgtggagcagacttgctcccggcaaagccagagcagccgagagtccccgccacagcagcagccacctcggctgcccccggaggtggaggcggggcaacggctgcgggcagggctgctgccctcacacctgcctgaggtggtggccggcctcagctgcgccttcatcgtgctggtcttcgtcactgtcttcctggtcctgcagctgcgctctggctttagttttcggggggtgaaggtgtacaccatggaccgtggcctcatctcctacaaggggctgccccctgaagcctggcaggaggagtgcccgtctgactcagaagaggacgagggccggggcgagaggaccgcctttatcaaagaccagagcgccctctgatgagcccactgcccaccccctcaagccaatcccctccttgggcactttttaattcaccaaagtatttttttatcttgggactgggtttggaccccagctgggaggcaagaggggtggagactgcttcccatcctaccctcgggcccacctggccacctgaggtgggcccaggaccagctggggcgtggggagggccgtaccccaccctcagcaccccttccatgtggagaaaggagtgaaacctttagggcagcttgccccggccccggccccagccagagttcctgcggagtgaagaggggcagcccttgcttgttgggattcctgacccaggccgcagctcttgcccttccctgtccctctaaagcaataatggtcccatccaggcagtcgggggctggcctaggagatatctgagggaggaggccacctctccaagggcttctgcaccctccaccctgtcccccagctctggtgagtcttggcggcagcagccatcataggaagggaccaaggcaaggcaggtgcctccaggtgtgcacgtggcatgtggcctgtggcctgtgtcccatgacccacccctgtgctccgtgcctccaccaccactggccaccaggctggcgcagccaaggccgaagctctggctgaaccctgtgctggtgtcctgaccaccctcccctctcttgcacccgcctctcccgtcagggcccaagtccctgttttctgagcccgggctgcctgggctgttggcactcacagacctggagcccctgggtgggtggtggggaggggcgctggcccagccggcctctctggcctcccacccgatgctgctttcccctgtggggatctcaggggctgtttgaggatatattttcactttgtgattatttcactttagatgctgatgatttgtttttgtatttttaatgggggtagcagctggactacccacgttctcacacccaccgtccgccctgctcctccctggctgccctggccctgaggtgtgggggctgcagcatgttgctgaggagtgaggaatagttgagccccaagtcctgaagaggcgggccagccaggcgggctcaaggaaagggggtcccagtgggaggggcaggctgacatctgtgtttcaagtggggctcgccatgccgggggttcataggtcactggctctccaagtgccagaggtgggcaggtggtggcactgagcccccccaacactgtgccctggtggagaaagcactgacctgtcatgcccccctcaaacctcctcttctgacgtgccttttgcacccctcccattaggacaatcagtcccctcccatctgggagtccccttttcttttctaccctagccattcctggtacccagccatctgcccaggggtgccccctcctctcccatccccctgccctcgtggccagcccggctggttttgtaagatgctgggttggtgcacagtgatttttttcttgtaatttaaacaggcccagcattgctggttctatttaatggacatgagataatgttagaggttttaaagtgattaaacgtgcagactatgcaaaccag

SEQ ID NO: 505 - protein, 794 aa, Homo sapien
MELRPWLLWVVAATGTLVLLAADAQGQKVFTNTWAVRIPGGPAVANSVARKHGFLNLGQIFGDYYHFWHRGVTKRSLSPHRPRHSRLQREPQVQWLEQQVAKRRTKRDVYQEPTDPKFPQQWYLSGVTQRDLNVKAAWAQGYTGHGIVVSILDDGIEKNHPDLAGNYDPGASFDVNDQDPDPQPRYTQMNDNRHGTRCAGEVAAVANNGVCGVGVAYNARIGGVRMLDGEVTDAVEARSLGLNPNHIHIYSASWGPEDDGKTVDGPARLAEEAFFRGVSQGRGGLGSIFVWASGNGGREHDSCNCDGYTNSIYTLSISSATQFGNVPWYSEACSSTLATTYSSGNQNEKQIVTTDLRQKCTESHTGTSASAPLAAGIIALTLEANKNLTWRDMQHLVVQTSKPAHLNANDWATNGVGRKVSHSYGYGLLDAGAMVALAQNWTTVAPQRKCIIDILTEPKDIGKRLEVRKTVTACLGEPNHITRLEHAQARLTLSYNRRGDLAIHLVSPMGTRSTLLAARPHDYSADGFNDWAFMTTHSWDEDPSGEWVLEIENTSEANNYGTLTKFTLVLYGTAPEGLPVPPESSGCKTLTSSQACVVCEEGFSLHQKSCVQHCPPGFAPQVLDTHYSTENDVETIRASVCAPCHASCATCQGPALTDCLSCPSHASLDPVEQTCSRQSQSSRESPPQQQPPRLPPEVEAGQRLRAGLLPSHLPEVVAGLSCAFIVLVFVTVFLVLQLRSGFSFRGVKVYTMDRGLISYKGLPPEAWQEECPSDSEEDEGRGERTAFIKDQSAL

SEQ ID NO: 506 - DNA, 1935 bp, Homo sapien
ctggtcccgagcacgagctgtgaggggattcacttgtgtgcggaactcctcggaaccatggcgtccctttcccttgcacctgttaacatctttaaggcaggagctgatgaagagagagcagagacagctcgtctgacttcttttattggtgccatcgccattggagacttggtaaagagcaccttgggacccaaaggcatggacaaaattcttctaagcagtggacgagatgcctctcttatggtaaccaatgatggtgccactattctaaaaaacattggtgttgacaatccagcagctaaagttttagttgatatgtcaagggttcaagatgatgaagttggtgatggcactacctctgttaccgttttagcagcagaattattaagggaagcagaatctttaattgcaaaaaagattcatccacagaccatcatagcgggttggagagaagccacgaaggctgcaagagaggcgctgttgagttctgcagttgatcatggttccgatgaagttaaattccgtcaagatttaatgaatattgcgggcacaacattatcctcaaaacttcttactcatcacaaagaccactttacaaagttagctgtagaagcagttctcagactgaaaggctctggcaacctggaggcaattcatattatcaagaagctaggaggaagtttggcagattcctatttagatgaaggcttcctgttggataaaaaaattggagtaaatcaaccaaaacgaattgaaaatgctaaaattcttattgcaaatactggtatggatacagacaaaataaagatatttggttcccgggtaagagttgactctacagcaaaggttgcagaaatagaacatgcggaaaaggaaaaaatgaaggagaaagttgaacgtattcttaagcatggaataaattgctttattaacaggcaattaatttataattatcctgaacagctctttggtgctgctggtgtcatggctattgagcatgcagattttgcaggtgtggaacgcctagctcttgtcacaggtggtgaaattgcctctacctttgatcacccagaactggtgaagcttggaagttgcaaacttatcgaggaagtcatgattggagaagacaaactcattcacttttctggggttgcccttggtgaggcttgtaccattgttttgcgtggtgccactcaacaaattttagatgaagcagaaagatcattgcatgatgctctttgtgttcttgcgcaaactgtaaaggactctagaacagtttatggaggaggctgttctgagatgttgatggctcatgctgtgacacagcttgccaatagaacaccaggcaaagaagctgttgcaatggagtcttatgctaaagcactgagaatgttgccaaccatcatagctgacaatgcaggctatgacagtgcagacctggtggcacagctcagggctgctcacagtgaaggcaataccactgctggattggatatgagggaaggcaccattggagatatggctatcctgggtataacagaaagttttcaagtgaagcgacaggttcttctgagtgcagctgaagcagcagaggtgattctgcgtgtggacaacatcatcaaagcggcacccaggaaacgtgtccctgatcaccacccctgttaagcattcccacgtgctgtcgatctttggaccagtttctagcaaagttgtgtttgaaagatactctattaaagaagactgtggaatctgtttatcggtgcccattatatccttaagtttggatatttagctgaccttcgctttaacataggtctaatttatttgccgtgtcattttccatacaaatcagttgatttaaaggagttcatttcgcatactgggcattaaaataaaaatttgaacaatgaaaggaaaaaaaggagaaaaaaaaaa

SEQ ID NO: 507 - protein, 535 aa, Homo sapien
MASLSLAPVNIFKAGADEERAETARLTSFIGAIAIGDLVKSTLGPKGMDKILLSSGRDASLMVTNDGATILKNIGVDNPAAKVLVDMSRVQDDEVGDGTTSVTVLAAELLREAESLIAKKIHPQTIIAGWREATKAAREALLSSAVDHGSDEVKFRQDLMNIAGTTLSSKLLTHHKDHFTKLAVEAVLRLKGSGNLEAIHIIKKLGGSLADSYLDEGFLLDKKIGVNQPKRIENAKILIANTGMDTDKIKIFGSRVRVDSTAKVAEIEHAEKEKMKEKVERILKHGINCFINRQLIYNYPEQLFGAAGVMAIEHADFAGVERLALVTGGEIASTFDHPELVKLGSCKLIEEVMIGEDKLIHFSGVALGEACTIVLRGATQQILDEAERSLHDALCVLAQTVKDSRTVYGGGCSEMLMAHAVTQLANRTPGKEAVAMESYAKALRMLPTIIADNAGYDSADLVAQLRAAHSEGNTTAGLDMREGTIGDMAILGITESFQVKRQVLLSAAEAAEVILRVDNIIKAAPRKRVPDHHPC

SEQ ID NO: 508 - DNA, 1935 bp, Homo sapien; identical to SEQ ID NO: 506

SEQ ID NO: 509 - protein, 535 aa, Homo sapien; identical to SEQ ID NO: 507

SEQ ID NO: 510 - DNA, 3635 bp, Homo sapien
tcaacacaggacaatgcaagcccatgagctgttccggtattttcgaatgccagagctggttgacttccgacagtacgtgcgtactcttccgaccaacacgcttatgggcttcggagcttttgcagcactcaccaccttctggtacgccacgagacccaaacccctgaagccgccatgcgacctctccatgcagtcagtggaagtggcgggtagtggtggtgcacgaagatccgcactacttgacagcgacgagcccttggtgtatttctatgatgatgtcacaacattatacgaaggtttccagaggggaatacaggtgtcaaataatggcccttgtttaggctctcggaaaccagaccaaccctatgaatggctttcatataaacaggttgcagaattgtcggagtgcataggctcagcactgatccagaagggcttcaagactgccccagatcagttcattggcatctttgctcaaaatagacctgagtgggtgattattgaacaaggatgctttgcttattcgatggtgatcgttccactttatgatacccttggaaatgaagccatcacgtacatagtcaacaaagctgaactctctctggtttttgttgacaagccagagaaggccaaactcttattagagggtgtagaaaataagttaataccaggccttaaaatcatagttgtcatggatgcctacggcagtgaactggtggaacgaggccagaggtgtggggtggaagtcaccagcatgaaggcgatggaggacctgggaagagccaacagacggaagcccaagcctccagcacctgaagatcttgcagtaatttgtttcacaagtggaactacaggcaaccccaaaggagcaatggtcactcaccgaaacatagtgagcgattgttcagcttttgtgaaagcaacagagaatacagtcaatccttgcccagatgatactttgatatctttcttgcctctcgcccatatgtttgagagagttgtagagtgtgtaatgctgtgtcatggagctaaaatcggatttttccaaggagatatcaggctgctcatggatgacctcaaggtgcttcaacccactgtcttccccgtggttccaagactgctgaaccggatgtttgaccgaattttcggacaagcaaacaccacgctgaagcgatggctcttggactttgcctccaagaggaaagaagcagagcttcgcagcggcatcatcagaaacaacagcctgtgggaccggctgatcttccacaaagtacagtcgagcctgggcggaagagtccggctgatggtgacaggagccgccccggtgtctgccactgtgctgacgttcctcagagcagccctgggctgtcagttttatgaaggatacggacagacagagtgcactgccgggtgctgcctaaccatgcctggagactggaccgcaggccatgttggggccccgatgccgtgcaatttgataaaacttgttgatgtggaagaaatgaattacatggctgccgagggcgagggcgaggtgtgtgtgaaagggccaaatgtatttcagggctacttgaaggacccagcgaaaacagcagaagctttggacaaagacggctggttacacacaggggacattggaaaatggttaccaaatggcaccttgaaaattatcgaccggaaaaagcacatatttaagctggcacaaggagaatacatagcccctgaaaagattgaaaatatctacatgcgaagtgagcctgttgctcaggtgtttgtccacggagaaagcctgcaggcatttctcattgcaattgtggtaccagatgttgagacattatgttcctgggcccaaaagagaggatttgaagggtcgtttgaggaactgtgcagaaataaggatgtcaaaaaagctatcctcgaagatatggtgagacttgggaaggattctggtctgaaaccatttgaacaggtcaaaggcatcacattgcaccctgaattattttctatcgacaatggccttctgactccaacaatgaaggcgaaaaggccagagctgcggaactatttcaggtcgcagatagatgacctctattccactatcaaggtttagtgtgaagaagaaagctcagaggaaatggcacagttccacaatctcttctcctgctgatggccttcatgttgttaattttgaatacagcaagtgtagggaaggaagcgttcgtgtttgacttgtccattcggggttcttctcataggaatgctagaggaaacagaacaccgccttacagtcacctcatgttgcagaccatgtttatggtaatacacactttccaaaatgagccttaaaaattgtaaaggggatactataaatgtgctaagttatttgagacttcctcagtttaaaaagtgggttttaaatcttctgtctccctgcttttctaatcaaggggttaggactttgctatctctgagatgtctgctacttgctgcaaattctgcagctgtctgctgctctaaagagtacagtgcactagagggaagtgttccctttaaaaataagaacaactgtcctggctggagaatctcacaagcggaccagagatctttttaaatccctgctactgtcccttctcacaggcattcacagaacccttctgattcgtaagggttacgaaactcatgttcttctccagtcccctgtggtttctgttggagcataaggtttccagtaagcgggagggcagatccaactcagaaccatgcagataaggagcctctggcaaatgggtgctcatcagaacgcgtggattctctttcatggcagaatgctcttggactcggttctccaggcctgattccccgactccatcctttttcaggggttatttaaaaatctgccttagattctatagtgaagacaagcatttcaagaaagagttacctggatcagccatgctcagctgtgacgcctgaataactgtctactttatcttcactgaaccactcactctgtgtaaaggccaacagatttttaatgtggttttcatatcaaaagatcatgttgggattaacttgcctttttccccaaaaaataaactctcaggcaagcatttctttaaagctattaagggagtatatacttgagtacttattgaaatggacagtaataagcaaatgttcttataatgctacctgatttctatgaaatgtgtttgacaagccaaaattctaggatgtagaaatctggaaagttcatttcctgggattcacttctccagggattttttaaagttaatttgggaaattaacagcagttcactttattgtgagtctttgccacatttgactgaattgagctgtcatttgtacatttaaagcagctgttttggggtctgtgagagtacatgtattatatacaagcacaacagggcttgcactaaagaattgtcattgtaataacactacttggtagcctaacttcatatatgtattcttaattgcacaaaaagtcaataatttgtcaccttggggttttgaatgtttgctttaagtgttggctatttctatgttttataaaccaaaacaaaatttccaaaaacaatgaaggaaaccaaaataaatatttctgcatttcg

SEQ ID NO: 511 - protein, 698 aa, Homo sapien
MQAHELFRYFRMPELVDFRQYVRTLPTNTLMGFGAFAALTTFWYATRPKPLKPPCDLSMQSVEVAGSGGARRSALLDSDEPLVYFYDDVTTLYEGFQRGIQVSNNGPCLGSRKPDQPYEWLSYKQVAELSECIGSALIQKGFKTAPDQFIGIFAQNRPEWVIIEQGCFAYSMVIVPLYDTLGNEAITYIVNKAELSLVFVDKPEKAKLLLEGVENKLIPGLKIIVVMDAYGSELVERGQRCGVEVTSMKAMEDLGRANRRKPKPPAPEDLAVICFTSGTTGNPKGAMVTHRNIVSDCSAFVKATENTVNPCPDDTLISFLPLAHMFERVVECVMLCHGAKIGFFQGDIRLLMDDLKVLQPTVFPVVPRLLNRMFDRIFGQANTTLKRWLLDFASKRKEAELRSGIIRNNSLWDRLIFHKVQSSLGGRVRLMVTGAAPVSATVLTFLRAALGCQFYEGYGQTECTAGCCLTMPGDWTAGHVGAPMPCNLIKLVDVEEMNYMAAEGEGEVCVKGPNVFQGYLKDPAKTAEALDKDGWLHTGDIGKWLPNGTLKIIDRKKHIFKLAQGEYIAPEKIENIYMRSEPVAQVFVHGESLQAFLIAIVVPDVETLCSWAQKRGFEGSFEELCRNKDVKKAILEDMVRLGKDSGLKPFEQVKGITLHPELFSIDNGLLTPTMKAKRPELRNYFRSQIDDLYSTIKV

SEQ ID NO: 512 - DNA, 2487 bp, Homo sapien
cctttcccctcccgccggacctgccaggaggtgggctggcgcggagggagggccctgtcccctgtccctttaaggaggagggccaaacgccggcctagagtgcggcgtagcccccacccgccgtgccctcaccccagagcagctgcagcctcagccggccgcccctccgccagccaagtccgccgctctgacccccggcagcaagtcgccaccatggtgaagatcgtgacagttaagacccaggcgtaccaggaccagaagccgggcacgagcgggctgcggaagcgggtgaaggtgttccagagcagcgccaactacgcggagaacttcatccagagtatcatctccaccgtggagccggcgcagcggcaggaggccacgctggtggtgggcggggacggccggttctacatgaaggaggccatccagctcatcgctcgcatcgctgccgccaacgggatcggtcgcttggttatcggacagaatggaatcctctccacccctgctgtatcctgcatcattagaaaaatcaaagccattggtgggatcattctgacagccagtcacaacccagggggccccaatggagattttggaatcaaattcaatatttctaatggaggtcctgctccagaagcaataactgataaaattttccaaatcagcaagacaattgaagaatatgcagtttgccctgacctgaaagtagaccttggtgttctgggaaagcagcagtttgacttggaaaataagttcaaacccttcacagtggaaattgtggattcggtagaagcttatgctacaatgctgagaagcatctttgatttcagtgcactgaaagaactactttctgggccaaaccgactgaagatccgtattgatgctatgcatggagttgtgggaccgtatgtaaagaagatcctctgtgaagaactcggtgcccctgcgaactcggcagttaactgcgttcctctggaggactttggaggccaccaccctgaccccaacctcacctatgcagctgacctggtggagaccatgaagtcaggagagcatgattttggggctgcctttgatggagatggggatcgaaacatgattctgggcaagcatgggttctttgtgaacccttcagactctgtggctgtcattgctgccaacatcttcagcattccgtatttccagcagactggggtccgcggctttgcacggagcatgcccacgagtggtgctctggaccgggtggctagtgctacaaagattgctttgtatgagaccccaactggctggaagttttttgggaatttgatggacgcgagcaaactgtccctttgtggggaggagagcttcgggaccggttctgaccacatccgtgagaaagatggactgtgggctgtccttgcctggctctccatcctagccacccgcaagcagagtgtggaggacattctcaaagatcattggcaaaagtatggccggaatttcttcaccaggtatgattacgaggaggtggaagctgagggcgcaaacaaaatgatgaaggacttggaggccctgatgtttgatcgctcctttgtggggaagcagttctcagcaaatgacaaagtttacactgtggagaaggccgataactttgaatacagcgacccagtggatggaagcatttcaagaaatcagggcttgcgcctcattttcacagatggttctcgaatcgtcttccgactgagcggcactgggagtgccggggccaccattcggctgtacatcgatagctatgagaaggacgttgccaagattaaccaggacccccaggtcatgttggccccccttatttccattgctctgaaagtgtcccagctgcaggagaggacgggacgcactgcacccactgtcatcacctaagaagacaggcctgatgtggtacgtccctccacccccggacccatccaagtcatctgattgaagagcatgacagaaacaaaatgtattcaccaagcattttaggatttgactttttcactaaccagttgacgagcagtgcatttacaaggcactgccaaacaagatgcccttgggagctgtgagggaaagaggacctgcgggcttagatcaatctcaattccttttcatgccctcctgcattgctgctgcgtgggtatttgtctccttagccatcaggtacagtttacactacaatgtaagctataggtggagcatcagcagtgagtgaggccattcttcatccttaggatgtggcaatgaaatgatggtgcaagttcctttctcttttgtgaatctttccccccatttcctgtttacatgtaacccaacaaaatgcaatttctagtgccttctgtccaatcagttctttcctctgagtgagacgtacttggctacagatttctgccttgttttgcgacattgtcccattcacacagatattttgggataataaaggaaaataagctacaaaaaaaaaaaaaaaaa

SEQ ID NO: 513 - protein, 562 aa, Homo sapien
MVKIVTVKTQAYQDQKPGTSGLRKRVKVFQSSANYAENFIQSIISTVEPAQRQEATLVVGGDGRFYMKEAIQLIARIAAANGIGRLVIGQNGILSTPAVSCIIRKIKAIGGIILTASHNPGGPNGDFGIKFNISNGGPAPEAITDKIFQISKTIEEYAVCPDLKVDLGVLGKQQFDLENKFKPFTVEIVDSVEAYATMLRSIFDFSALKELLSGPNRLKIRIDAMHGVVGPYVKKILCEELGAPANSAVNCVPLEDFGGHHPDPNLTYAADLVETMKSGEHDFGAAFDGDGDRNMILGKHGFFVNPSDSVAVIAANIFSIPYFQQTGVRGFARSMPTSGALDRVASATKIALYETPTGWKFFGNLMDASKLSLCGEESFGTGSDHIREKDGLWAVLAWLSILATRKQSVEDILKDHWQKYGRNFFTRYDYEEVEAEGANKMMKDLEALMFDRSFVGKQFSANDKVYTVEKADNFEYSDPVDGSISRNQGLRLIFTDGSRIVFRLSGTGSAGATIRLYIDSYEKDVAKINQDPQVMLAPLISIALKVSQLQERTGRTAPTVIT

SEQ ID NO: 514 - DNA, 3396 bp, Homo sapien
aatctgccattttctgtccctgagtgagtctctggcgtcccaaattgcctgtttttctcgcaggctctattccgttcgctggttcgccacctcaggggaacgatggccatggagtccacagccactgccgccgtcgccgcggagctggtttctgccgacaaaattgaagatgttcctgctccttctacatctgcagataaagtggagagcaaccattaatctgctttctgtcactgaagatgggttgcattttgtagaatattatctaaatagaatcatacatctggatgtggatagtgaagctaagaaactattgggtttaggacagaaacatctggtgatgggggatattccagcagctgtcaatgcattccaggaagcagctagtcttttaggtaagaagtatggagagacagctaatgagtgtggagaagccttctttttctatgggaaatcacttctggagttggcaagaatggagaatggtgtgttgggaaacgccttggaaggtgtgcatgtggaagaggaagaaggagaaaaaacagaagatgaatctctggtagaaaataatgataacatagatgaggaagcaagggaagagttgagagaacaggtttatgacgccatgggagaaaaagaagaagccaaaaaaacagaagacaagtctttggcaaagcctgaaactgataaagaacaggacagtgaaatggagaagggtggaagagaagatatggatataagtaaatctgcagaggagccacaggaaaaagttgacttgactctagattggttaactgaaacctctgaagaggcaaaaggaggagcagcaccagaaggaccgaatgaagctgaggtcacttctgggaagccagaacaggaagtaccagatgctgaggaagaaaaatcagtttctggaactgatgtccaagaagagtgcagagaaaaaggaggtcaggagaagcagggagaggtaattgtgagcatagaggagaagccaaaagaagtttcagaagagcagcctgtggtgactctagaaaagcagggcactgcagtggaggtagaagcagagtctttagacccgacagtcaagccagtggatgtgggtggggacgagccagaggagaaggtagttacctctgaaaacgaggcaggaaaggcggttcttgaacaactggtaggtcaagaagtaccacctgctgaagagtcaccagaggtgacaacagaggctgcagaggcctcagctgtagaggctggatcagaagtctctgaaaagcctgggcaggaggctccagttctccctaaggatggtgcagtcaatggaccgtcagttgtaggagatcagactcctattgaaccacagacttctatagaaagactgacagaaacaaaagatggctcaggactagaggagaaggtcagggcaaagctggttcctagtcaggaggagactaagctgtctgtagaagagtctgaggcagctggagatggggttgataccaaggtagcccagggagctactgagaaatcacctgaagacaaagttcagatagctgctaatgaagagacacaagagagagaagaacagatgaaagagggtgaagaaactgaaggctcagaagaggatgataaagaaaatgataagaccgaagaaatgccaaatgattcagtccttgaaaacaagtctcttcaagaaaatgaggaggaggagattgggaacctagagcttgcctgggatatgctggatttagcaaagatcatttttaaaaggcaagaaacaaaagaagcacagctttatgctgcccaggcacatcttaaactcggagaagttagtgttgaatctgaaaactatgtgcaagctgtggaggagttccagtcctgccttaacctgcaggaacagtacctggaagcccacgaccgtctccttgcagagacccactaccagctgggcttggcttatgggtacaactctcagtatgatgaggcagtggcacagttcagcaaatctattgaagtcattgagaacagaatggctgtactaaacgagcaggtgaaggaggctgaaggatcgtctgctgaatacaagaaagaaattgaggaactaaaggaactgctacccgaaattagagagaagatagaagatgcaaaggagtctcagcgtagtgggaatgtagctgaactggctctgaaagctactctggtggagagttctacttcaggtttcactcctggtggaggaggctcttcagtctccatgattgccagtagaaagccaacagacggtgcttcctcatcaaattgtgtgactgatatttcccaccttgtcagaaagaagaggaaaccagaggaagagagtccccggaaagatgatgcaaagaaagccaaacaagagccggaggtgaacggaggcagtggggatgctgtccccagtggaaatgaagtttcggaaaacatggaggaggaggctgagaatcaggctgaaagccgggcagcagtggaggggacagtggaggctggagctacagttgaaagcactgcatgttaagagggggcacagccctcctcccaagggaaagtgtttttgtatataatgtattttttcacttttggaggattctttttgtataacttcaataaagattgtaagcaaaggttgaggctttgatggtttttttcttaattattggctgaatctgccttggagcactgctggttttatatattagccaaaggttttgttctggccttctgtactgatctgtgttcctgatcctaattcctatctgtctaacgtggaggtgatcaagtgtggctgtaggcctttgttttccaatggtgctatattctgttttcaaacacttcactgaacccagctgtcttgcaaactttcagtggtgctgtccctggatgggggctacaaaaacaagaattggtgaagatcttgctcttcagtgctgaaaatggatgatggactttggctgtgagccaggcctaggatggttcttgtcctatatccacctagtcttcacctggggctataattctgtcctggaaaaagaactctgaaaacctgggtcaggggaatgattcctaaggaaaacggtctgcatttgagctctggtttgaaagtagccaaggggactgatggtggacactccagatgtggttggaagcatatgtggggaggctggctggttgagttttgttattttctgtatagaaaggttgagatatatcaacacttggaattgttacccatctgcagaattgacttctcaaataaagatgctaaaaatctcaaaaaaaaaaaaaaaaaaaaaaaaaaaaaaaaaaaaaaaaaaaaaaaaaaaaaaaaaaaaaaaaaaaaaaaaaaaaaaaaaaaaaaaaaaaaaaaaaaaa

SEQ ID NO: 515 - protein, 790 aa, Homo sapien
MFLLLLHLQIKWRATINLLSVTEDGLHFVEYYLNRIIHLDVDSEAKKLLGLGQKHLVMGDIPAAVNAFQEAASLLGKKYGETANECGEAFFFYGKSLLELARMENGVLGNALEGVHVEEEEGEKTEDESLVENNDNIDEEAREELREQVYDAMGEKEEAKKTEDKSLAKPETDKEQDSEMEKGGREDMDISKSAEEPQEKVDLTLDWLTETSEEAKGGAAPEGPNEAEVTSGKPEQEVPDAEEEKSVSGTDVQEECREKGGQEKQGEVIVSIEEKPKEVSEEQPVVTLEKQGTAVEVEAESLDPTVKPVDVGGDEPEEKVVTSENEAGKAVLEQLVGQEVPPAEESPEVTTEAAEASAVEAGSEVSEKPGQEAPVLPKDGAVNGPSVVGDQTPIEPQTSIERLTETKDGSGLEEKVRAKLVPSQEETKLSVEESEAAGDGVDTKVAQGATEKSPEDKVQIAANEETQEREEQMKEGEETEGSEEDDKENDKTEEMPNDSVLENKSLQENEEEEIGNLELAWDMLDLAKIIFKRQETKEAQLYAAQAHLKLGEVSVESENYVQAVEEFQSCLNLQEQYLEAHDRLLAETHYQLGLAYGYNSQYDEAVAQFSKSIEVIENRMAVLNEQVKEAEGSSAEYKKEIEELKELLPEIREKIEDAKESQRSGNVAELALKATLVESSTSGFTPGGGGSSVSMIASRKPTDGASSSNCVTDISHLVRKKRKPEEESPRKDDAKKAKQEPEVNGGSGDAVPSGNEVSENMEEEAENQAESRAAVEGTVEAGATVESTAC

SEQ ID NO: 516 - DNA, 2507 bp, Homo sapien
cagcacaccccggcacctcctctgcggcagctgcgcctcgcaagcgcagtgccgcagcgcacgccggagtggctgtagctgcccggcgcggcgccgccctgcgcgggctgtgggctgcgggctgcgcccccgctgctggccagctctgcacggctgcgggctctgcggcgcccggtgctctgcaacgctgcggcgggcggcatgggataacgcggccatggtgcgccgagatcgcctccgcaggatgagggagtggtgggtccaggtggggctgctggccgtgcccctgcttgctgcgtacctgcacatcccaccccctcagctctcccctgcccttcactcatggaagtcttcaggcaagtttttcacttacaagggactgcgtatcttctaccaagactctgtgggtgtggttggaagtccagagatagttgtgcttttacacggttttccaacatccagctacgactggtacaagatttgggaaggtctgaccttgaggtttcatcgggtgattgcccttgatttcttaggctttggcttcagtgacaaaccgagaccacatcactattccatatttgagcaggccagcatcgtggaagcgcttttgcggcatctggggctccagaaccgcaggatcaaccttctttctcatgactatggagatattgttgctcaggagcttctctacaggtacaagcagaatcgatctggtcggcttaccataaagagtctctgtctgtcaaatggaggtatctttcctgagactcaccgtccactccttctccaaaagctactcaaagatggaggtgtgctgtcacccatcctcacacgactgatgaacttctttgtattctctcgaggtctcaccccagtctttgggccgtatactcggccctctgagagtgagctgtgggacatgtgggcagggatccgcaacaatgacgggaacttagtcattgacagtctcttacagtacatcaatcagaggaagaagttcagaaggcgctgggtgggagctcttgcctctgtaactatccccattcattttatctatgggccattggatcctgtaaatccctatccagagtttttggagctgtacaggaaaacgctgccgcggtccacagtgtcgattctggatgaccacattagccactatccacagctagaggatcccatgggcttcttgaatgcatatatgggcttcatcaactccttctgagctggaaagagtagcttccctgtattacctcccctactcccttatgtgttgtgtattccacttaggaagaaatgcccaaaagaggtcctggccatcaaacataattctctcacaaagtccactttactcaaattggtgaacagtgtataggaagaagccagcaggagctctgactaaggttgacataatagtccacctcccattactttgatatctgatcaaatgtatagacttggctttgttttttgtgctattaggaaattctgatgagcattactattcactgatgcagaaagacgttcttttgcataaaagacttttttttaacactttggacttctctgaaatatttagaagtgctaatttctggcccacccccaacaggaattctatagtaaggaggaggagaaggggggctccttccctctcctcgaatgacgttatgggcacatgccttttaaaagttctttaagcaacacagagctgagtcctctttgtcatacctttggatttagtgtttcatcagctgtttttagttataaacattttgttaaaatagatattggtttaaatgatacagtattttaggtatgatttaagactatgatttacctatacattatatatattttataaagatactaaaccagcatacccttactctgccagagtagtgaagctaattaaacacatttggtttctgaataaattgaactaaatccaaactatttcctaaaatcacaggacattaaggaccaatagcatctgtgccagagatgtactgttattagctgggaagaccaattctaacagcaaataacagtctgagactcctcatacctcagtggttagaagcatgtctctcttgagctacagtagaggggaagggattgttgtgtagtcaagtcaccatgctgaatgtacactgattcctttatgatgactgcttaactccccactgcctgtcccagagaggctttccaatgtagctcagtaattcctgttactttacagacaggaaagttccagaaactttaagaacaaactctgaaagacctatgagcaaatggtgctgaatactttttttttaaagccacatttcattgtcttagtcaaagcaggattattaagtgattatttaaaattcgtttttttaaattagcaacttcaagtataacaactttgaaactggaataagtgtttattttctattaataaaaatgaattgtgacaaaaaaaaaaaaaaaaaaaaaaaaaaaaaaaaaaaaaaaaaaaaaaaaaa

SEQ ID NO: 517 - protein, 335 aa, Homo sapien
MVRRDRLRRMREWWVQVGLLAVPLLAAYLHIPPPQLSPALHSWKSSGKFFTYKGLRIFYQDSVGVVGSPEIVVLLHGFPTSSYDWYKIWEGLTLRFHRVIALDFLGFGFSDKPRPHHYSIFEQASIVEALLRHLGLQNRRINLLSHDYGDIVAQELLYRYKQNRSGRLTIKSLCLSNGGIFPETHRPLLLQKLLKDGGVLSPILTRLMNFFVFSRGLTPVFGPYTRPSESELWDMWAGIRNNDGNLVIDSLLQYINQRKKFRRRWVGALASVTIPIHFIYGPLDPVNPYPEFLELYRKTLPRSTVSILDDHISHYPQLEDPMGFLNAYMGFINSF

SEQ ID NO: 518 - DNA, 1324 bp, Homo sapien
cggcacgagcgccgccgaggattcagcagcctcccccttgagccccctcgcttcccgacgttccgttcccccctgcccgccttctcccgccaccgccgccgccgccttccgcaggccgtttccaccgaggaaaaggaatcgtatcgtatgtccgctatccagaacctccactctttcgacccctttgctgatgcaagtaagggtgatgacctgcttcctgctggcactgaggattatatccatataagaattcaacagagaaacggcaggaagacccttactactgtccaagggatcgctgatgattacgataaaaagaaactagtgaaggcgtttaagaaaaagtttgcctgcaatggtactgtaattgagcatccggaatatggagaagtaattcagctacagggtgaccaacgcaagaacatatgccagttcctcgtagagattggactggctaaggacgatcagctgaaggttcatgggttttaagtgcttgtggctcactgaagcttaagtgaggatttccttgcaatgagtagaatttcccttctctcccttgtcacaggtttaaaaacctcacagcttgtataatgtaaccatttggggtccgcttttaacttggactagtgtaactccttcatgcaataaactgaaaagagccatgctgtctagtcttgaagtccctcatttaaacagaggtcaagcaataggcgcctggcagtgtcaagcctgaaaccaagcaataccgtcatgtttcagccaagcccagagccctaagattacaaacaactatggccggaacctcctcagctctccctctgcagagttccctaccctaagagaatgttaccacctgaacagtcctcggtgaatctgagaggagaggatggggtaaggcagaagcaccagctgtactactagaagggagcttttggtggtagatcccctggtgtctccaacctgactaggtggacagagctcaaagaggccctcttaccgctagcgaggtgataggacatctggcttgccacaaaggtctgttcgaccagacatatcctagctaagggatgtccaaacatcagaatgtgaggccaaccttctatcagagttaaacttttgacaagggaacaaatctcaaactgatccatcagtcatgtagctagctgtagagcttgcaacttaatagcagcagctgcccaatgccatgtgaagtaacaaactggtttttggtttttttttccccttcagttttaatgttatgtgtaatgtatttaaacccttatttaaataaaacttgttttcagaaaaaaaaaaaaaaaaaaaa

SEQ ID NO: 519 - protein, 113 aa, Homo sapien
MSAIQNLHSFDPFADASKGDDLLPAGTEDYIHIRIQQRNGRKTLTTVQGIADDYDKKKLVKAFKKKFACNGTVIEHPEYGEVIQLQGDQRKNICQFLVEIGLAKDDQLKVHGF

SEQ ID NO: 520 - DNA, 368 bp, Homo sapien
ctttttcgtccttttccccggttgctgcttgctgtgagtgtctctagggtgatacgtgggtgagaaaggtcctggtccgcgccagagcccagcgcgcctcgtcgccatgcctcggaaaattgaggaaatcaaggacttcctgctcacagcccgacgaaaggatgccaaatctgtcaagatcaagaaaaataaggacaacgtgaagtttaaagttcgatgcagcagatacctttacaccctggtcatcactgacaaagagaaggcagagaaactgaagcagtccctgccccccggtttggcagtgaaggaactgaaatgaaccagacacactgattggaactgtattatattaaaatactaaaaatcct

SEQ ID NO: 521 - protein, 70 aa, Homo sapien [sequence omitted]

SEQ ID NO: 522 - DNA, 2701 bp, Homo sapien
gttgctgcggagccaggaggggaagcgatggctgggcccgcgtggatctctaaggtctctcggctgctgggggcattccacaacccaaaacaggtgaccagaggttttactggtggtgttcagacagtaactttaattccaggagatggtattggcccagaaatttcagctgcagttatgaagatttttgatgctgccaaagcacctattcagtgggaggagcggaacgtcactgccattcaaggacctggaggaaagtggatgatcccttcagaggctaaagagtccatggataagaacaagatgggcttgaaaggccctttgaagaccccaatagcagccggtcacccatctatgaatttactgctgcgcaaaacatttgacctttacgcgaatgtccgaccatgtgtctctatcgaaggctataaaaccccttacaccgatgtaaatattgtgaccattcgagagaacacagaaggagaatacagtggaattgagcatgtgattgttgatggagtcgtgcagagtatcaagctcatcaccgagggggcgagcaagcgcattgctgagtttgcctttgagtatgcccggaacaaccaccggagcaacgtcacggcggtgcacaaagccaacatcatgcggatgtcagatgggctttttctacaaaaatgcagggaagttgcagaaagctgtaaagatattaaatttaatgagatgtaccttgatacagtatgtttgaatatggtacaagatccttcccaatttgatgttcttgttatgccaaatttgtatggagacatccttagtgacttgtgtgcaggattgatcggaggtctcggtgtgacaccaagtggcaacattggagccaatggggttgcaatttttgagtcggttcatgggacggctccagacattgcaggcaaggacatggcgaatcccacagccctcctgctcagtgccgtgatgatgctgcgccacatgggactttttgaccatgctgcaagaattgaggctgcgtgttttgctacaattaaggacggaaagagcttgacaaaagatttgggaggcaatgcaaaatgctcagacttcacagaggaaatctgtcgccgagtaaaagatttagattaacacttctacaactggcatttacatcagtcactctaaatggacaccacatgaacctctgtttagaatacctacgtatgtatgcattggtttgcttgtttcttgacagtacatttttagatctggccttttcttaacaaaatctgtgcaaaagatgcaggtggatgtccctaggtctgttttcaaagaactttttccaagtgcttgttttatttattaagtgtctacctggtaaatgttttttttgtaaactctgagtggactgtatcatttgctattctaaaccattttacacttaagttaaaatagtttctcttcagctgtaaataacaggatacagaattaacaagagaaaatgtctaactttttaagaaaaaccttattttcttcggtttttgaaaaacataatggaaataaaacaggatattgacataatagcacaaaatgacactcttctaaaactaaatgggcacaagagaattttcctgggaaagttcacatcaaaaagagtgaatgtggtatatttctaaatgatatggaaaatagagacagatttgtcctttacagaaattactgagtgtgaataaaaacttcagatccaagaaatatataatgagagatataatttttgttaataagacaaaggtaatatattggatacaaagacacaaatgtattgtgtgttcaattattttgttgtcttgagatttaatattctttccaagagcttttaatgaagcagagagctagtacttcattttcactggatacattttcagcatcatgagttgtcacagcctctgagcccctgatctgaagccagaagggctgagtgtattgtaaacttattcttgcatgttgctgtctgggaatggaccacactacagcaggtagttctgggggcgatactgccgaaaggcccgaacacatgtattttggctgcaattgaggaacttgggatgctattaattttgtatttcagcaactgccccttctcctatcccaaagcaccaattactgccctctgcctcagcagtaccagtataagatgacattccaaagactggaggcaactcagcctgagttaattcacaaaattatgccatgctggggcttgagcttgagcttgggcttaggcttgggctcagcttttgaccctcaggcatctcctttcccttcctgtcttcctctcccttctcctctgctgcagcatgattttcttaatcttcagacactcactattttcatgaacagttaccctctgtccccacaaccaaagacaactcatggcctcctttggcccttgtgtaacattgcaaacctgtggctttgcaaaatgtacccaggtcacaaggggatttttttttttttagcaatgatatccctgtctgggtcactttttaagcttgtaaccgcccccccagacttataatcttaaatgtattttcctttgtttaagctgctgcttcctctgtttcattggattgtgccagttatcagtggctcttgggttcaaagtaataaagaattccaaaactgaaaaaaaaaaaaaaaaaaaaaaaaaaaaaaaaaaaaa

SEQ ID NO: 523 - protein, 366 aa, Homo sapien
MAGPAWISKVSRLLGAFHNPKQVTRGFTGGVQTVTLIPGDGIGPEISAAVMKIFDAAKAPIQWEERNVTAIQGPGGKWMIPSEAKESMDKNKMGLKGPLKTPIAAGHPSMNLLLRKTFDLYANVRPCVSIEGYKTPYTDVNIVTIRENTEGEYSGIEHVIVDGVVQSIKLITEGASKRIAEFAFEYARNNHRSNVTAVHKANIMRMSDGLFLQKCREVAESCKDIKFNEMYLDTVCLNMVQDPSQFDVLVMPNLYGDILSDLCAGLIGGLGVTPSGNIGANGVAIFESVHGTAPDIAGKDMANPTALLLSAVMMLRHMGLFDHAARIEAACFATIKDGKSLTKDLGGNAKCSDFTEEICRRVKDLD

SEQ ID NO: 524 - DNA, 2613 bp, Homo sapien
gcgcgccttctccagtccgcggtgccatggcccccgcccgtctgttcgcgctgctgctgctcttcgtaggcggagtcgccgagtcgatccgagagactgaggtcatcgacccccaggacctcctagaaggccgatacttctccggagccctaccagacgatgaggatgtagtggggcccgggcaggaatctgatgactttgagctgtctggctctggagatctggatgacttggaagactccatgatcggccctgaagttgtccatcccttggtgcctctagataaccatatccctgagagggcagggtctgggagccaagtccccaccgaacccaagaaactagaggagaatgaggttatccccaagagaatctcacccgttgaagagagtgaggatgtgtccaacaaggtgtcaatgtccagcactgtgcagggcagcaacatctttgagagaacggaggtcctggcagctctgattgtgggtggcatcgtgggcatcctctttgccgtcttcctgatcctactgctcatgtaccgtatgaagaagaaggatgaaggcagctatgacctgggcaagaaacccatctacaagaaagcccccaccaatgagttctacgcgtgaagcttgcttgtgggcactggcttggactttagcggggagggaagccaggggattttgaagggtggacattagggtagggtgaggtcaacctaatactgacttgtcagtatctccagctctgattacctttgaagtgttcagaagagacattgtcttctactgttctgccaggttcttcttgagctttgggcctcagttgccctggcagaaaaatggattcaacttggcctttctgaaggcaagactgggattggatcacttcttaaacttccagttaagaatctaggtccgccctcaagcccatactgaccatgcctcatccagagctcctctgaagccagggggctaacggatgttgtgtggagtcctggctggaggtcctcccccagtggccttcctcccttcctttcacagccggtctctctgccaggaaatgggggaaggaactagaaccacctgcaccttgagatgtttctgtaaatgggtacttgtgatcacactacgggaatctctgtggtatatacctggggccattctaggctctttcaagtgacttttggaaatcaaccttttttatttgggggggaggatggggaaaagagctgagagtttatgctgaaatggatttatagaatatttgtaaatctatttttagtgtttgttcgtttttttaactgttcattcctttgtgcagagtgtatatctctgcctgggcaagagtgtggaggtgccgaggtgtcttcattctctcgcacatttccacagcacctgctaagtttgtatttaatggtttttgtttttgtttttgtttgtttcttgaaaatgagagaagagccggagagatgatttttattaattttttttttttttttttttttactatttatagctttagatagggcctcccttcccctcttctttctttgttctctttcattaaaccccttccccagttttttttttatactttaaaccccgctcctcatggccttggccctttctgaagctgcttcctcttataaaatagcttttgccgaaacatagtttttttttagcagatcccaaaatataatgaaggggatggtgggatatttgtgtctgtgttcttataatatattattattcttccttggttctagaaaaatagataaatatatttttttcaggaaatagtgtggtgtttccagtttgatgttgctgggtggttgagtgagtgaattttcatgtggctgggtgggtttttgcctttttctcttgccctgttcctggtgccttctgatggggctggaatagttgaggtggatggttctaccctttctgccttctgtttgggacccagctggtgttctttggtttgctttcttcaggctctagggctgtgctatccaatacagtaaccacatgcggctgtttaaagttaagccaattaaaatcacataagattaaaaattccttcctcagttgcactaaccacgtttctagaggcgtcactgtatgtagttcatggctactgtactgacagcgagagcatgtccatctgttggacagcactattctagagaactaaactggcttaacgagtcacagcctcagctgtgctgggacgacccttgtctccctgggtaggggggggggaatgggggagggctgatgaggccccagctggggcctgttgtctgggaccctccctctcctgagaggggaggcctggtggcttagcctgggcaggtcgtgtctcctcctgaccccagtggctgcggtgaggggaaccaccctcccttgctgcaccagtggccattagctcccgtcaccactgcaacccagggtcccagctggctgggtcctcttctgcccccagtgcccttccccttgggctgtgttggagtgagcacctcctctgtaggcacctctcacactgttgtctgttactgattttttttgataaaaagataataaaacctggtactttctaaaaaaaaaaaaaaaaaaa

SEQ ID NO: 525 - protein, 198 aa, Homo sapien
MAPARLFALLLLFVGGVAESIRETEVIDPQDLLEGRYFSGALPDDEDVVGPGQESDDFELSGSGDLDDLEDSMIGPEVVHPLVPLDNHIPERAGSGSQVPTEPKKLEENEVIPKRISPVEESEDVSNKVSMSSTVQGSNIFERTEVLAALIVGGIVGILFAVFLILLLMYRMKKKDEGSYDLGKKPIYKKAPTNEFYA

SEQ ID NO: 526 - DNA, 1500 bp, Homo sapien
ctgcctgacatagacacgttacagattcacgtgatggattgcatcatttaagtgttgatgtatcacctccccaaaactgttggtaaatgtcagattttttcctccaagagttgtgcttttgtgttatttgttttcactcaaatattttgcctcattattcttgttttaaaagaaagaaaacaggccgggcacagtggctcatgcctgtaatcccagcactttgggaggtcgaggtgggtggatcacttggggtcagggtttgagaccagcctggccaacatggcggaaccctgtctctaccaaaattacaaaaattagccgagcatggtggcgcatgcctgtagtcgcagctactcgcgaggttgaggcaggagaattgcttgaacccaggaagtggcagttgcagtgagccgagacgacaccactgcactccagcctgggtgacagagggagactctgtctcgaaagaaagaaagaaaaaaaggaaggaaggagaaggaaggaaggagaagaaaaggtacctgttctacgtagaacacctttggtggagttccatcaactcgcaaagtagaatccttacctactactcttctgataataattttaatattttttatgtttggttgatgcgagcagctgcactgctcatgcagttagctagcatgtgacatcatgtgacaaagttcatgtaattagatggaagaaacctcactgattaattttaagaaccttttagggatgcaggaacaatgaagtggccacagtatgtgctgtttttgaagcatttttaaaaacgaattgtagttgtttttcttcatttaaaatggatctgttggaggttatgtgtgtatgttgtagttttattgcagccacaataattttaccaaagttttcacataggcagttagcctttacttaatatcaagacaagtgaaaaaatattggcatcgatgaaaccgataacattggcctcattggatttctttacccattcacagtgtaaagaagttaccttcatgctttcattgtacctgcaggcctgtgggcttgtacagtagataattaatttctaaaaagaacagctgcctattttcttcctaggttaggttatatcttcataatcacaagaattagtgatggcaaaataaaattttgcttatgaatcttttacattgtttatatatgattaatatcatcatatatattttctgtattaagctcatttggcttcatttaagctgtatacttagtcatatatctttcattagttctatggatatgagcagatccctttactggagcccagtatgtgctgtgtgagttagaagtcattcttgctgagaaggtgaataggtagggatttgccttgttttgtaagtctacaatttgccaagagtaaataacactggaccagctgtaaaagtaaacagtgtgtttatgcattgagatactaaagcatttaagaaaaaattaaaaaaaaaaaaaaaaaaaaaaaaaaaa

SEQ ID NO: 527 - protein, 16 aa, Homo sapien
LPDIDTLQIHVMDCII

SEQ ID NO: 528 - DNA, 663 bp, Homo sapien
agtgcatcctgggttggcgtagccatggcgtctcgtgtcctttcagcctatgtcagccgcctgcccgcggcctttgcgccgctgccccgggtccggatgctggccgtggcccggcctctcagcactgctctctgctccgcggggacccagacgaggctcgggactttgcagccggccttagtgctcgcgcaggttcctggtagagttacacagttgtgccgccagtatagcgacatgcctcctttgacgttagagggcatccaggaccgtgttctttacgtattgaaactctatgacaagattgacccagagaagctttcagtaaattctcattttatgaaagacctgggcttagacagtttggaccaagtggagattatcatggccatggaagacgaatttgggtttgaaattcctgatatagatgctgaaaagttaatgtgtccacaagaaattgtagattacattgcagataagaaagatgtatatgaataaagtatcagaccctttggctttgctgagagaggactcagatgatagtgacgaatgtctggcagtgaggacacattttggcattcttgctgactctgacagagtgattctgatggacttgtatttaaattgtatgtgttttactctttgaaaataaatctataaaaccaa

SEQ ID NO: 529 - protein, 156 aa, Homo sapien
MASRVLSAYVSRLPAAFAPLPRVRMLAVARPLSTALCSAGTQTRLGTLQPALVLAQVPGRVTQLCRQYSDMPPLTLEGIQDRVLYVLKLYDKIDPEKLSVNSHFMKDLGLDSLDQVEIIMAMEDEFGFEIPDIDAEKLMCPQEIVDYIADKKDVYE

SEQ ID NO: 530 - DNA, 4484 bp, Homo sapien
tgcccaggaggagtaggagcaggagcagaagcagaagcggggtccggagctgcgcgcctacgcgggacctgtgtccgaaatgccggtgcgaggagaccgcgggtttccaccccggcgggagctgtcaggttggctccgcgccccaggcatggaagagctgatatgggaacagtacactgtgaccctacaaaaggattccaaaagaggatttggaattgcagtgtccggaggcagagacaacccccactttgaaaatggagaaacgtcaattgtcatttctgatgtgctcccgggtgggcctgctgatgggctgctccaagaaaatgacagagtggtcatggtcaatggcacccccatggaggatgtgcttcattcgtttgcagttcagcagctcagaaaaagtgggaaggtcgctgctattgtggtcaagaggccccggaaggtccaggtggccgcacttcaggccagccctcccctggatcaggatgaccgggcttttgaggtgatggacgagtttgatggcagaagtttccggagtggctacagcgagaggagccggctgaacagccatggggggcgcagccgcagctgggaggacagcccggaaagggggcgtccccatgagcgggcccggagccgggagcgggacctcagccgggaccggagccgtggccggagcctggagcggggcctggaccaagaccatgcgcgcacccgagaccgcagccgtggccggagcctggagcggggcctggaccacgactttgggccatcccgggaccgggaccgtgaccgcagccgcggccggagcattgaccaggactacgagcgagcctatcaccgggcctacgacccagactacgagcgggcctacagcccggagtacaggcgcggggcccgccacgatgcccgctctcggggaccccgaagccgcagccgcgagcacccgcactcacggagccccagccccgagcctagggggcggccggggcccatcggggtcctcctgatgaaaagcagagcgaacgaagagtatggtctccggcttgggagtcagatcttcgtaaaggaaatgacccgaacgggtctggcaactaaagatggcaaccttcacgaaggagacataattctcaagatcaatgggactgtaactgagaacatgtctttaacggatgctcgaaaattgatagaaaagtcaagaggaaaactacagctagtggtgttgagagacagccagcagaccctcatcaacatcccgtcattaaatgacagtgactcagaaatagaagatatttcagaaatagagtcaacccgatcattttctccagaggagagacgtcatcagtattctgattatgattatcattcctcaagtgagaagctgaaggaaaggccaagttccagagaggacacgccgagcagattgtccaggatgggtgcgacacccactccctttaagtccacaggggatattgcaggcacagttgtcccagagaccaacaaggaacccagataccaagaggaacccccagctcctcaaccaaaagcagccccgagaacttttcttcgtcctagtcctgaagatgaagcaatatatggccctaataccaaaatggtaaggttcaagaagggagacagcgtgggcctccggttggctggtggcaatgatgtcgggatatttgttgctggcattcaagaagggacctcggcggagcaggagggccttcaagaaggagaccagattctgaaggtgaacacacaggatttcagaggattagtgcgggaggatgccgttctctacctgttagaaatccctaaaggtgaaatggtgaccattttagctcagagccgagccgatgtgtatagagacatcctggcttgtggcagaggggattcgttttttataagaagccactttgaatgtgagaaggaaactccacagagcctggccttcaccagaggggaggtcttccgagtggtagacacactgtatgacggcaagctgggcaactggctggctgtgaggattgggaacgagttggagaaaggcttaatccccaacaagagcagagctgaacaaatggccagtgttcaaaatgcccagagagacaacgctggggaccgggcagatttctggagaatgcgtggccagaggtctggggtgaagaagaacctgaggaaaagtcgggaagacctcacagctgttgtgtctgtcagcaccaagttcccagcttatgagagggttttgctgcgagaagctggtttcaagagacctgtggtcttattcggccccatagctgatatagcaatggaaaaattggctaatgagttacctgactggtttcaaactgctaaaacggaaccaaaagatgcaggatctgagaaatccactggagtggtccggttaaataccgtgaggcaagttattgaacaggataagcatgcactactggatgtgactccgaaagctgtggacctgttgaattacacccagtggttctcaattgtgatttctttcacgccagactccagacaaggtgtcaacaccatgagacaaaggttagacccaacgtccaacaatagttctcgaaagttatttgatcacgccaacaagcttaaaaaaacgtgtgcacacctttttacagctacaatcaacctaaattcagccaatgatagctggtttggcagcttaaaggacactattcagcatcagcaaggagaagcggtttgggtctctgaaggaaagatggaagggatggatgatgaccccgaagaccgcatgtcctacttaactgccatgggcgcagactatctgagttgcgacagccgcctcatcagtgactttgaagacacggacggtgaaggaggcgcctacactgacaatgagctggatgagccagccgaggagccgctggtgtcgtccatcacccgctcctcggagccggtgcagcacgaggagagcataaggaaacccagcccagagccacgagctcagatgaggagggctgctagcagcgatcaacttagggacaatagcccgcccccagcattcaagccagagccgtccaaggccaaaacccagaacaaagaagaatcctatgacttctccaaatcctatgaatataagtcaaacccctctgccgttgctggtaatgaaactcctggggcatctaccaaaggttatcctcctcctgttgcagcaaaacctacctttgggcggtctatactgaagccctccactcccatccctcctcaagagggtgaggaggtgggagagagcagtgaggagcaagataatgctcccaaatcagtcctgggcaaagtcaaaatatttggagaagatggatcacaagggccagggttacaagagaatgcaggagctccaggaagcacagaatgcaaggatcgaaattgcccagaagcatcctgatatctatgcagttccaatcaaaacgcacaagccagaccctggcacgccccagcacacgagttccagaccccctgagccacagaaagctccttccagaccttatcaggataccagaggaagttatggcagtgatgccgaggaggaggagtaccgccagcagctgtcagaacactccaagcgcggttactatggccagtctgcccgataccgggacacagaattatagatgtctgagcacggactctcccaggcctgcctgcatggcatcagactagccactcctgccaggccgccgggatggttcttctccagttagaatgcaccatggagacgtggtgggactccagctcgtgtgtcctcatggagaacccaggggacagctggtgcaaattcagaactgagggctctgtttgtgggactgggttagaggagtctgtggctttttgttcagaattaagcagaacactgcagtcagatcctgttacttgcttcagtggaccgaaatctgtattctgtttgcgtacttgtaatatgtatattaagaagcaataactatttttcctcattaatagctgccttcaaggactgtttcagtgtgagtcagaatgtgaaaaaggaataaaaaatactgttgggctcaaactaaattcaaagaagtactttattgcaactcttttaagtgccttggatgagaagtgtcttaaattttcttcctttgaagctttaggcagagccataatggactaaaacattttgactaagtttttataccagcttaatagctgtagttttccctgcactgtgtcatcttttcaaggcatttgtctttgtaatattttccataaatttggactgtctatatcataactatacttgatagtttggctataagtgctcaatagcttgaagcccaagaagttggtatcgaaatttgttgtttgtttaaacccaagtgctgcacaaaagcagatacttgaggaaaacactatttccaaaagcacatgtattgacaacagttttataatttaataaaaaggaatacattgcaatccgt

SEQ ID NO: 531 - protein, 1116 aa, Homo sapien
MPVRGDRGFPPRRELSGWLRAPGMEELIWEQYTVTLQKDSKRGFGIAVSGGRDNPHFENGETSIVISDVLPGGPADGLLQENDRVVMVNGTPMEDVLHSFAVQQLRKSGKVAAIVVKRPRKVQVAALQASPPLDQDDRAFEVMDEFDGRSFRSGYSERSRLNSHGGRSRSWEDSPERGRPHERARSRERDLSRDRSRGRSLERGLDQDHARTRDRSRGRSLERGLDHDFGPSRDRDRDRSRGRSIDQDYERAYHRAYDPDYERAYSPEYRRGARHDARSRGPRSRSREHPHSRSPSPEPRGRPGPIGVLLMKSRANEEYGLRLGSQIFVKEMTRTGLATKDGNLHEGDIILKINGTVTENMSLTDARKLIEKSRGKLQLVVLRDSQQTLINIPSLNDSDSEIEDISEIESTRSFSPEERRHQYSDYDYHSSSEKLKERPSSREDTPSRLSRMGATPTPFKSTGDIAGTVVPETNKEPRYQEEPPAPQPKAAPRTFLRPSPEDEAIYGPNTKMVRFKKGDSVGLRLAGGNDVGIFVAGIQEGTSAEQEGLQEGDQILKVNTQDFRGLVREDAVLYLLEIPKGEMVTILAQSRADVYRDILACGRGDSFFIRSHFECEKETPQSLAFTRGEVFRVVDTLYDGKLGNWLAVRIGNELEKGLIPNKSRAEQMASVQNAQRDNAGDRADFWRMRGQRSGVKKNLRKSREDLTAVVSVSTKFPAYERVLLREAGFKRPVVLFGPIADIAMEKLANELPDWFQTAKTEPKDAGSEKSTGVVRLNTVRQVIEQDKHALLDVTPKAVDLLNYTQWFSIVISFTPDSRQGVNTMRQRLDPTSNNSSRKLFDHANKLKKTCAHLFTATINLNSANDSWFGSLKDTIQHQQGEAVWVSEGKMEGMDDDPEDRMSYLTAMGADYLSCDSRLISDFEDTDGEGGAYTDNELDEPAEEPLVSSITRSSEPVQHEESIRKPSPEPRAQMRRAASSDQLRDNSPPPAFKPEPSKAKTQNKEESYDFSKSYEYKSNPSAVAGNETPGASTKGYPPPVAAKPTFGRSILKPSTPIPPQEGEEVGESSEEQDNAPKSVLGKVKIFGEDGSQGPGLQENAGAPGSTECKDRNCPEAS

SEQ ID NO: 532 - DNA, 2787 bp, Homo sapien
agagcggaggccgcactccagcactgcgcagggaccgccttggaccgcagttgccggccaggaatcccagtgtcacggtggacacgcctccctcgcgcccttgccgcccacctgctcacccagctcaggggctttggaattctgtggccacactgcgaggagatcggttctgggtcggaggctacaggaagactcccactccctgaaatctggagtgaagaacgccgccatccagccaccattccaaggaggtgcaggagaacagctctgtgataccatttaacttgttgacattacttttatttgaaggaacgtatattagagcttactttgcaaagaaggaagatggttgtttccgaagtggacatcgcaaaagctgatccagctgctgcatcccaccctctattactgaatggagatgctactgtggcccagaaaaatccaggctcggtggctgagaacaacctgtgcagccagtatgaggagaaggtgcgcccctgcatcgacctcattgactccctgcgggctctaggtgtggagcaggacctggccctgccagccatcgccgtcatcggggaccagagctcgggcaagagctccgtgttggaggcactgtcaggagttgcccttcccagaggcagcgggatcgtgaccagatgcccgctggtgctgaaactgaagaaacttgtgaacgaagataagtggagaggcaaggtcagttaccaggactacgagattgagatttcggatgcttcagaggtagaaaaggaaattaataaagcccagaatgccatcgccggggaaggaatgggaatcagtcatgagctaatcaccctggagatcagctcccgagatgtcccggatctgactctaatagaccttcctggcataaccagagtggctgtgggcaatcagcctgctgacattgggtataagatcaagacactcatcaagaagtacatccagaggcaggagacaatcagcctggtggtggtccccagtaatgtggacatcgccaccacagaggctctcagcatggcccaggaggtggaccccgagggagacaggaccatcggaatcttgacgaagcctgatctggtggacaaaggaactgaagacaaggttgtggacgtggtgcggaacctcgtgttccacctgaagaagggttacatgattgtcaagtgccggggccagcaggagatccaggaccagctgagcctgtccgaagccctgcagagagagaagatcttctttgagaaccacccatatttcagggatctgctggaggaaggaaaggccacggttccctgcctggcagaaaaacttaccagcgagctcatcacacatatctgtaaatctctgcccctgttagaaaatcaaatcaaggagactcaccagagaataacagaggagctacaaaagtatggtgtcgacataccggaagacgaaaatgaaaaaatgttcttcctgatagataaaattaatgcctttaatcaggacatcactgctctcatgcaaggagaggaaactgtaggggaggaagacattcggctgtttaccagactccgacacgagttccacaaatggagtacaataattgaaaacaattttcaagaaggccataaaattttgagtagaaaaatccagaaatttgaaaatcagtatcgtggtagagagctgccaggctttgtgaattacaggacatttgagacaatcgtgaaacagcaaatcaaggcactggaagagccggctgtggatatgctacacaccgtgacggatatggtccggcttgctttcacagatgtttcgataaaaaattttgaagagttttttaacctccacagaaccgccaagtccaaaattgaagacattagagcagaacaagagagagaaggtgagaagctgatccgcctccacttccagatggaacagattgtctactgccaggaccaggtatacaggggtgcattgcagaaggtcagagagaaggagctggaagaagaaaagaagaagaaatcctgggattttggggctttccagtccagctcggcaacagactcttccatggaggagatctttcagcacctgatggcctatcaccaggaggccagcaagcgcatctccagccacatccctttgatcatccagttcttcatgctccagacgtacggccagcagcttcagaaggccatgctgcagctcctgcaggacaaggacacctacagctggctcctgaaggagcggagcgacaccagcgacaagcggaagttcctgaaggagcggcttgcacggctgacgcaggctcggcgccggcttgcccagttccccggttaaccacactctgtccagccccgtagacgtgcacgcacactgtctgcccccgttcccgggtagccactggactgacgacttgagtgctcagtagtcagactggatagtccgtctctgcttatccgttagccgtggtgatttagcaggaagctgtgagagcagtttggtttctagcatgaagacagagccccaccctcagatgcacatgagctggcgggattgaaggatgctgtcttcgtactgggaaagggattttcagccctcagaatcgctccaccttgcagctctccccttctctgtattcctagaaactgacacatgctgaacatcacagcttatttcctcatttttataatgtcccttcacaaacccagtgttttaggagcatgagtgccgtgtgtgtgcgtcctgtcggagccctgtctcctctctctgtaataaactcatttctagcag

SEQ ID NO: 533 - protein, 662 aa, Homo sapien
MVVSEVDIAKADPAAASHPLLLNGDATVAQKNPGSVAENNLCSQYEEKVRPCIDLIDSLRALGVEQDLALPAIAVIGDQSSGKSSVLEALSGVALPRGSGIVTRCPLVLKLKKLVNEDKWRGKVSYQDYEIEISDASEVEKEINKAQNAIAGEGMGISHELITLEISSRDVPDLTLIDLPGITRVAVGNQPADIGYKIKTLIKKYIQRQETISLVVVPSNVDIATTEALSMAQEVDPEGDRTIGILTKPDLVDKGTEDKVVDVVRNLVFHLKKGYMIVKCRGQQEIQDQLSLSEALQREKIFFENHPYFRDLLEEGKATVPCLAEKLTSELITHICKSLPLLENQIKETHQRITEELQKYGVDIPEDENEKMFFLIDKINAFNQDITALMQGEETVGEEDIRLFTRLRHEFHKWSTIIENNFQEGHKILSRKIQKFENQYRGRELPGFVNYRTFETIVKQQIKALEEPAVDMLHTVTDMVRLAFTDVSIKNFEEFFNLHRTAKSKIEDIRAEQEREGEKLIRLHFQMEQIVYCQDQVYRGALQKVREKELEEEKKKKSWDFGAFQSSSATDSSMEEIFQHLMAYHQEASKRISSHIPLIIQFFMLQTYGQQLQKAMLQLLQDKDTYSWLLKERSDTSDKRKFLKERLARLTQARRRLAQFPG

SEQ ID NO: 534 - DNA, 1321 bp, Homo sapien
cccccaagatggctgctgaggacgagttacagctgccgcggctccccgagctgttcgaaactggtagacagttactggacgaagtagaagtggcgactgaacccgccggttcccggatagtccaggagaaggtgttcaagggcttggacctccttgagaaggctgccgaaatgttatcgcagctcgacttgttcagccgaaatgaagatttggaagagattgcttccaccgacctgaagtaccttttggtgccagcgtttcaaggagccctcaccatgaaacaagtcaaccccagcaagcgtctagatcatttgcagcgggctcgagaacactttataaactacttaactcagtgccattgctatcatgtggcagagtttgagctgcccaaaaccatgaacaactctgctgaaaatcacactgccaattcctccatggcttatcctagtctcgttgctatggcatctcaaagacaggctaaaatacagagatacaagcagaagaaggagttggagcataggttgtctgcaatgaaatctgctgtggaaagtggtcaagcagatgatgagcgtgttcgtgaatattatcttcttcaccttcagaggtggattgatatcagcttagaagagattgagagcattgaccaggaaataaagatcctgagagaaagagactcttcaagagaggcatcaacttctaactcatctcgccaggagaggcctccagtgaaacccttcattctcactcggaacatggctcaagccaaagtatttggagctggttatccaagtctgccaactatgacggtgagtgactggtatgagcaacatcggaaatatggagcattaccggatcagggaatagccaaggcagcaccagaggaattcagaaaagcagctcagcaacaggaagaacaagaagaaaaggaggaagaggatgatgaacaaacactccacagagcccgggagtgggatgactggaaggacacccatcctaggggctatgggaaccgacagaacatgggctgatcttcccacaacaccacaggactgcagggtgcacaactccctgccaaggaaaaccatgcagtcctcccctccctggtctcctgcttcagctctgtacaacgagggcaaagatgctaaatcttgctttgcattcagtaaagtgtcaagtgattaagtgtgtatttgtaccctagatgatatgaaccagcagtcttgttttggcatcatcctcatcatgttgtattccagcttcttaagtggaaggaaaagagtgctgagaaatggctctgtataatctatggctatccgaattc

SEQ ID NO: 535 - protein, 339 aa, Homo sapien
MAAEDELQLPRLPELFETGRQLLDEVEVATEPAGSRIVQEKVFKGLDLLEKAAEMLSQLDLFSRNEDLEEIASTDLKYLLVPAFQGALTMKQVNPSKRLDHLQRAREHFINYLTQCHCYHVAEFELPKTMNNSAENHTANSSMAYPSLVAMASQRQAKIQRYKQKKELEHRLSAMKSAVESGQADDERVREYYLLHLQRWIDISLEEIESIDQEIKILRERDSSREASTSNSSRQERPPVKPFILTRNMAQAKVFGAGYPSLPTMTVSDWYEQHRKYGALPDQGIAKAAPEEFRKAAQQQEEQEEKEEEDDEQTLHRAREWDDWKDTHPRGYGNRQNMG

SEQ ID NO: 536 - DNA, 3379 bp, Homo sapien
aattccgcggaatcatcggaatccttcaccatggcatccagcccggcccagcgtcggcgaggcaatgatcctctcacctccagccctggccgaagctcccggcgtactgatgccctcacctccagccctggccgtgaccttccaccatttgaggatgagtccgaggggctcctaggcacagaggggcccctggaggaagaagaggatggagaggagctcattggagatggcatggaaagggactaccgcgccatcccagagctggacgcctatgaggccgagggactggctctggatgatgaggacgtagaggagctgacggccagtcgaagggaggcagcagacgggccatgcggcacggtgaccgggagctggccggggctgggcgcatgcgccgtgggctcctgtatgacagcgatgaggaggacgaggagcgccctgcccgcaagcgccgccagtggagccggcacggaggacggcgaggaggacgagcagatgattgagagcatcgagaacctggaggatctcaaaggccactctgtgcgcgagtgggtgagcatggcgggcccccggctggagatccaccaccgcttcaagaacttcctgcgcactcacgtcgacagccacggccacaacgtcttcaaggagcgcatcagcgacatgtgcaaagagaaccgtgagagcctggtggtgaactatgaggacttggcagccagggagcacgtgctggcctacttcctgcctgaggcaccggcggagctgctgcagatctttgatgaggctgccctggaggtggtactggccatgtaccccaagtacgaccgcatcaccaaccacatccatgtccgcatctcccacctgcctctggtggaggagctgcgctcgctgaggcagctgcatctgaaccagctgatccgcaccagtggggtggtgaccagctgcactggcgtcctgccccagctcagcatggtcaagtacaactgcaacaagtgcaatttcgtcctgggtcctttctgccagtcccagaaccaggaggtgaaaccaggctcctgtcctgagtgccagtcggccggcccctttgaggtcaacatggaggagaccatctatcagaactaccagcgtatccgaatccaggagagtccaggcaaagtggcggctcggcggctgccccgctccaaggacgccattctcctcgcagatctggtggacagctgcaacgcaggagacgagatagagctgactggcatctatcacaacaactatgatggctccctcaacactgccaatggcttccctgtctttgccactgtcatcctagccaaccacgtggccaagaaggacaacaaggttgctgtaggggaactgaccgatgaagatgtgaagatgatcactagcctctccaaggatcagcagatcggagagaagatctttgccagcattgctccttccatctatggtcatgaagacatcaagagaggccctgctctggccctgttcggaggggagcccaaaaacccaggtggcaagcacaaggtacgtggtgatatcaacgtgctcttgtgcggagaccctggcacagcgaagtcgcagtttctcaagtatattgagaaagtgtccagccgagccatcttcaccactggccagggggcgtcggctgtggccgtcacggcgtatgtccagcggcaccctgtcagcagggagtggaccttggaggctggggccctggttctggctgaccgaggagtgtgtctcattgatgaatttgacaagatgaatgaccaggacagaaccagcatccatgaggccatggagcaacagagcatctccatctcgaaggctggcatcgtcacctccctgcaggctcgctgcacggtcattgctgccgccaaccccataggagggcgctacgacccctcgctgactttctctgagaacgtggacctcacagagcccatcatctcacgctttgacatcctgtgtgtggtgagggacaccgtggacccagtccaggacgagatgctggcccgcttcgtggtgggcagccacgtcagacaccaccccagcaacaaggaggaggaggggctggccaatggcagcgctgctgagcccgccatgcccaacacgtatggcgtggagcccctgccccaggaggtcctgaagaagtacatcatctacgccaaggagagggtccacccgaagctcaaccagatggaccaggacaaggtggccaagatgtacagtgacctgaggaaagaatctatggcgacaggcagcatccccattacggtgcggcacatcgagtccatgagtcatggcggaggcccacgcgcgcatccatctgcgggactatgtgatcgaagacgacgtcaacatggccatccgcgtgatgctggagagcttcatagacacacagaagttcagcgtcatcgcagcatgcgcaagacttttgcccgctacctttcattccggcgtgacaacaatgagctgttgctcttcatactgaagcagttagtggcagagcaggtgacatatcagcgcaaccgctttggggcccagcaggacactattgaggtccctgagaaggacttggtggataaggctcgtcagatcaacatccacaacctctctgcattttatgacagtgagctcttcaggatgaacaagttcagccacgacctgaaaaggaaaatgatcctgcagcagttctgaggccctatgccatccataaggattccttgggattctggtttggggtggtcagtgccctctgtgctttatggacacaaaaccagagcacttgatgaactcggggtactagggtcagggcttatagcaggatgtctggctgcacctggcatgactgtttgtttctccaagcctgctttgtgcttctcacctttgggtgggatgccttgccagtgtgtcttacttggttgctgaacatcttgccacctccgagtgctttgtctccactcagtaccttggatcagagctgctgagttcaggatgcctgcgtgtggtttaggtgttagccttcttacatggatgtcaggagagctgctgccctcttggcgtgagttgcgtattcaggctgcttttgctcgctttggccagagagctggttgaagatgtttgtaatcgttttcagtctcctgcaggtttctgtgcccctgtggtggaagaggcacgacagtgccagcgcagcgttctgggctcctcagtcgcaggggtgggatgtgagtcatgcggattatccactcgccacagttatcagctgccattgctccctgtctgtttccccactctcttatttgtgcattcggtttggtttctgtagttttaatttttaataaagttgaataaaatataaaaaaaaaaa

SEQ ID NO: 537 - protein, 892 aa, Homo sapien
MASSPAQRRRGNDPLTSSPGRSSRRTDALTSSPGRDLPPFEDESEGLLGTEGPLEEEEDGEELIGDGMERDYRAIPELDAYEAEGLALDDEDVEELTASRREAADGPCGTVTGSWPGLGACAVGSCMTAMRRTRSALPASAASGAGTEDGEEDEQMIESIENLEDLKGHSVREWVSMAGPRLEIHHRFKNFLRTHVDSHGHNVFKERISDMCKENRESLVVNYEDLAAREHVLAYFLPEAPAELLQIFDEAALEVVLAMYPKYDRITNHIHVRISHLPLVEELRSLRQLHLNQLIRTSGVVTSCTGVLPQLSMVKYNCNKCNFVLGPFCQSQNQEVKPGSCPECQSAGPFEVNMEETIYQNYQRIRIQESPGKVAARRLPRSKDAILLADLVDSCNAGDEIELTGIYHNNYDGSLNTANGFPVFATVILANHVAKKDNKVAVGELTDEDVKMITSLSKDQQIGEKIFASIAPSIYGHEDIKRGPALALFGGEPKNPGGKHKVRGDINVLLCGDPGTAKSQFLKYIEKVSSRAIFTTGQGASAVAVTAYVQRHPVSREWTLEAGALVLADRGVCLIDEFDKMNDQDRTSIHEAMEQQSISISKAGIVTSLQARCTVIAAANPIGGRYDPSLTFSENVDLTEPIISRFDILCVVRDTVDPVQDEMLARFVVGSHVRHHPSNKEEEGLANGSAAEPAMPNTYGVEPLPQEVLKKYIIYAKERVHPKLNQMDQDKVAKMYSDLRKESMATGSIPITVRHIESMSHGGGPRAHPSAGLCDRRRRQHGHPRDAGELHRHTEVQRHRSMRKTFARYLSFRRDNNELLLFILKQLVAEQVTYQRNRFGAQQDTIEVPEKDLVDKARQINIHNLSAFYDSELFRMNKFSHDLKRKMILQQF

SEQ ID NO: 538 - DNA, 3497 bp, Homo sapien
cggacgcggccgccgccgtcgccgccatctgtcacctccactccggcatcagcagccagtcgcccgtgtcccgcctgtctcctcggcggagcctgctgcccgtcctgccacctctctgctctgttcttgtctctgccttcattcccgaatggatctggtaggagtggcatcgcctgagcccgggacggcagcggcctggggacccagcaagtgtccatgggctattcctcaaaatacaatatcttgttctttggctgatgtaatgagtgaacagctggccaaagaattgcagttagaagaagaagctgccgtttttcctgaagttgctgttgctgaaggaccatttattactggagaaaacattgatacttccagtgaccttatgctggctcagatgctacagatggaatatgacagagaatatgatgcacagcttaggcgtgaagaaaaaaaattcaatggagatagcaaagtttccatttcctttgaaaattatcgaaaagtgcatccttatgaagacagcgatagctctgaagatgaggttgactggcaggatactcgtgatgatccctacagaccagcaaaaccggttcccactcctaaaaagggctttattggaaaaggaaaagatatcaccaccaaacatgatgaagtagtatgtgggagaaagaacacagcaagaatggaaaattttgcacctgagtttcaggtaggagatggaattggaatggatttaaaactatcaaaccatgttttcaatgctttaaaacaacatgcctactcagaagaacgtcgaagtgcccgcctacatgagaaaaaggagcattctacagcagaaaaagcagttgatcctaagacacgtttacttatgtataaaatggtcaactctggaatgttggagacaatcactggctgtattagtacaggaaaggagtctgttgtctttcatgcatatggagggagcatggaggatgaaaaggaagatagtaaagttatacctacagaatgtgccatcaaggtatttaaaacaacccttaatgaatttaagaatcgtgacaaatatattaaagatgatttcaggtttaaagatcgcttcagtaaactaaatccacgtaagatcatccgcatgtgggcagaaaaagaaatgcacaatctcgcaagaatgcagagagctggaattccttgtccaacagttgtactactgaagaaacacattttagttatgtcttttattggccatgatcaagttccagcccctaaattaaaagaagtaaagctcaatagtgaagaaatgaaagaagcctactatcaaactcttcatttgatgcggcagttatatcatgaatgtacgcttgtccatgctgacctcagtgagtataacatgctgtggcatgctggaaaggtctggttgatcgatgtcagtcagtcagtagaacctacccaccctcacggcctggagttcttgttccgggactgcaggaatgtctcgcagtttttccagaaaggaggagtcaaggaagcccttagtgaacgagaactcttcaatgctgtttcaggcttaaacatcacagcagataatgaagctgattttttagctgagatagaagctttggagaaaatgaatgaagatcacgttcagaagaatggaaggaaagctgcttcatttttgaaagatgatggagacccaccactactatatgatgaatagcactaatacccactgcttcagtgttaacacagcagtgattgtcagctgccaatagcaaatgaagttatgggtgacttgaaataccaaaacctgaggagtgggcaatggtgcttctgtgcttttcccccttgtaacccatgtgccagatgtgtggaatttttagctcagcattgagagaataaaatgtcactacctctcatcttatgaacaggataatataattctttaacagctataggttatctggctgaagtagacctaattttatgtgacttgtggtgtaaaatgtcttgatgataatttttaaaacttgggtaacacttccaaatatgggaggaaaggacagatgtgtttacaagggaggattttacaacatacttgctttattcacctccctgttttgtgttgcgtctttccttgaatattttattggcccagagttagcctttctcaattatgtttccagactgtggccgtgattctaaaggaaaatgtgtgctctttagtgggtagaacaaatggaaatttggtttcagaatggctgacagaaatcgacataagtcatgtaatttttgttgatatatcatgaaaatgaacagaattctttttccatacttatatctaagaaaaggcatcataggtttctgaaagagataactatataacagctttttaactatccagtcaactttcagcttttctacatttaggtaaaatggttaggatataactcatggtgtggctaatctacatttatcaataaaatgtaaattatctgaaaggacagaatataagatttaaccatgtttgacgtattttaatttagttaatgaagcaaaattcagtttatatttcactagaactgtgtacttgattgattttcagagaaatatcacaaattagaaatattaaatctaaggatgaaaggtatatataaaacaatttgggggccaggcacgatggctcaaacctgtaatcccagcactttgggagaccaaggcgggtggatcacttgaggtcaggagttcaagaccagcctgggcaacatggcgaaaccctgtctctactaaaaatacaaaaattagccgggtgtggtggcacttctctgtaatctcagcttctcaggaggctgagacaggagaatcgcttgaacccgggaggcagaggttgcagtgagctgagatcatgccactgcactccggcctaggtgacagagggaaactccatctccaggaaaaaaaaaaaaaaacccaatttggataccaaattaatcaactaatttgagctatctggccttactcttagtagtttttagtacgtgctggacaccacttttaaaaagcaatcactgtgctagaaaagtatattggctttgttaggattaaagttcattaacttcaatgtaatcatgcctcctattactgaagtcagattggaaccactaaagatccaaactttctgtctggtaatagaaagtaaaaatctagacatcatttacatttgagaagctgtttttaacattattttaaaatgccaaatatgttctttctagaaaaatatttatttttgtttttgttggatagcttttaattacatttcagagaggtgtaattttgggtagatgctcattacatttttgaaaggtttatgattccaaaataaagatttatatgactggtgatactggctttacagaaatttcagagaactaatttttaaaatctttagcatttaaaactttttttgttttgttttctgacatattctgacaaagagcagcaaaccactg

SEQ ID NO: 539 - protein, 519 aa, Homo sapien
MDLVGVASPEPGTAAAWGPSKCPWAIPQNTISCSLADVMSEQLAKELQLEEEAAVFPEVAVAEGPFITGENIDTSSDLMLAQMLQMEYDREYDAQLRREEKKFNGDSKVSISFENYRKVHPYEDSDSSEDEVDWQDTRDDPYRPAKPVPTPKKGFIGKGKDITTKHDEVVCGRKNTARMENFAPEFQVGDGIGMDLKLSNHVFNALKQHAYSEERRSARLHEKKEHSTAEKAVDPKTRLLMYKMVNSGMLETITGCISTGKESVVFHAYGGSMEDEKEDSKVIPTECAIKVFKTTLNEFKNRDKYIKDDFRFKDRFSKLNPRKIIRMWAEKEMHNLARMQRAGIPCPTVVLLKKHILVMSFIGHDQVPAPKLKEVKLNSEEMKEAYYQTLHLMRQLYHECTLVHADLSEYNMLWHAGKVWLIDVSQSVEPTHPHGLEFLFRDCRNVSQFFQKGGVKEALSERELFNAVSGLNITADNEADFLAEIEALEKMNEDHVQKNGRKAASFLKDDGDPPLLYDE

SEQ ID NO: 540 - DNA, 1221 bp, Homo sapien
ccgaacgcccgcagcagggtcagaagggaggtggccggtctccgtcgtgacctctgacggtttctgagcgttggcctttggcacgcgctacacccttttgctttggttctgccatgccgatgtaccaggtaaagccctatcacgggggcggcgcgcctctccgtgtggagcttcccacctgcatgtaccggctccccaacgtgcacggcaggagctacggcccagcgccgggcgctggccacgtgcaggaagagtctaacctgtctctgcaagctcttgagtcccgccaagatgatattttaaaacgtctgtatgagttgaaagctgcagttgatggcctctccaagatgattcaaacaccagatgcagacttggatgtaaccaacataatccaagcggatgagcccacgactttaaccaccaatgcgctggacttgaattcagtgcttgggaaggattacggggcgctgaaagacatcgtgatcaacgcaaacccggcctcccctcccctctccctgcttgtgctgcacaggctgctctgtgagcacttcagggtcctgtccacggtgcacacgcactcctcggtcaagagcgtgcctgaaaaccttctcaagtgctttggagaacagaataaaaaacagccccgccaagactatcagctgggattcactttaatttggaagaatgtgccgaagacgcagatgaaattcagcatccagacgatgtgccccatcgaaggcgaagggaacattgcacgtttcttgttctctctgtttggccagaagcataatgctgtcaacgcaacccttatagatagctgggtagatattgcgatttttcagttaaaagagggaagcagtaaagaaaaagccgctgttttccgctccatgaactctgctcttgggaagagcccttggctcgctgggaatgaactcaccgtagcagacgtggtgctgtggtctgtactccagcagatcggaggctgcagtgtgacagtgccagccaatgtgcagaggtggatgaggtcttgtgaaaacctggctccttttaacacggccctcaagctccttaagtgaattgccgtaactgattttaaagggtttagattttaagaatggtgctctttcatgcctattatcagtaaggggacttgtattagagtcagagtctttttatttaggccagttgtcaagtgtcaataaaagcgcatcatgtaattta

SEQ ID NO: 541 - protein, 320 aa, Homo sapien
MPMYQVKPYHGGGAPLRVELPTCMYRLPNVHGRSYGPAPGAGHVQEESNLSLQALESRQDDILKRLYELKAAVDGLSKMIQTPDADLDVTNIIQADEPTTLTTNALDLNSVLGKDYGALKDIVINANPASPPLSLLVLHRLLCEHFRVLSTVHTHSSVKSVPENLLKCFGEQNKKQPRQDYQLGFTLIWKNVPKTQMKFSIQTMCPIEGEGNIARFLFSLFGQKHNAVNATLIDSWVDIAIFQLKEGSSKEKAAVFRSMNSALGKSPWLAGNELTVADVVLWSVLQQIGGCSVTVPANVQRWMRSCENLAPFNTALKLLK

SEQ ID NO: 542 - DNA, 3635 bp, Homo sapien
gtttcttcagactccagatttccctgtcaaccacgaggagtccagagaggaaacgcggagcggagacaacagtacctgacgcctctttcagcccgggatcgccccagcagggatgggcgacaagatctggctgcccttccccgtgctccttctggccgctctgcctccggtgctgctgcctggggcggccggcttcacaccttccctcgatagcgacttcacctttacccttcccgccggccagaaggagtgcttctaccagcccatgcccctgaaggcctcgctggagatcgagtaccaagttttagatggagcaggattagatattgatttccatcttgcctctccagaaggcaaaaccttagtttttgaacaaagaaaatcagatggagttcacactgtagagactgaagttggtgattacatgttctgctttgacaatacattcagcaccatttctgagaaggtgattttctttgaattaatcctggataatatgggagaacaggcacaagaacaagaagattggaagaaatatattactggcacagatatattggatatgaaactggaagacatcctggaatccatcaacagcatcaagtccagactaagcaaaagtgggcacatacaaattctgcttagagcatttgaagctcgtgatcgaaacatacaagaaagcaactttgatagagtcaatttctggtctatggttaatttagtggtcatggtggtggtgtcagccattcaagtttatatgctgaagagtctgtttgaagataagaggaaaagtagaacttaaaactccaaactagagtacgtaacattgaaaaatgaggcataaaaatgcaataaactgttacagtcaagaccattaatggtcttctccaaaatattttgagatataaaagtaggaaacaggtataattttaatgtgaaaattaagtcttcactttctgtgcaagtaatcctgctgatccagttgtacttaagtgtgtaacaggaatattttgcagaatataggtttaactgaatgaagccatattaataactgcattttcctaactttgaaaaattttgcaaatgtcttaggtgatttaaataaatgagtattgggcctaattgcaacaccagtctgtttttaacaggttctattacccagaacttttttgtaaatgcggcagttacaaattaactgtggaagttttcagttttaagttataaatcacctgagaattacctaatgatggattgaataaatctttagactacaaaagcccaacttttctctatttacatatgcatctctcctataatgtaaatagaataatagctttgaaatacaattaggtttttgagatttttataaccaaatacatttcagtgtaacatattagcagaaagcattagtctttgtactttgcttacattcccaaaagctgacattttcacgattcttaaaaacacaaagttacacttactaaaattaggacatgttttctctttgaaatgaagaatatagtttaaaagcttcctcctccatagggacacattttctctaacccttaactaaagtgtaggattttaaaattaaatgtgaggtaaaataagtttatttttaatagtatctgtcaagttaatatctgtcaacagttaataatcatgttatgttaattttaacatgattgctgacttggataattcattattaccagcagttatgaaggaaatattgctaaaatgatctgggcctaccataaataaatatctccttttctgagctctaagaattatcagaaacaggaaagaatttagaaaaacttgagaaaacctaatccaaaataaaattcacttaagtagaactataaataaatatctagaatctgactggctcatcatgacatcctactcataacataaatcaaaggagatgattaatttccagttagctggaagaaactttggctgtaggtttttattttctacaagaattctggtttgaattatttttgtaagcaggtacattttataaaatgtaagccctactgtaaggtttagcactgggtgtacatatttattaaaaatttttattataacaacttttattaaaatggcctttctgaacactttatttattgatgttgaagtaaggattagaaacatagactcccaagttttaaacacctaaatgtgaataacccatatatacaacaaagtttctgccatctagctttttgaagtctatgggggtcttactcaagtactagtaatttaacttcatcatgaatgaactataatttttaagttatgcccatttataacgttgtttatgactacattgtgagttagaaacaaacttaaaatttggggtatagaacccctcaacaggttagtaatgctggaattcttgatgagcaataatgataaccagagagtgatttcatttacactcatagtagtataaaaagagatacatttccctcttaggcccctgggagaagagcagcttagatttccctactggcaaggtttttaaaaatgaggtaaatgccgtatatgatcaattaccttaattggccaagaaaatgcttcaggtgtctaggggtatcctctgcaacacttgcagaacaaaggtcaataagatccttgcctatgaatacccctcccttttgcgctgttaaatttgcaatgagaagcaaatttacagtaccataactaataaagcagggtacagatataaactactgcatcttttctataaaactgtgattaagaattctacctctcctgtatggctgttactgtactgtactctctgactccttacctaacaatgaatttgttacataatcttctacatgtatgatttgtgccactgatcttaaacctatgattcagtaacttcttaccatataaaaacgataattgctttatttggaaaagaatttaggaatactaaggacaattatttttatagacaaagtaaaaagacagatatttaagaggcataaccaaaaaagcaaaacttgtaaacagagtaaaaatctttaatatttctaaagacatactgtttatctgcttcatatgctttttttaatttcactattccatttctaaattaaagttatgctaaattgagtaagctgtttatcacttaacagctcattttgtctttttcaatatacaaattttaaaaatactacaatatttaactaaggcccaaccgatttccataatgtagcagttaccgtgttcacctcacactaaggcctagagtttgctctgatatgcatttggatgattaatgttatgctgttctttcatgtgaatgtcaagacatggagggtgtttgtaattttatggtaaaattaatccttcttacacataatggtgtcttaaaattgacaaaaaatgagcacttacaattgtatgtctcctcaaatgaaaattctttatctgaaattttaaaagacattgattccgcatgtaaggatttttcatctgaagtacaataatgcacaatcagtgttgctcaaactgctttatacttataaacagccatcttaaataagcaacgtattgtgagtactgatatgtatataataaaaattatcaaagaaaaaaaaaaaaaaaaa

SEQ ID NO: 543 - protein, 229 aa, Homo sapien
MGDKIWLPFPVLLLAALPPVLLPGAAGFTPSLDSDFTFTLPAGQKECFYQPMPLKASLEIEYQVLDGAGLDIDFHLASPEGKTLVFEQRKSDGVHTVETEVGDYMFCFDNTFSTISEKVIFFELILDNMGEQAQEQEDWKKYITGTDILDMKLEDILESINSIKSRLSKSGHIQILLRAFEARDRNIQESNFDRVNFWSMVNLVVMVVVSAIQVYMLKSLFEDKRKSRT

SEQ ID NO: 544 - DNA, 3317 bp, Homo sapien
ccccagcgaggctccgggagcccttgcctgcgggggtccggggactcgagccggcctccgccccccggacgcacagccagcgtggtccccgcgtgcaacgcgagcgccggggagtggctcctgctttgcccctcgtgggggccgagccaagaccagtctgcaaactccatcccgccggctggaagaagtcgcggagccggcaccaaacccgcagcgtcttcccgcgcggatcccgggacttaaaaagccggggccaccccggcccaggacgggatgcgggtcggtccggtgcgctctgccatgagcggcgcctcgcagccccgcggcccggccctgctcttcccagccacccgaggcgtcccggccaaacgcctgctggacgccgacgacgcggcggctgtggcggccaagtgcccgcgcctctccgagtgctccagccccccggactacctcagcccccccggctcgccctgcagcccgcagcccccgcctgccgctccgggggccggcggaggctccgggagcgcgccggggcccagccgcatcgccgactacctgctgctgcccctagccgagcgcgagcatgtgtcccgggcgctgtgcatccacactggacgcgagctgcgctgcaaggtgtttcccattaaacactaccaggacaaaatcaggccttacatccagctgccatcgcacagcaacattactggcattgtggaagtgatccttggggaaaccaaggcctatgtcttctttgagaaggactttggggacatgcactcctatgtgcgaagccggaagaggctgcgggaagaggaagccgcccggctcttcaagcagattgtctccgccgtcgcccactgccaccagtcagccatcgtgctgggggacctgaagcttaggaagttcgtcttctccacggaggagagaacccagcttagactagaaagtctagaagacacacacataatgaagggggaagatgatgctttgtcagacaaacatggctgcccagcctacgtgagccctgagatcctcaacaccactgggacctactccggaaaggctgcggacgtttggagcctgggggtgatgctctacacccttctggttggacgataccccttccatgactcagaccccagtgcccttttctccaaaattcggcgtggacagttctgcattcctgagcacatttcccccaaagccaggtgcctcattcgcagcctcttgagacgggagccctccgagagactcactgcccccgagatcctactgcacccctggtttgagtccgtcttggaacccgggtacatcgactcagaaataggaacttcagaccagattgttccagagtaccaggaggacagtgacattagttccttcttctgctaatccccaaaacctcagaaacctcataattcttaacacctggcatttccatttctaaagatggacaggccctttggcatggtaccaaccagataatgactgcatcaggatgaaagctgctgaactcggcatggcgcctcctcttctctgttgggatgagtgactttattgatttgagcagcatatgctgtgattggctgccctgcaaatttgtttcccttaaggaaccctcaccaactatctctgctggatttgggagttccgcatcttttgtggagggcagagtatggacatcttacacccggtggtcaagtgtgtaataaacttgagcattcgaatgggagaaaaagcaaatcgcacaatgacatattttgagtaataaccgtatttttcacagggtgacaaattgggccaataaatctgccatctttgaactcatctttggtggctagactgctacggcagcttctctgatgggaaagttccttttttggcttaacactcaccctttcttcacactcacatttaccaatgactctgctccgtttttggagcagactgttttaagttgctcaggagcctgatggaaccatgaaccgagactcttctctgtttcctgccaagacctcatctgcactaatgccttctccctgaccttgacacttccccctttagctataaaagcacttaccagccgaacgtggaacagtatcacaaaagattccatctcccaacgatttcagaactctgagctcagagagactccagattttaaaaaataatttgagtgcttggaaactattagctttttaagttccttccaaatatgttagtacctaccctttactttttccccaagaccatctcagggtggagcattctgtctaagagaagaaagataaggaggctcccacccacctctcccaagagcagacattaaacatctttgtgctttgaagagagtgaattttggatagtcttgtgattctcagactaacttccagaattatactttaacccctcccagatatggtccgcctttggcattgtgtgtacatctgcagttttgcatggtgggttgttaatatttcaaatgtgtggtttatgaatacgtctgtataatcggcttctggagtgaaacagcaaaccccaaatcttcaaagttggaaggaactttaaaaatcatccggtccaatctctttcctctttctgccacctcccaaggcagaaatcccctcttcagcttcttttgtaggtgggaatccagcctctgttagatatgtccagagatggaaactcactcccctacaaaagatggagcttaatggagaaattgcaactttcattaaaaaacaaattcagatgaaatatcagtaactgtcttggacagtgctgaaatcaggtggttaaacgggtaaacaaaatatactgtattttgagaaatggcacaaaaacaggcagtcatctttaagggctatgcctaggcaaactactaacatgcattgtgagaatgccgtgtatacctcacgtactgtgtactttgtacatatattttaccttttatacctatgttcgattttgttttgttttgttctggctttgaggcttgttttgttgtctgtgtctgtctgaataacctgcgtgtctaaaaccacgtgaaatgtgaatgattattggcaatattaccttgacagaatcatgggactttgagaagagggaggacagaggcctctgtcgcactaacgctctcgtggttgctcgactgttgtatctgtgatacattatccgactaaggactctgggctggcagggccttctgccgggaaagctagaaacactaggttcttcctgtacatacgtgtatatatgtgaacagtgagatggccgtttctgacttgtagagaaattttaataaacctggtttcgta

SEQ ID NO: 545 - protein, 372 aa, Homo sapien
MRVGPVRSAMSGASQPRGPALLFPATRGVPAKRLLDADDAAAVAAKCPRLSECSSPPDYLSPPGSPCSPQPPPAAPGAGGGSGSAPGPSRIADYLLLPLAEREHVSRALCIHTGRELRCKVFPIKHYQDKIRPYIQLPSHSNITGIVEVILGETKAYVFFEKDFGDMHSYVRSRKRLREEEAARLFKQIVSAVAHCHQSAIVLGDLKLRKFVFSTEERTQLRLESLEDTHIMKGEDDALSDKHGCPAYVSPEILNTTGTYSGKAADVWSLGVMLYTLLVGRYPFHDSDPSALFSKIRRGQFCIPEHISPKARCLIRSLLRREPSERLTAPEILLHPWFESVLEPGYIDSEIGTSDQIVPEYQEDSDISSFFC

SEQ ID NO: 546 - DNA, 1474 bp, Homo sapien
agccctcccagtttccgcgcgcctctttggcagctggtcacatggtgagggtgggggtgagggggcctctctagcttgcggcctgtgtctatggtcgggccctctgcgtccagctgctccggaccgagctcgggtgtatggggccgtaggaaccggctccggggccccgataacgggccgcccccacagcaccccgggctggcgtgagggtctcccttgatctgagaatggctacctctcgatatgagccagtggctgaaattggtgtcggtgcctatgggacagtgtacaaggcccgtgatccccacagtggccactttgtggccctcaagagtgtgagagtccccaatggaggaggaggtggaggaggccttcccatcagcacagttcgtgaggtggctttactgaggcgactggaggcttttgagcatcccaatgttgtccggctgatggacgtctgtgccacatcccgaactgaccgggagatcaaggtaaccctggtgtttgagcatgtagaccaggacctaaggacatatctggacaaggcacccccaccaggcttgccagccgaaacgatcaaggatctgatgcgccagtttctaagaggcctagatttccttcatgccaattgcatcgttcaccgagatctgaagccagagaacattctggtgacaagtggtggaacagtcaagctggctgactttggcctggccagaatctacagctaccagatggcacttacacccgtggttgttacactctggtaccgagctcccgaagttcttctgcagtccacatatgcaacacctgtggacatgtggagtgttggctgtatctttgcagagatgtttcgtcgaaagcctctcttctgtggaaactctgaagccgaccagttgggcaaaatctttgacctgattgggctgcctccagaggatgactggcctcgagatgtatccctgccccgtggagcctttccccccagagggccccgcccagtgcagtcggtggtacctgagatggaggagtcgggagcacagctgctgctggaaatgctgacttttaacccacacaagcgaatctctgcctttcgagctctgcagcactcttatctacataaggatgaaggtaatccggagtgagcaatggagtggctgccatggaaggaagaaaagctgccatttcccttctggacactgagagggcaatctttgcctttatctctgaggctatggagggtcctcctccatctttctacagagattactttgctgccttaatgacattcccctcccacctctccttttgaggcttctccttctccttcccatttctctacactaaggggtatgttccctcttgtccctttccctacctttatatttggggtccttttttatacaggaaaaacaaaacaaagaaataatggtcttttttttttttttaaaaaaaaaaaaaaaaaaaaaaaaaaaaaaaa

SEQ ID NO: 547 - protein, 303 aa, Homo sapien
MATSRYEPVAEIGVGAYGTVYKARDPHSGHFVALKSVRVPNGGGGGGGLPISTVREVALLRRLEAFEHPNVVRLMDVCATSRTDREIKVTLVFEHVDQDLRTYLDKAPPPGLPAETIKDLMRQFLRGLDFLHANCIVHRDLKPENILVTSGGTVKLADFGLARIYSYQMALTPVVVTLWYRAPEVLLQSTYATPVDMWSVGCIFAEMFRRKPLFCGNSEADQLGKIFDLIGLPPEDDWPRDVSLPRGAFPPRGPRPVQSVVPEMEESGAQLLLEMLTFNPHKRISAFRALQHSYLHKDEGNPE

SEQ ID NO: 548 - DNA, 1238 bp, Homo sapien
gaattcgaggatccgggtaccatgggaggaaaacttcttcctggcctgggctccgtgccgctctgtttgccaaccgtccagtcccgcctaccagtgccgggcgctccccacccctcccccggctcccccggtgtccgccatggccaaagcctacgaccacctcttcaagttgctgctgatcggggactcgggggtgggcaagacttgtctgatcattcgctttgcagaggacaacttcaacaacacttacatctccaccatcggaattgatttcaagatccgcactgtggatatagaggggaagaagatcaaactacaagtctgggacacggctggccaagagcggttcaagacaataactactgcctactaccgtggagccatgggcattatcctagtatacgacatcacggatgagaaatctttcgagaatattcagaactggatgaaaagcatcaaggagaatgcctcggctggggtggagcgcctcttgctggggaacaaatgtgacatggaggccaagaggaaggtgcagaaggagcaggccgataagttggctcgagagcatggaatccgatttttcgaaactagtgctaaatccagtatgaatgtggatgaggcttttagttccctggcccgggacatcttgctcaagtcaggaggccggagatcaggaaacggcaacaagcctcccagtactgacctgaaaacttgtgacaagaagaacaccaacaagtgctccctgggctgaggaccctttcttgcctccccaccccggaagctgaacctgagggagacaacggcagagggagtgagcaggggagaaatagcagaggggcttggagggtcacataggtagatggtaaagagaatgaggagaaaaaggagaaaagggaaaagcagaaaggaaaaaaaggaagagagaggaagggagaagggagaggaatgaattgaggaagtgaaagaaggcaaggaggtaggaagagagggaggaggaaaggaaggagagagatgcctcaggcttcagaccttacctgggttttcagggcaaacataaatgtaaatacactgatttattctgttactagatcaggttttagggtcctgcaaaaggctagctcggcactacactagggaatttgctcctgttctgtcacttgtcatggtctttcttggtattaaaggccaccatttgcacaaaaaaaaaaaaaaaccatggtacccggatcctcgaattc

SEQ ID NO: 549 - protein, 203 aa, Homo sapien
MAKAYDHLFKLLLIGDSGVGKTCLIIRFAEDNFNNTYISTIGIDFKIRTVDIEGKKIKLQVWDTAGQERFKTITTAYYRGAMGIILVYDITDEKSFENIQNWMKSIKENASAGVERLLLGNKCDMEAKRKVQKEQADKLAREHGIRFFETSAKSSMNVDEAFSSLARDILLKSGGRRSGNGNKPPSTDLKTCDKKNTNKCSLG

SEQ ID NO: 550 - DNA, 1700 bp, Homo sapien
ggcggcggcagcgggttcggttgcgcgtggcgcacggggtgggagcggagcccaggccgggagcaggcgccgccgccagcgaccatggggaacgtgttggctgccagctcgccgcccgcagggccgccaccgccgcctgcgccggccctcgtggggctgccgccacctccgccctcgccgccgggcttcacgctgccgccgctgggaggcagcctgggcgccggcaccagtacgagtcgaagttcggaacggacccccggggctgcaaccgccagcgcctcaggggccgccgaggatggggcctgcggctgcctgcccaacccgggcacattcgaggagtgccaccggaagtgcaaggagctgtttcccattcagatggagggtgtcaagctcacagtcaacaaagggttgagtaaccattttcaggtcaaccacacagtagccctcagcacaatcggggagtccaactaccacttcggggtcacatatgtggggacaaagcagctgagtcccacagaggcgttccctgtactggtgggtgacatggacaacagtggcagtctcaacgctcaggtcattcaccagctgggccccggtctcaggtccaagatggccatccagacccagcagtcgaagtttgtgaactggcaggtggacggggagtatcggggctctgacttcacagcagccgtcaccctggggaacccagacgtcctcgtgggttcaggaatcctcgtagcccactacctccagagcatcacgccttgcctggccctgggtggagagctggtctaccaccggcggcctggagaggagggcactgtcatgtctctagctgggaaatacacattgaacaactggttggcaacggtaacgttgggccaggcgggcatgcacgcaacatactaccacaaagccagtgaccagctgcaggtgggtgtggagtttgaggccagcacaaggatgcaggacaccagcgtctccttcgggtaccagctggacctgcccaaggccaacctcctcttcaaaggctctgtggatagcaactggatcgtgggtgccacgctggagaagaagctcccacccctgcccctgacactggcccttggggccttcctgaatcaccgcaagaacaagtttcagtgtggctttggcctcaccatcggctgagccctcctggcccccgccttccacgcccttccgattccacctccacctccacctccccctgccacagaggggagacctgagcccccctcccttccctccccccttgggggtcggggggggacattggaaaggagggaccccgccaccccagcagctgaggaggggattctggaactgaatggcgcttcgggattctgagtagcaggggcagcatgcccagtgggcctggggtcccgggagggattccggaattgaggggcacgcaggattctgagcaccaggggcagaggcggccagacaacctcagggaggagtgtcctggcgtccccatcctccaaagggcctgggcccgccccgagggggcagcgagaggagcttccccatccccggtcagtccaccctgccccgtccactttcccatctcctcggtataaatcatgtttataagttatggaagaaccgggacattttacagaaaaaaaacaaaaaacaacaaaaaatatacgtgggaaaaaaaaaaaaaaaaaaaa

SEQ ID NO: 551 - protein, 361 aa, Homo sapien
MGNVLAASSPPAGPPPPPAPALVGLPPPPPSPPGFTLPPLGGSLGAGTSTSRSSERTPGAATASASGAAEDGACGCLPNPGTFEECHRKCKELFPIQMEGVKLTVNKGLSNHFQVNHTVALSTIGESNYHFGVTYVGTKQLSPTEAFPVLVGDMDNSGSLNAQVIHQLGPGLRSKMAIQTQQSKFVNWQVDGEYRGSDFTAAVTLGNPDVLVGSGILVAHYLQSITPCLALGGELVYHRRPGEEGTVMSLAGKYTLNNWLATVTLGQAGMHATYYHKASDQLQVGVEFEASTRMQDTSVSFGYQLDLPKANLLFKGSVDSNWIVGATLEKKLPPLPLTLALGAFLNHRKNKFQCGFGLTIG

SEQ ID NO: 552 - DNA, 2881 bp, Homo sapien
acagaagtgctagaagccagtgctcgtgaactaaggagaaaaagaacagacaagggaacagcctggacatggcatcagagatccacatgacaggcccaatgtgcctcattgagaacactaatgggcgactgatggcgaatccagaagctctgaagatcctttctgccattacacagcctatggtggtggtggcaattgtgggcctctaccgcacaggcaaatcctacctgatgaacaagctggctggaaagaaaaagggcttctctctgggctccacggtgcagtctcacactaaaggaatctggatgtggtgtgtgccccaccccaagaagccaggccacatcctagttctgctggacaccgagggtctgggagatgtagagaagggtgacaaccagaatgactcctggatcttcgccctggccgtcctcctgagcagcaccttcgtgtacaatagcataggaaccatcaaccagcaggctatggaccaactgtactatgtgacagagctgacacatagaatccgatcaaaatcctcacctgatgagaatgagaatgaggttgaggattcagctgactttgtgagcttcttcccagactttgtgtggacactgagagatttctccctggacttggaagcagatggacaacccctcacaccagatgagtacctgacatactccctgaagctgaagaaaggtaccagtcaaaaagatgaaacttttaacctgcccagactctgtatccggaaattcttcccaaagaaaaaatgctttgtctttgatcggcccgttcaccgcaggaagcttgcccagctcgagaaactacaagatgaagagctggaccccgaatttgtgcaacaagtagcagacttctgttcctacatctttagtaattccaaaactaaaactctttcaggaggcatccaggtcaacgggcctcgtctagagagcctggtgctgacctacgtcaatgccatcagcagtggggatctgccgtgcatggagaacgcagtcctggccttggcccagatagagaactcagctgcagtgcaaaaggctattgcccactatgaacagcagatgggccagaaggtgcagctgcccacagaaagcctccaggagctgctggacctgcacagggacagtgagagagaggccattgaagtcttcatcaggagttccttcaaagatgtggaccatctatttcaaaaggagttagcggcccagctagaaaaaaagcgggatgacttttgtaaacagaatcaggaagcatcatcagatcgttgctcaggtttacttcaggtcattttcagtcctctagaagaagaagtgaaggcgggaatttattcgaaaccagggggctatcgtctctttgttcagaagctacaagacctgaagaaaaagtactatgaggaaccgaggaaggggatacaggctgaagagattctgcagacatacttgaaatccaaggagtctatgactgatgcaattctccagacagaccagactctcacagaaaaagaaaaggagattgaagtggaacgtgtgaaagctgagtctgcacaggcttcagcaaaaatgttgcaggaaatgcaaagaaagaatgagcagatgatggaacagaaggagaggagttatcaggaacacttgaaacaactgactgagaagatggagaacgacagggtccagttgctgaaagagcaagagaggaccctcgctcttaaacttcaggaacaggagcaactactaaaagagggatttcaaaaagaaagcagaataatgaaaaatgagatacaggatctccagacgaaaatgagacgacgaaaggcatgtaccataagctaaagaccagagccttcctgtcacccctaaccaaggcataattgaaacaattttagaatttggaacaagcgtcactacatttgataataattagatcttgcatcataacaccaaaagtttataaaggcatgtggtacaatgatcaaaatcatgttttttcttaaaaaaaaaaaaaagactgtaaattgtgcaacaaagatgcatttacctctgtatcaactcaggaaatctcataagctggtaccactcaggagaagtttattcttccagatgaccagcagtagacaaatggatactgagcagagtcttaggtaaaagtcttgggaaatatttgggcattggtctggccaagtctacaatgtcccaatatcaaggacaaccaccctagcttcttagtgaagacaatgtacagttatccattagatcaagactacacggtctatgagcaataatgtgatttctggacattgcccatgtataatcctcactgatgatttcaagctaaagcaaaccaccttatacagagatctagaatctctttatgttctccagaggaaggtggaagaaaccatgggcaggagtaggaattgagtgataaacaattgggctaatgaagaaaacttctcttattgttcagttcatccagattataacttcaatgggacactttagaccattagacaattgacactggattaaacaaattcacataatgccaaatacacaatgtatttatagcaacgtataatttgcaaagatggactttaaaagatgctgtgtaactaaactgaaataattcaattacttattatttagaatgttaaagcttatgatagtcttttctaattcttaacactcatacttgaaatctttccgagtttccccagaagagaatatgggattttttttgacatttttgacccatttaataatgctcttgtgtttacctagtatatgtagactttgtcttatgtgtcaaaagtcctaggaaagtggttgatgtttcttatagcaattaaaaattatttttgaactga

SEQ ID NO: 553 - protein, 592 aa, Homo sapien
MASEIHMTGPMCLIENTNGRLMANPEALKILSAITQPMVVVAIVGLYRTGKSYLMNKLAGKKKGFSLGSTVQSHTKGIWMWCVPHPKKPGHILVLLDTEGLGDVEKGDNQNDSWIFALAVLLSSTFVYNSIGTINQQAMDQLYYVTELTHRIRSKSSPDENENEVEDSADFVSFFPDFVWTLRDFSLDLEADGQPLTPDEYLTYSLKLKKGTSQKDETFNLPRLCIRKFFPKKKCFVFDRPVHRRKLAQLEKLQDEELDPEFVQQVADFCSYIFSNSKTKTLSGGIQVNGPRLESLVLTYVNAISSGDLPCMENAVLALAQIENSAAVQKAIAHYEQQMGQKVQLPTESLQELLDLHRDSEREAIEVFIRSSFKDVDHLFQKELAAQLEKKRDDFCKQNQEASSDRCSGLLQVIFSPLEEEVKAGIYSKPGGYRLFVQKLQDLKKKYYEEPRKGIQAEEILQTYLKSKESMTDAILQTDQTLTEKEKEIEVERVKAESAQASAKMLQEMQRKNEQMMEQKERSYQEHLKQLTEKMENDRVQLLKEQERTLALKLQEQEQLLKEGFQKESRIMKNEIQDLQTKMRRRKACTIS

SEQ ID NO: 554 - DNA, 2881 bp, Homo sapien; identical to SEQ ID NO: 552

SEQ ID NO: 555 - protein, 592 aa, Homo sapien; identical to SEQ ID NO: 553

SEQ ID NO: 556 - DNA, 2281 bp, Homo sapien
agctgaggtgtgagcagctgccgaagtcagttccttgtggagccggagctgggcgcggattcgccgaggcaccgaggcactcagaggaggtgagagagcggcggcagacaacaggggaccccgggccggcggcccagagccgagccaagcgtgcccgcgtgtgtccctgcgtgtccgcgaggatgcgtgttcgcgggtgtgtgctgcgttcacaggtgtttctgcggcaggcgccatgtcagaaccggctggggatgtccgtcagaacccatgcggcagcaaggcctgccgccgcctcttcggcccagtggacagcgagcagctgagccgcgactgtgatgcgctaatggcgggctgcatccaggaggcccgtgagcgatggaacttcgactttgtcaccgagacaccactggagggtgacttcgcctgggagcgtgtgcggggccttggcctgcccaagctctaccttcccacggggccccggcgaggccgggatgagttgggaggaggcaggcggcctggcacctcacctgctctgctgcaggggacagcagaggaagaccatgtggacctgtcactgtcttgtacccttgtgcctcgctcaggggagcaggctgaagggtccccaggtggacctggagactctcagggtcgaaaacggcggcagaccagcatgacagatttctaccactccaaacgccggctgatcttctccaagaggaagccctaatccgcccacaggaagcctgcagtcctggaagcgcgagggcctcaaaggcccgctctacatcttctgccttagtctcagtttgtgtgtcttaattattatttgtgttttaatttaaacacctcctcatgtacataccctggccgccccctgccccccagcctctggcattagaattatttaaacaaaaactaggcggttgaatgagaggttcctaagagtgctgggcatttttattttatgaaatactatttaaagcctcctcatcccgtgttctccttttcctctctcccggaggttgggtgggccggcttcatgccagctacttcctcctccccacttgtccgctgggtggtaccctctggaggggtgtggctccttcccatcgctgtcacaggcggttatgaaattcaccccctttcctggacactcagacctgaattctttttcatttgagaagtaaacagatggcactttgaaggggcctcaccgagtgggggcatcatcaaaaactttggagtcccctcacctcctctaaggttgggcagggtgaccctgaagtgagcacagcctagggctgagctggggacctggtaccctcctggctcttgatacccccctctgtcttgtgaaggcagggggaaggtggggtcctggagcagaccaccccgcctgccctcatggcccctctgacctgcactggggagcccgtctcagtgttgagccttttccctctttggctcccctgtaccttttgaggagccccagctacccttcttctccagctgggctctgcaattcccctctgctgctgtccctcccccttgtcctttcccttcagtaccctctcagctccaggtggctctgaggtgcctgtcccacccccacccccagctcaatggactggaaggggaagggacacacaagaagaagggcaccctagttctacctcaggcagctcaagcagcgaccgccccctcctctagctgtgggggtgagggtcccatgtggtggcacaggcccccttgagtggggttatctctgtgttaggggtatatgatgggggagtagatctttctaggagggagacactggcccctcaaatcgtccagcgaccttcctcatccaccccatccctccccagttcattgcactttgattagcagcggaacaaggagtcagacattttaagatggtggcagtagaggctatggacagggcatgccacgtgggctcatatggggctgggagtagttgtctttcctggcactaacgttgagcccctggaggcactgaagtgcttagtgtacttggagtattggggtctgaccccaaacaccttccagctcctgtaacatactggcctggactgttttctctcggctccccatgtgtcctggttcccgtttctccacctagactgtaaacctctcgagggcagggaccacaccctgtactgttctgtgtctttcacagctcctcccacaatgctgaatatacagcaggtgctcaataaatgattcttagtgactttaaaaaaaaaaaaaaaaaaaa

SEQ ID NO: 557 - protein, 164 aa, Homo sapien
MSEPAGDVRQNPCGSKACRRLFGPVDSEQLSRDCDALMAGCIQEARERWNFDFVTETPLEGDFAWERVRGLGLPKLYLPTGPRRGRDELGGGRRPGTSPALLQGTAEEDHVDLSLSCTLVPRSGEQAEGSPGGPGDSQGRKRRQTSMTDFYHSKRRLIFSKRKP

SEQ ID NO: 558 - DNA, 837 bp, Homo sapien
gaattccgcggcggcgcctcaatgcctaaaggaggaagaaagggaggccacaaaggccgggcgaggcagtatacaagccctgaggagatcgacgcgcagctgcaggctgagaagcagaaggccagggaagaagaggagcaaaaagaaggtggagatggggctgcaggtgaccccaaaaaggagaagaaatctctagactcagatgagagtgaggatgaagaagatgactaccagcaaaagcgcaaaggcgttgaagggctcatcgacatcgagaaccccaaccgggtggcacagacaaccaaaaaggtcacacaactggatctggacgggccaaaggagctttcgaggagagaacgagaagagattgagaagcagaaggcaaaagagcgttacatgaaaatgcacttggccgggaagacagagcaagccaaggctgacctggcccggctggccatcatccggaaacagcgggaggaggctgcccggaagaaggaagaggaaaggaaagcaaaagacgatgccacattgtcaggaaaacgaatgcagtcactctccctgaataagtaactgcgacccgtgggaggagatgccggggacctgggccgcgctgccaggacctctgctgtgtctcgcccaccctgtgccctggcgccgctgcaacagcccctcatggccaggagccccccatgcctgggcctcctcttcatcttggcacagaaattgtttgggggatgggggggggactgggggaggggtagctgctatctttgagacagaaagatgcaggacagcatttcatatgtaaccatttgaatgtttttgctgtttttagaattc

SEQ ID NO: 559 - protein, 181 aa, Homo sapien
MPKGGRKGGHKGRARQYTSPEEIDAQLQAEKQKAREEEEQKEGGDGAAGDPKKEKKSLDSDESEDEEDDYQQKRKGVEGLIDIENPNRVAQTTKKVTQLDLDGPKELSRREREEIEKQKAKERYMKMHLAGKTEQAKADLARLAIIRKQREEAARKKEEERKAKDDATLSGKRMQSLSLNK

SEQ ID NO: 560 - DNA, 1504 bp, Homo sapien
ccacgctcgtgccgccccccccgcgctcccagttgacgctctgggccgccacctccgcggaccctgagcgcaagagccaagccgccagcgctgcgatgtgggccacgctgccgctgctctgcgccggggcctggctcctgggagtccccgtctgcggtgccgccgaactgtgcgtgaactccttagagaagtttcacttcaagtcatggatgtctaagcaccgtaagacctacagtacggaggagtaccaccacaggctgcagacgtttgccagcaactggaggaagataaacgcccacaacaatgggaaccacacatttaaaatggcactgaaccaattttcagacatgagctttgctgaaataaaacacaagtatctctggtcagagcctcagaattgctcagccaccaaaagtaactaccttcgaggtactggtccctacccaccttccgtggactggcggaaaaaaggaaattttgtctcacctgtgaaaaatcagggtgcctgcggcagttgctggactttctccaccactggggccctggagtctgcgatcgccatcgcaaccggaaagatgctgtccttggcggaacagcagctggtggactgcgcccaggacttcaataatcacggctgccaagggggtctccccagccaggctttcgagtatatcctgtacaacaaggggatcatgggtgaagacacctacccctaccagggcaaggatggttattgcaagttccaacctggaaaggccatcggctttgtcaaggatgtagccaacatcacaatctatgacgaggaagcgatggtggaggctgtggccctctacaaccctgtgagctttgcctttgaggtgactcaggacttcatgatgtatagaacgggcatctactccagtacttcctgccataaaactccagataaagtaaaccatgcagtactggctgttgggtatggagaaaaaaatgggatcccttactggatcgtgaaaaactcttggggtccccagtggggaatgaacgggtacttcctcatcgagcgcggaaagaacatgtgtggcctggctgcctgcgcctcctaccccatccctctggtgtgagccgtggcagccgcagcgcagactggcggagaaggagaggaacgggcagcctgggcctgggtggaaatcctgccctggaggaagttgtggggagatccactgggacccccaacattctgccctcacctctgtgcccagcctggaaacctacagacaaggaggagttccaccatgagctcacccgtgtctatgacgcaaagatcaccagccatgtgccttagtgtccttcttaacagactcaaaccacatggaccacgaatattctttctgtccagaagggctactttccacatatagagctccagggactgtcttttctgtattcgctgttcaataaacattgagtgagcacctccccagatggaaaaaaaaaaaaaaaaaaaaaaaaaaaaaaaaaaaaa

SEQ ID NO: 561 - protein, 335 aa, Homo sapien
MWATLPLLCAGAWLLGVPVCGAAELCVNSLEKFHFKSWMSKHRKTYSTEEYHHRLQTFASNWRKINAHNNGNHTFKMALNQFSDMSFAEIKHKYLWSEPQNCSATKSNYLRGTGPYPPSVDWRKKGNFVSPVKNQGACGSCWTFSTTGALESAIAIATGKMLSLAEQQLVDCAQDFNNHGCQGGLPSQAFEYILYNKGIMGEDTYPYQGKDGYCKFQPGKAIGFVKDVANITIYDEEAMVEAVALYNPVSFAFEVTQDFMMYRTGIYSSTSCHKTPDKVNHAVLAVGYGEKNGIPYWIVKNSWGPQWGMNGYFLIERGKNMCGLAACASYPIPLV

SEQ ID NO: 562 - DNA, 2960 bp, Homo sapien
ggcacgagggtgtgcgtgatggagaaaattgggcaccagggctgctcccgagattctcagatctgatttccacgcttgctaccaaaatagtctgggcaggccacttttggaagtaggcgttatctagtgagcaggcggccgctttcgatttcgctttcccctaaatggctgagcttctcgccagcgcaggatcagcctgttcctgggactttccgagagccccgccctcgttccctcccccagccgccagtaggggaggactcggcggtacccggagcttcaggccccaccggggcgcggagagtcccaggcccggccgggaccgggacggcgtccgagtgccaatggctagctctaggtgtcccgctccccgcgggtgccgctgcctccccggagcttctctcgcatggctggggacagtactgctacttctcgccgactgggtgctgctccggaccgcgctgccccgcatattctccctgctggtgcccaccgcgctgccactgctccgggtctgggcggtgggcctgagccgctgggccgtgctctggctgggggcctgcggggtcctcagggcaacggttggctccaagagcgaaaacgcaggtgcccagggctggctggctgctttgaagccattagctgcggcactgggcttggccctgccgggacttgccttgttccgagagctgatctcatggggagcccccgggtccgcggatagcaccaggctactgcactggggaagtcaccctaccgccttcgttgtcagttatgcagcggcactgcccgcagcagccctgtggcacaaactcgggagcctctgggtgcccggcggtcagggcggctctggaaaccctgtgcgtcggcttctaggctgcctgggctcggagacgcgccgcctctcgctgttcctggtcctggtggtcctctcctctcttggggagatggccattccattctttacgggccgcctcactgactggattctacaagatggctcagccgataccttcactcgaaacttaactctcatgtccattctcaccatagccagtgcagtgctggagttcgtgggtgacgggatctataacaacaccatgggccacgtgcacagccacttgcagggagaggtgtttggggctgtcctgcgccaggagacggagtttttccaacagaaccagacaggtaacatcatgtctcgggtaacagaggacacgtccaccctgagtgattctctgagtgagaatctgagcttatttctgtggtacctggtgcgaggcctatgtctcttggggatcatgctctggggatcagtgtccctcaccatggtcaccctgatcaccctgcctctgcttttccttctgcccaagaaggtgggaaaatggtaccagttgctggaagtgcaggtgcgggaatctctggcaaagtccagccaggtggccattgaggctctgtcggccatgcctacagttcgaagctttgccaacgaggagggcgaagcccagaagtttagggaaaagctgcaagaaataaagacactcaaccagaaggaggctgtggcctatgcagtcaactcctggaccactagtatttcaggtatgctgctgaaagtgggaatcctctacattggtgggcagctggtgaccagtggggctgtaagcagtgggaaccttgtcacatttgttctctaccagatgcagttcacccaggctgtggaggtactgctctccatctaccccagagtacagaaggctgtgggctcctcagagaaaatatttgagtacctggaccgcacccctcgctgcccacccagtggtctgttgactcccttacacttggagggccttgtccagttccaagatgtctcctttgcctacccaaaccgcccagatgtcttagtgctacaggggctgacattcaccctacgccctggcgaggtgacggcgctggtgggacccaatgggtctgggaagagcacagtggctgccctgctgcagaatctgtaccagcccaccgggggacagctgctgttggatgggaagccccttccccaatatgagcaccgctacctgcacaggcaggtggctgcagtgggacaagagccacaggtatttggaagaagtcttcaagaaaatattgcctatggcctgacccagaagccaactatggaggaaatcacagctgctgcagtaaagtctggggcccatagtttcatctctggactccctcagggctatgacacagaggtagacgaggctgggagccagctgtcagggggtcagcgacaggcagtggcgttggcccgagcattgatccggaaaccgtgtgtacttatcctggatgatgccaccagtgccctggatgcaaacagccagttacaggtggagcagctcctgtacgaaagccctgagcggtactcccgctcagtgcttctcatcacccagcacctcagcctggtggagcaggctgaccacatcctctttctggaaggaggcgctatccgggaggggggaacccaccagcagctcatggagaaaaaggggtgctactgggccatggtgcaggctcctgcagatgctccagaatgaaagccttctcagacctgcgcactccatctccctcccttttcttctctctgtggtggagaaccacagctgcagagtaggcagctgcctccaggatgagttacttgaaatttgccttgagtgtgttacctcctttccaagctcctcgtgataatgcagacttcctggagtacaaacacaggatttgtaattccttactgtaacggagtttagagccagggctgatgctttggtgtggccagcactctgaaactgagaaatgttcagaatgtacggaaagatgatcagctattttcaacataactgaaggcatatgctggcccataaacaccctgtaggttcttgatatttataataaaattggtgttttgt

SEQ ID NO: 563 - protein, 808 aa, Homo sapien
MAELLASAGSACSWDFPRAPPSFPPPAASRGGLGGTRSFRPHRGAESPRPGRDRDGVRVPMASSRCPAPRGCRCLPGASLAWLGTVLLLLADWVLLRTALPRIFSLLVPTALPLLRVWAVGLSRWAVLWLGACGVLRATVGSKSENAGAQGWLAALKPLAAALGLALPGLALFRELISWGAPGSADSTRLLHWGSHPTAFVVSYAAALPAAALWHKLGSLWVPGGQGGSGNPVRRLLGCLGSETRRLSLFLVLVVLSSLGEMAIPFFTGRLTDWILQDGSADTFTRNLTLMSILTIASAVLEFVGDGIYNNTMGHVHSHLQGEVFGAVLRQETEFFQQNQTGNIMSRVTEDTSTLSDSLSENLSLFLWYLVRGLCLLGIMLWGSVSLTMVTLITLPLLFLLPKKVGKWYQLLEVQVRESLAKSSQVAIEALSAMPTVRSFANEEGEAQKFREKLQEIKTLNQKEAVAYAVNSWTTSISGMLLKVGILYIGGQLVTSGAVSSGNLVTFVLYQMQFTQAVEVLLSIYPRVQKAVGSSEKIFEYLDRTPRCPPSGLLTPLHLEGLVQFQDVSFAYPNRPDVLVLQGLTFTLRPGEVTALVGPNGSGKSTVAALLQNLYQPTGGQLLLDGKPLPQYEHRYLHRQVAAVGQEPQVFGRSLQENIAYGLTQKPTMEEITAAAVKSGAHSFISGLPQGYDTEVDEAGSQLSGGQRQAVALARALIRKPCVLILDDATSALDANSQLQVEQLLYESPERYSRSVLLITQHLSLVEQADHILFLEGGAIREGGTHQQLMEKKGCYWAMVQAPADAPE

SEQ ID NO: 564 - DNA, 3960 bp, Homo sapien
gttctgaatgatgactgacgcgggtttgggtgatacccctcacagcccctgtcattccggagtcataaggcacccgcgcgtctagccccagcgccagggcacgcgagcggcgctggagggaggaaagcttccgcctgcgggccggacaaaagtcccgcctgcccacggctttttgcccgccgctcgtgaccgagacgcctcgccgcggccagctcgctgctctcgctggcggatggtgtgtggccgccgcaggacgcccgccgtgcccgggccatgaagtagcggctgctggcggcgccgctgcccaaccgccagccccagccccgcgctgcgctgcccggtcctctcccggcggggtcgtatcggcgtggacatggctggccgcgtccctagcctgctagttctccttgtttttccaagcagctgtttggctttccgaagcccactttctgtctttaagaggtttaaagaaactaccagaccattttccaatgaatgtcttggtaccaccagacccgtagttcctattgattcatcagattttgcattggatattcgcatgcctggggttacacctaaacagtccgatacatacttctgcatgtctatgcgaataccagtggatgaggaagccttcgtgattgacttcaagcctcgagccagcatggatactgtccatcacatgttactttttggatgcaatatgccttcatccactggaagttactggttttgtgatgaaggaacctgtacagataaagccaatattctgtatgcctgggcgagaaatgctccccctacccggctccccaaaggtgttggattcagagttggaggagagactggaagtaaatactttgtactacaggtacactatggggatattagtgcttttagagataataacaaggactgttctggtgtgtccttacacctcacacgtctgccacagcctttaattgctggcatgtaccttatgatgtctgttgacactgttatcccagcaggagaaaaagtggtgaattctgacatttcatgccattataaaaattatccaatgcatgtctttgcctatagagttcacactcaccatttaggtaaggtagtaagtggatacagagtaagaaatggacagtggacactgattggacggcagagccctcagctgccacaggctttctaccctgtggggcatccagttgatgtaagttttggtgacctactggctgcaagatgtgtattcactggtgaaggaaggacagaagccacacacattggtggcacgtctagtgatgaaatgtgcaacttatacattatgtattacatggaagccaagcatgcagtttctttcatgacctgtacccagaatgtagctccagatatgttcagaaccataccaccagaggccaacattccaattcccgtgaagtctgatatggttatgatgcatgaacatcataaagaaacagaatataaagataagattcctttactacagcagccaaaacgagaagaagaagaagtgttagaccagggtgatttctattcactactttccaagctgctaggagaaagggaagatgttgttcatgtgcacaaatataatcctacagaaaaggcagaatcagagtcagacctggtagctgagattgcaaatgtagtccaaaaaaaggatcttggtcgatctgatgccagagagggtgcagaacatgagaggggtaatgctattcttgtcagagacagaattcacaaattccacagactagtatctaccttgaggccaccagagagcagagttttctcattacagcagcccccacctggtgaaggcacctgggaaccagaacacacaggagatttccacatggaagaggcactggattggcctggagtatacttgttaccaggccaggtttctggggtggctctagaccctaagaataacctggtgattttccacagaggtgaccatgtctgggatggaaactcgtttgacagcaagtttgtttaccagcaaataggactcggaccaattgaagaagacactattcttgtcatagatccaaataatgctgcagtactccagtccagtggaaaaaatctgttttacttgccacatggcttgagtatagataaagatgggaattattgggtcacagacgtggctctccatcaggtgttcaaactggatccaaacaataaagaaggccctgtattaatcctgggaaggagcatgcaaccaggcagtgaccagaatcacttctgtcaacccactgatgtggctgtggatccaggcactggagccatttatgtatcagatggttactgcaacagcaggattgtgcagttttcaccaagtggaaagttcatcacacagtggggagaagagtcttcagggagcagtcctctgccaggccagttcactgttcctcacagcttggctcttgtgcctcttttgggccaattatgtgtggcagaccgggaaaatggtcggatccagtgttttaaaactgacaccaaagaatttgtgagagagattaagcattcatcatttggaagaaatgtatttgcaatttcatatataccaggcttgctctttgcagtgaatgggaagcctcattttggggaccaagaacctgtacaaggatttgtgatgaacttttccaatggggaaattatagacatcttcaagccagtgcgcaagcactttgatatgcctcatgatattgttgcatctgaagatgggactgtgtacattggagatgctcataccaacaccgtgtggaagttcaccttgactgagaaattggaacatcgatcagttaaaaaggctggcattgaggtccaggaaatcaaagaagccgaggcagttgttgaaaccaaaatggagaacaaacccacctcctcagaattgcagaagatgcaagagaaacagaaactgatcaaagagccaggctcgggagtgcctgttgttctcattacaacccttctggttattccggtggttgtcctgctggccattgccatatttattcggtggaaaaaatcaagggcctttggagcagattctgaacacaaactcgagacgagttcaggaagagtactgggaagatttagaggaaagggaagtggaggcttaaaccttggtaatttctttgcaagccgtaagggctacagtcgaaaagggtttgaccggcttagcactgagggcagtgaccaagagaaagaggatgatggaagtgaatcagaagaggagtattcagcacctctgcctgcgctcgcaccttcctcctcctgaaaaccaagctttgatttagattgagtaagatttacccagaatgtcagattcctttccctttagcacgtttaaagttctgtgtatttaattgtaaactgtactagtctgtgtgggactgtacacactttatttacttcgttttggttaagttggcttctgtttctagttgaggagtttcctaaaagttcataacagtgccattgtctttatatgaacatagactagagaaaccgtcctctttttccatcataattctaatctaacaatggaagatttgcccatttacacttttgagactttttggtggatgtaaataaccccattctttgcttgaacacagtattttcccaatagcactttcattgccagtgtctttctttggtgcctttcctgttcagcattcttagcctgtggcagtaaagagaaactttgtgctacatgacgacaaagctgctaaatctcctatttttttaaaatcactaacattatattgcaatgaaggaaataaaaaagtctctatttaaattcttttttaaattttcttcagttggtgtgtttttgggatgtcttatttttagatggttacactgttagaacactattttcagaatctgaatgtaatttgtgtaataaagtgttttcagagcaaaaaaaaaaaaaaa

SEQ ID NO: 565 - protein, 974 aa, Homo sapien
MAGRVPSLLVLLVFPSSCLAFRSPLSVFKRFKETTRPFSNECLGTTRPVVPIDSSDFALDIRMPGVTPKQSDTYFCMSMRIPVDEEAFVIDFKPRASMDTVHHMLLFGCNMPSSTGSYWFCDEGTCTDKANILYAWARNAPPTRLPKGVGFRVGGETGSKYFVLQVHYGDISAFRDNNKDCSGVSLHLTRLPQPLIAGMYLMMSVDTVIPAGEKVVNSDISCHYKNYPMHVFAYRVHTHHLGKVVSGYRVRNGQWTLIGRQSPQLPQAFYPVGHPVDVSFGDLLAARCVFTGEGRTEATHIGGTSSDEMCNLYIMYYMEAKHAVSFMTCTQNVAPDMFRTIPPEANIPIPVKSDMVMMHEHHKETEYKDKIPLLQQPKREEEEVLDQGDFYSLLSKLLGEREDVVHVHKYNPTEKAESESDLVAEIANVVQKKDLGRSDAREGAEHERGNAILVRDRIHKFHRLVSTLRPPESRVFSLQQPPPGEGTWEPEHTGDFHMEEALDWPGVYLLPGQVSGVALDPKNNLVIFHRGDHVWDGNSFDSKFVYQQIGLGPIEEDTILVIDPNNAAVLQSSGKNLFYLPHGLSIDKDGNYWVTDVALHQVFKLDPNNKEGPVLILGRSMQPGSDQNHFCQPTDVAVDPGTGAIYVSDGYCNSRIVQFSPSGKFITQWGEESSGSSPLPGQFTVPHSLALVPLLGQLCVADRENGRIQCFKTDTKEFVREIKHSSFGRNVFAISYIPGLLFAVNGKPHFGDQEPVQGFVMNFSNGEIIDIFKPVRKHFDMPHDIVASEDGTVYIGDAHTNTVWKFTLTEKLEHRSVKKAGIEVQEIKEAEAVVETKMENKPTSSELQKMQEKQKLIKEPGSGVPVVLITTLLVIPVVVLLAIAIFIRWKKSRAFGADSEHKLETSSGRVLGRFRGKGSGGLNLGNFFASRKGYSRKGFDRLSTEGSDQEKEDDGSESEEEYSAPLPALAPSSS

SEQ ID NO: 566 - DNA, 662 bp, Homo sapien
accgccgacgcagacccctctctgcacgccagcccgcccgcacccaccatggccacagttcagcagctggaaggaagatggcgcctggtggacagcaaaggctttgatgaatacatgaaggagctaggagtgggaatagctttgcgaaaaatgggcgcaatggccaagccagattgtatcatcacttgtgatggtaaaaacctcaccataaaaactgagagcactttgaaaacaacacagttttcttgtaccctgggagagaagtttgaagaaaccacagctgatggcagaaaaactcagactgtctgcaactttacagatggtgcattggttcagcatcaggagtgggatgggaaggaaagcacaataacaagaaaattgaaagatgggaaattagtggtggagtgtgtcatgaacaatgtcacctgtactcggatctatgaaaaagtagaataaaaattccatcatcactttggacaggagttaattaagagaatgaccaagctcagttcaatgagcaaatctccatactgtttctttcttttttttttcattactgtgttcaattatctttatcataaacattttacatgcagctatttcaaagtgtgttggattaattaggatcatccctttggttaataaataaatgtgtttgtgct

SEQ ID NO: 567 - protein, 135 aa, Homo sapien
MATVQQLEGRWRLVDSKGFDEYMKELGVGIALRKMGAMAKPDCIITCDGKNLTIKTESTLKTTQFSCTLGEKFEETTADGRKTQTVCNFTDGALVQHQEWDGKESTITRKLKDGKLVVECVMNNVTCTRIYEKVE

SEQ ID NO: 568 - DNA, 3592 bp, Homo sapien
ctgagcgggtgcgcgggcaacttccggtgtgggtgacgagtggtggccgaagcagggggacagcaagggacgctcaggcggggaccatggcggacggcggctcggagcgggctgacgggcgcatcgtcaagatggaggtggactacagcgccacggtggatcagcgcctacccgagtgtgcgaagctagccaaggaaggaagacttcaagaagtcattgaaacccttctctctctggaaaagcagactcgtactgcttccgatatggtatcgacatcccgtatcttagttgcagtagtgaagatgtgctatgaggctaaagaatgggatttacttaatgaaaatattatgcttttgtccaaaaggcggagtcagttaaaacaagctgttgccaaaatggttcaacagtgctgtacttatgttgaggaaatcacagaccttcctatcaaacttcgattaattgatactctacgaatggttaccgaaggcaagatttatgttgaaattgagcgtgcgcgactgactaaaacattagcaactataaaagaacaaaatggtgatgtgaaagaggcagcctccattttacaggagttacaggtggaaacctacgggtcaatggaaaagaaagagcgagtggaatttattttggagcaaatgaggctctgcctagctgtgaaggattacattcgaacacaaatcatcagcaagaaaattaacaccaaatttttccaggaagaaaatacagagaaattaaagttgaagtactataatttaatgattcagctggatcaacatgagggatcctatttgtctatttgtaagcactacagagcaatatatgatactccctgtatacaggcagaaagtgaaaaatggcagcaggctctgaagagtgttgtactctatgttatcctggctccttttgacaatgaacagtcagatttggttcaccgaataagtggtgacaagaagttagaagaaattcccaaatacaaggatcttttaaagctttttaccacaatggagttgatgcgttggtccacacttgttgaggactatggaatggaattaagaaaaggttcccttgagagtcctgcaacggatgtttttggttctacagaggaaggtgaaaaaaggtggaaagacttgaagaacagagttgttgaacataatattagaataatggccaagtattatactcggataacaatgaaaaggatggcacagcttctggatctatctgttgatgagtccgaagcctttctctcaaatctagtagttaacaagaccatctttgctaaagtagacagattagcaggaattatcaacttccagagacccaaggatccaaataatttattaaatgactggtctcagaaactgaactcattaatgtctctggttaacaaaactacgcatctcatagccaaagaggagatgatacataatctacaataagggtcttagtgctttagaaaaaagttaaaattggaagtcattaaaaaaagactgttataatggtgtatatgttggggttttttttctaagcttctttgtcttaaattttaaaatagtgaatatgtttgagactccctttgacctttcagttccccaagttcattgttaactttgcatttgcaattggtgcaaaaatacagatttctgtcgtctgaatacacaaaaagttgtgtcataacttacccagatatgtttttctatcatttgaaacctttttagctactgtttgttttcattcaactaacaaacatattccaataataaaagcagtatatacatatttcctttctacagttacctctgattctcaacattttgtggggtagtgatttggcaagtgttttttaaataaaacaaatctcattgtaaagctatcagtcatttagtagaatagaaaagcaacatagagcatacaagaacatttgggatagagttgtgatttgtgaagaatttgtactttgatattgtggcggaaagtctagactgagtgtgtatgctggtaaactgtagacttttttttttttttttttgagtccggctggttccaatcacagtagcttgattgctttcagccctcatcctctcacttgatcagttgttcaacagaatcagctgacataattgacacagtttattgggtgttaagtccgctctatagggatagtgactactttttttttttttttttttttgctcttcttcctctcccctttctttatatgggtttaaatttaacataaagttgtttttataaggcttatttgtggctttaacttgtaagtctgattacatcattattgttccaaattcattatctctgtaggaacttttagttccattatatgaacactggataacctaattttttttaatgctttaaaaaaatggcaaaaagacgtcaggccaccctcatagtaagtggtgtagtattaaaatattttcacggaattaaaagtagcttgctgtcaaagaaacacctgagatgaattggtgtgaacgaattttgcaagtttaatttgatttatttcagagaaaatagaaaaaacaatgttagaaggttatttaaaatgatacttaaataaagaaagtgtgaggtctactttaaaaaaattcaaatgaagagaaaaagaaaaacagcattctagaaatggcatttctcctaattaattttccacttaatggaagattatcaattgtcctattttatgatcccaggactgaagacagttgtgggatatctgtcatatttatcctgtgagtcattgtgaataatgacatacagtactgaagtaatctgattttattctttggaaattcaatgcattggtcacactaataacatcaacatctgctatcacttatctttttaaaactaaccaaaaaaggctgggattacaggcatgagccactgcacccaactcctctttcgtctttctttaacacacactaggctctttgtgtattatgattcagtgctatttgtaactgtgtcccagtgaccaaattgcactcgactcgatcagctgttcatccatttcgtgttttttcctgtcaaacattaatccagcaaatatatgaggtatttaccaatttattttcttagtattacaaaataattcattagcataaagtacaatagtgaaatatttgagttgttcggaacctcaattaatcctgttttacatttcagacctaaagctggcaatcaggagaagaagcactttgttttaaatgtggagaagataacacttgattccatttcattgtcattagtgtattaaccagcaggagaggtgatgagccatttttcaaatgaaataccttttatttccatataatttttttattttagagttcaatagctgtttctatgattatcctcaatttccatatgttactgaatctgaaaaacatctttaaaattcaaacagttccattttctctcttgtaagtgttaaatgtgataaaagtacatattttaaattgttttcagctcttggatatagcagcaataaaaacactaatttgtgggtatttaagaaaacctggagaataaactcatactttaaaagatc

SEQ ID NO: 569 - protein, 456 aa, Homo sapien
MADGGSERADGRIVKMEVDYSATVDQRLPECAKLAKEGRLQEVIETLLSLEKQTRTASDMVSTSRILVAVVKMCYEAKEWDLLNENIMLLSKRRSQLKQAVAKMVQQCCTYVEEITDLPIKLRLIDTLRMVTEGKIYVEIERARLTKTLATIKEQNGDVKEAASILQELQVETYGSMEKKERVEFILEQMRLCLAVKDYIRTQIISKKINTKFFQEENTEKLKLKYYNLMIQLDQHEGSYLSICKHYRAIYDTPCIQAESEKWQQALKSVVLYVILAPFDNEQSDLVHRISGDKKLEEIPKYKDLLKLFTTMELMRWSTLVEDYGMELRKGSLESPATDVFGSTEEGEKRWKDLKNRVVEHNIRIMAKYYTRITMKRMAQLLDLSVDESEAFLSNLVVNKTIFAKVDRLAGIINFQRPKDPNNLLNDWSQKLNSLMSLVNKTTHLIAKEEMIHNLQ

SEQ ID NO: 570 - DNA, 4464 bp, Homo sapien
agataatctgaatgctggctggggcagaaaattactaagatcctgtggaagtgtgaggattattaaactgatcactgtctgataaggtgagatcaaattgggaatgctttcataatgaacgtcaaccagtcagttccacctgtgccaccatttgggcagccccagcccatctacccagggtatcatcagtccagctatggtgggcaatcagggtccacagcccccgccattccctatggagcctacaatggcccagtaccaggctatcagcaaacacctccccaaggtatgtcaagagccccaccttcctcgggggcacctccagcctcaacagcacaggctccttgtggccaggctgcatatggccagtttggccaaggagatgtacagaatgggccaagctccactgttcagatgcaaaggctgcctgggtctcagccatttgggtccccattggcccctgtgggcaaccagccacctgtgcttcagccctatggccctcccccgacaagtgcacaggtggctacgcagctgtctggaatgcagatcagcggtgctgtggccccagcccctccttcttcagggctgggctttggcccaccaacatcgctggcttcagcctcaggaagtttccctaactctggtctgtatggctcctatcctcagggccaggctcctccccttagccaggcccaaggtcatcctgggatccagactccccagcgatctgccccatcacaggcctccagcttcacacccccagcttcagggggtcctcggctgccttcgatgactggtccactcctgcctggacagagttttggagggccctcagtgagccagcccaaccatgtgtcttcacctcctcaagctctgccccctggcacccagatgactgggcccctgggaccactgccacctatgcactccccgcagcagccaggctatcagccccaacaaaatggttccttcggaccagcccggggccctcagtctaattatggaggcccctacccagcagcacccacctttggcagtcagcctgggcctcctcagccactgcctcctaagcgcctggaccctgatgccatcccaagccctattcaggtcattgaagatgacaggaacaaccggggtacagagccatttgttactggagtacggggccaggtgccacccttagtcactaccaacttcctggtgaaagaccaagggaatgcaagtccccgatacatccgatgtacatcctataatatcccttgcacatctgacatggctaagcaggctcaggtgcccctggcagcagtcatcaaaccgctggcaaggctgcccccagaggaggcttcaccgtatgttgtggaccatggggaatctggccctttgcgctgcaaccgctgcaaagcatacatgtgtcccttcatgcagttcattgaaggagggaggcgtttccagtgctgtttttgcagctgtatcaatgatgttcccccccagtattttcagcacctggatcataccggcaaacgtgtggatgcttatgaccgccctgagctatccctgggctcttatgaattcttggccactgtagattactgcaagaacaataagttccccagccctcctgcctttatcttcatgattgacgtctcctacaatgccatcaggactggtcttgttaggctcctctgtgaggagctcaagtcactgttagactttctacctagggagggtggggcagaagagtcagcaatccgcgttggctttgtcacctacaataaggtgctccacttctataatgtgaagagctcattggcccagccacagatgatggttgtgtctgatgtggctgacatgtttgtgccactgctggatggcttcctggtcaacgtcaatgagtctcgggcagttatcaccagcttattggatcagattccagaaatgtttgcagacacaagggaaacagagacagtatttgtaccagttatccaggctggaatggaggctctgaaggctgctgagtgtgcagggaagctctttctattccatacatccctgcccattgcagaggccccagggaaactgaagaacagagatgacaggaagctgatcaatacagacaaggagaagactctgttccagcctcagacaggtgcctatcagaccctggccaaagagtgtgtggcccaaggctgctgtgtagatctctttctcttccctaaccagtatgtggatgtggccacactctctgttgtgccccagctcactggtggctctgtctacaaatatgcttcctttcaggtggagaacgaccaggagcggttcctgagtgacctgcgtcgtgatgtccagaaggttgttggctttgatgctgtgatgcgggtccggacaagcactggtatccgtgctgtagatttctttggagctttctacatgagcaacacgacagatgtggagctggctgggctagatggggacaaaacagtgactgtggagttcaagcatgacgatcggctcaatgaagagagcggagctctcctgcagtgtgccctgctttacaccagctgtgcagggcagcgtcggctccgcatccataatctggccctgaactgctgcacccagctggctgatctatatcgaaactgtgagactgacacgctcatcaactacatggccaagtttgcatatcggggagtcctgaatagccctgtgaaggctgttcgtgacacgctcatcacccagtgtgcccagatcctggcctgttacagaaagaactgtgctagcccctcctctgcaggacagttgatccttcctgagtgcatgaagctactcccagtttacctgaactgtgtgttgaagagtgatgtcctgcagcctggagctgaagtcactactgatgaccgtgcctatgtccgacagctagttacctccatggatgtgactgagaccaatgtcttcttctaccctcggctcttacctttgacaaagtctcccgttgagagtactaccgaaccaccagcagttcgagcctctgaagagcgtctaagcaatggggatatatatttactggagaatgggctcaacctcttcctctgggtgggagcaagcgtccaacagggtgttgtccagagccttttcagcgtctcctccttcagtcagatcaccagtggtttgagtgttctgccagttctggataatccactgtccaagaaggttcgaggcctcattgatagcttacggggcacagagatcccggtacatgaagcttaccgtggtgaaacaggaagacaagatggagatgctgttcaagcacttcctggtggaagacaagagtctgagtgggggagcatcttatgtggactttctctgtcatatgcacaaggagattcggcagctactgagctaaagcaagtgggtaaatggcatagggcccaggctagcttccagaaagcaccccaggatgtcagagaaattgggacagtaacatatcttatgtaagctgacctcagtctctctggggggagggggagatataaggagacaccttctttctgggctcaagtatcctgccactctgtcatgtcctgctgatggaaggtgcccctgttccctcattctaccctctttttcctgctaatcctgtcataatgaatgtagcttctcagttcactgtatatgattcggtattgggggtttggaggcacccagaccctggcaatattatgtgtccctttggaccagtctcccaagaggagaggggcaggcaggaaagagtggggatcctaaggttactacagggggctcagtgtcatccacaacttcctatattagggataaaacatataggtgcacaagagctggggtatagcccataggtggtggagagaaaagtggtcagtccttcttgggcctggaggttagcagtcaagtttctctgctttcactgctcgctcgctctctcctgcaatgattgatgatcactccgtggatagagaggcacactgtcagaggtgaccggagaactgagttgcaaaatatattaagatctggtagaggtaccagcttcctttccagctggagaggccccaacactggatggttctgtagggagcctagggagcctggtcatcaacttgcaatacctcacagagccagttcacatcccactctgagctcccacgagaaacactgcttctccaggcccggggttgttggggagagaggcagaggcagctggagcgccgttctctcctgctgggacaccgcttgggctttggtattgactgagtggctgacagttatcttccaaccccaactggcttgggggcaggacaagggctaggcttgatggtggccaggcttgcctgctccccacctgggatgcccctgctctggacctctcatttctcttcattggtttatttttcaatgcatctttaatttgtaaagaaataaaataaattaagatgt

SEQ ID NO: 571 - protein, 1125 aa, Homo sapien
MNVNQSVPPVPPFGQPQPIYPGYHQSSYGGQSGSTAPAIPYGAYNGPVPGYQQTPPQGMSRAPPSSGAPPASTAQAPCGQAAYGQFGQGDVQNGPSSTVQMQRLPGSQPFGSPLAPVGNQPPVLQPYGPPPTSAQVATQLSGMQISGAVAPAPPSSGLGFGPPTSLASASGSFPNSGLYGSYPQGQAPPLSQAQGHPGIQTPQRSAPSQASSFTPPASGGPRLPSMTGPLLPGQSFGGPSVSQPNHVSSPPQALPPGTQMTGPLGPLPPMHSPQQPGYQPQQNGSFGPARGPQSNYGGPYPAAPTFGSQPGPPQPLPPKRLDPDAIPSPIQVIEDDRNNRGTEPFVTGVRGQVPPLVTTNFLVKDQGNASPRYIRCTSYNIPCTSDMAKQAQVPLAAVIKPLARLPPEEASPYVVDHGESGPLRCNRCKAYMCPFMQFIEGGRRFQCCFCSCINDVPPQYFQHLDHTGKRVDAYDRPELSLGSYEFLATVDYCKNNKFPSPPAFIFMIDVSYNAIRTGLVRLLCEELKSLLDFLPREGGAEESAIRVGFVTYNKVLHFYNVKSSLAQPQMMVVSDVADMFVPLLDGFLVNVNESRAVITSLLDQIPEMFADTRETETVFVPVIQAGMEALKAAECAGKLFLFHTSLPIAEAPGKLKNRDDRKLINTDKEKTLFQPQTGAYQTLAKECVAQGCCVDLFLFPNQYVDVATLSVVPQLTGGSVYKYASFQVENDQERFLSDLRRDVQKVVGFDAVMRVRTSTGIRAVDFFGAFYMSNTTDVELAGLDGDKTVTVEFKHDDRLNEESGALLQCALLYTSCAGQRRLRIHNLALNCCTQLADLYRNCETDTLINYMAKFAYRGVLNSPVKAVRDTLITQCAQILACYRKNCASPSSAGQLILPECMKLLPVYLNCVLKSDVLQPGAEVTTDDRAYVRQLVTSMDVTETNVFFYPRLLPLTKSPVESTTEPPAVRASEERLSNGDIYLLENGLNLFLWVGASVQQGVVQSLFSVSSFSQITSGLSVLPVLDNPLSKKVRGLIDSLRGTEIPVHEAYRGETGRQDGDAVQALPGGRQESEWGSILCGLSLSYAQGDSAATELKQVGKWHRAQASFQKAPQDVREIGTVTYLM

SEQ ID NO: 572 - DNA, 2643 bp, Homo sapien
gggactacatttcccagggggcagaggcaggggcgggagggggcgggccccggcgctgctcccgcccctcccccgtgctcgcggggagaggtaaacaaaccacgcgcgggctgcccgcggcacggcgggcgcggctggcgcggctggggcggcaggggcggcggagagcgcgccgagccgcggccgagctggcccgcccgcccgtcgcacatgttccggaacggcgcccggccgtagccgcctgcggcgcctcctgtcggcccgagaagggagtgcggagaggcgccggtcgccacccgcggtgcccatggagcgggtgaagatgatcaacgtgcagcgtctgctggaggctgccgagtttttggagcgccgggagcgagagtgtgaacatggctacgcctcttcattcccgtccatgccgagcccccgactgcagcattcaaagcccccacggaggttgagccgggcacagaaacacagcagcgggagcagcaacaccagcactgccaacagatctacacacaatgagctggaaaagaatcgacgagctcatctgcgcctttgtttagaacgcttaaaagttctgattccactaggaccagactgcacccggcacacaacacttggtttgctcaacaaagccaaagcacacatcaagaaacttgaagaagctgaaagaaaaagccagcaccagctcgagaatttggaacgagaacagagatttttaaagtggcgactggaacagctgcagggtcctcaggagatggaacgaatacgaatggacagcattggatcaactatttcttcagatcgttctgattcagagcgagaggagattgaagtggatgttgaaagcacagagttctcccatggagaagtggacaatataagtaccaccagcatcagtgacattgatgaccacagcagcctgccgagtattgggagtgacgagggttactccagtgccagtgtcaaactttcattcacttcatagaacccagcatgacataacagtgcagggcaaaatattcactgggccaattcaatacaaacaatctcttaaattgggttcatgatgcagtctcctctttaaaacaaaacaaaacaaaacaaaactatacttgaacaaaagggtcagaggacctgtatttaagcaaatacttagcaaaaagtggggcagagcctcccaaggagaacaaatattcagaatattcatattggaaaaatcacaatttttaatggcagcagaaaacttgtgtgaaattttcttgatttgagttgattgagaagaggacattggagatgccatcctctttctcttttctagtttgctcatactacattgagtagacacatttaaggatggggttatgaacccttcctgagctttatggtcctaaaagcaaaataaaaactattcgaatgaaaagacaagaaaatcaggtattaatcttggatagctaataatgagctattaaaactcagcctgggacagtttatcatgaagcctgtggatgatcaatcctttattattattttttttttttgaaaaaagctcatttcatgctctgcaaaaggagagactcccatgaagccttttgaaagggatcatcatgcagctcaactttctgttggattccatgctaagcaagctaaccttatcctgcattgttagcactaggcacccagctgccacctctccatcctgctgcccttaggccacatgggagcagtccatgcatgacagcctctatcctacaaggcctatgagtatggattgggggggccaaaaggaaaaagctccatgtgcctctttgtctgcgtgggtcagaagagttgtgcacgcagattagcaggccaaggtctgagccacagcagcatttttatttcagattttgataactgtttatatgtgttgaaaaccaaaatgacatctttttaaagcttatccataaaaaaaaatagatgtcttttatagtggaaaaacacatggggaaaaaaatcatctattttgatgcagcatttgataatgataaaacacctcacacctcactctttatagtgcacaaaatgaatgaggtctgggctaggtagaaaaagggtcaatgctatttttgtttttagaatcattaccttttaccagcttttaaccatctgatatctatagtagacacactatcatagttaacatagttaagttcagcacttgtctcattttaatgtaaagatttgcttccattttcctacaggcagtctctctcttcctcacagtcccactgtgcaggtgctattgttactcttacgaatattttcagtaatgttattttcttctaagtgaaatttctagcctgcactttgatgtcatgtgttccctttgtctttcaaactccaaggttcccctgtggccctctcccttaccctgggaaggcctcttggagaccttacccctggctgtttggactttgtatactttaaataatttaactacccttaattacttaaaaaaaaaaaaaagctttatgattttcataacttattgctgattttaatggattgttaatttcagtcctgtagttttattttatgtttagatagggctgggcaaggaaaaagaaaataaagacaaccatatttagcagtgca

SEQ ID NO: 573 - protein, 228 aa, Homo sapien
MERVKMINVQRLLEAAEFLERRERECEHGYASSFPSMPSPRLQHSKPPRRLSRAQKHSSGSSNTSTANRSTHNELEKNRRAHLRLCLERLKVLIPLGPDCTRHTTLGLLNKAKAHIKKLEEAERKSQHQLENLEREQRFLKWRLEQLQGPQEMERIRMDSIGSTISSDRSDSEREEIEVDVESTEFSHGEVDNISTTSISDIDDHSSLPSIGSDEGYSSASVKLSFTS

SEQ ID NO: 574 - DNA, 3988 bp, Homo sapien
tgcaactccgagcgtgagtccaggctaaggggacgccggccggggaagaggcgcggcgggagaagcgaccgcagcgggagcccggccaccgagggctgccggcactaggcgcagagccgccagcgctcggaagcccgcggggtgcgggagcgggaacagacttcttttgtagaattatcctatggaatgatattttcataatgagtcaacaaggttacgtggctacacctccgtattctcagcctcagcctggaataggcctttctccacctcattatgggcactatggggatccgtcgcacacagcatctccaacaggtatgatgaagccagcagggcctttgggggccaccgccactaggggaatgttgcctccgggtcccccacctcctggaccccatcagtttggtcagaatggagctcatgccactggtcaccctccccaaagatttccaggccctccacctgtcaacaatgtggcatcctcacatgcaccataccaaccctctgcacaatcttcttatccaggtcctatatccacttcatctgtcacccagctgggcagccagctcagtgctatgcaaatcaacagctatggttcaggcatggctcctccaagccagggaccccctggccctctgtcagccacatcattgcagactcctccacgacctccacagccttccattttgcagcctggatctcaagttcttccaccaccacccaccacactcaatggtcctggtgcctcacctttgcctctaccaatgtacagaccagatgggctctctgggcctcctcctccaaatgcccagtaccagcccccacctcttccaggccagaccttgggtgctggatatcctccgcagcaggccaactctggtccccagatggcaggcgcacaactgtcttacccaggaggcttccctggaggtcctgcacagatggctggtccgccacagccccagaagaagctggatcctgactctatccctagcccaatccaggtgattgagaatgatagagccagcagaggaggacaagtttatgccaccaacaccagaggccagatccctcccctggtcactacagattgcatgatacaagaccaaggaaatgccagtcctcgattcatccgttgtacaacatactgttttccatgcacgtcagatatggctaagcaagctcagattccattagctgctgtcatcaagccctttgccaccattccttcaaatgagagtcccctttacttggtaaatcacggcgagagtggaccagtcagatgcaacaggtgcaaggcctacatgtgcccatttatgcagttcatcgaaggaggaaggagatatcagtgtggattttgcaactgtgtgaatgatgttccaccattctatttccaacatctggaccacattggaagaagactggaccactatgagaaaccagagttatctctaggatcttatgaatatgttgccactttggattattgcagaaagagtaagcctcccaacccaccagcctttatcttcatgattgatgtttcatatagtaacataaagaatggacttgtcaagctcatatgtgaagaactgaagaccatgctggaaaaaattccaaaggaagagcaagaagagacgtctgcaattcgagtgggttttatcacatataacaaagttctccatttctttaatgtgaagagtaatctggcccagcctcagatgatggtggtgactgatgttggagaagtctttgttcctttgttggatggtttccttgtcaactatcaagaatcccaatctgtgattcataatttgttggaccagattccagacatgtttgcagactctaatgaaaatgagactgtctttgcttctgtcatccaggctggcatggaagcactaaaggcagcagactgtcctgggaagctgttcatcttccattcttccttgccaactgctgaagcaccagggaagctcaaaaacagagatgacaaaaaactggttaatacagacaaagagaagatacttttccagccccaaacaaatgtctatgactcattggccaaggactgcgtggctcacggctgctctgtgacactcttcctctttcctagtcagtatgtggacgtggcctcgctggggctggttcctcagctcactggaggaaccctttacaaatacaacaatttccagatgcacttggatagacaacaatttttgaacgacctcagaaatgatattgaaaagaaaataggctttgatgctattatgagggttcgtaccagcacaggtttcagagccactgatttctttggtggaatcttgatgaacaacaccaccgatgtagaaatggctgccatcgattgtgacaaggcagtgaccgtggagttcaagcacgatgacaaactcagtgaagacagtggagccttaatccagtgtgctgtgctttacacgacaatcagtggtcaaagaagacttcggattcacaatcttggcttaaactgcagctctcagctagctgatctttataagagctgtgagacagatgctcttatcaacttctttgccaagtcagcttttaaagcagttctccaccagcctttgaaggtcatccgggaaattctagttaatcagactgcccatatgttggcatgttaccggaagaattgtgcaagtccttctgcagcaagccagcttattctaccagattccatgaaagtattgccagtgtacatgaattgcttgttgaaaaactgtgtactactcagcagaccagagatctcaactgatgaacgagcataccagagacagctggtcatgaccatgggtgtggctgactctcagcttttcttctacccacaacttctgcccatacacacgttagatgtcaagagtacaatgttacctgctgccgttcgttgctctgagtcccgtctttcagaagaaggaatattcttactggctaatggtctacacatgttcctgtggttgggagtaagcagcccaccagaactgatccaaggaatatttaatgtgccatcttttgcacatatcaacacagatatgacattgctgcctgaagtgggaaacccatactctcaacaactcagaatgataatgggtattatccaacaaaagaggccatattcaatgaagctcacaattgtaaagcagcgagaacaaccagaaatggttttccgacagttcctggtagaagacaaaggactttacggaggctcttcttatgtggatttcctttgttgtgttcacaaggagatctgtcagctgcttaattaattgaaacttctctgtcattgatgttgcatttccaaggagataatctccttcttggtgcctaattttctagatgataataggctagttttgatttcttgctcattttcagaataactttccaggaagagatggcatttagaacttcagctttggtgctcaggtataaagccaattaaggtacaattgtaccataaagggaacaatctgtttctgattgcacagtttctaatttttaaaactgatgtggtttgcatttcataaaaggcaaagtttacagaaccataaacattctcaattttctttatgctagacatataaattatttttcaaactgtatagatttggggtaaaaagttgtctcagttcctctcccaattgcaatgagaaaaaaaagcttaatttttacattatacttaattttctaaaaccatgtaactccattgaacatttttcaacttaaggtctgcatagcagacttttaataaccttgggatttatctggtagaacaatatgtgttctacatttttttcataattatatattgtgtatgttaaaactattttccagttgttttgtctgtaaaactgtctttatcaatatgcttaatggttctttgtacaattttgaaagtttctacctgtatataatggatgttaaccagtatcaataaatcacttcgtataatctt

SEQ ID NO: 575 - protein, 1032 aa, Homo sapien
MSQQGYVATPPYSQPQPGIGLSPPHYGHYGDPSHTASPTGMMKPAGPLGATATRGMLPPGPPPPGPHQFGQNGAHATGHPPQRFPGPPPVNNVASSHAPYQPSAQSSYPGPISTSSVTQLGSQLSAMQINSYGSGMAPPSQGPPGPLSATSLQTPPRPPQPSILQPGSQVLPPPPTTLNGPGASPLPLPMYRPDGLSGPPPPNAQYQPPPLPGQTLGAGYPPQQANSGPQMAGAQLSYPGGFPGGPAQMAGPPQPQKKLDPDSIPSPIQVIENDRASRGGQVYATNTRGQIPPLVTTDCMIQDQGNASPRFIRCTTYCFPCTSDMAKQAQIPLAAVIKPFATIPSNESPLYLVNHGESGPVRCNRCKAYMCPFMQFIEGGRRYQCGFCNCVNDVPPFYFQHLDHIGRRLDHYEKPELSLGSYEYVATLDYCRKSKPPNPPAFIFMIDVSYSNIKNGLVKLICEELKTMLEKIPKEEQEETSAIRVGFITYNKVLHFFNVKSNLAQPQMMVVTDVGEVFVPLLDGFLVNYQESQSVIHNLLDQIPDMFADSNENETVFASVIQAGMEALKAADCPGKLFIFHSSLPTAEAPGKLKNRDDKKLVNTDKEKILFQPQTNVYDSLAKDCVAHGCSVTLFLFPSQYVDVASLGLVPQLTGGTLYKYNNFQMHLDRQQFLNDLRNDIEKKIGFDAIMRVRTSTGFRATDFFGGILMNNTTDVEMAAIDCDKAVTVEFKHDDKLSEDSGALIQCAVLYTTISGQRRLRIHNLGLNCSSQLADLYKSCETDALINFFAKSAFKAVLHQPLKVIREILVNQTAHMLACYRKNCASPSAASQLILPDSMKVLPVYMNCLLKNCVLLSRPEISTDERAYQRQLVMTMGVADSQLFFYPQLLPIHTLDVKSTMLPAAVRCSESRLSEEGIFLLANGLHMFLWLGVSSPPELIQGIFNVPSFAHINTDMTLLPEVGNPYSQQLRMIMGIIQQKRPYSMKLTIVKQREQPEMVFRQFLVEDKGLYGGSSYVDFLCCVHKEICQLLN

SEQ ID NO: 576 - DNA, 2468 bp, Homo sapien
  Unsure 746-837, 978-995, 2448: Unknown base
gtctggagcagcaggcgccgcgtttgcgagctaagctctcgtggcattatccttcagtggggctattggactgacttttcttatgctgggatgtgccttagaggattatggcgtttactggcccttattcgtcctgattttccacgccatctcccccatcccccatttcattgccaaaagagtcacctatgactcagatgcaaccagtagtgcctgtcgggaactggcatatttcttcactactggaattgttgtttctgccttggatttccttacaattcaagggtttttccttatatttggaagaggagatgattttagctgggagcagtggtagcactttattctgattacagtgcattgaatttcttagaactcatactatctgtatacatgtgcacatgcggcattttactatgaaatttaatatgctgggttttttaatacctttatatatcatgttcactttaagaaagacttcataagtaggagatgagttttattctcagcaaatagacctgtcaaatttagattatgttactcaaattatgttacttgtttggctgttcatgtagtcacggtgctctcagaaaatatattaacgcagtcttgtaggcagctgccaccttatgcagtgcatcgaaaccttttgcttggggatgtgcttggagaggcagataacgctgaagcaggcctctcatgacccaggaaggccggggtggatccctctttgtgttgtagtccannnnnnnnnnnnnnnnnnnnnnnnnnnnnnnnnnnnnnnnnnnnnnnnnnnnnnnnnnnnnnnnnnnnnnnnnnnnnnnnnnnnnnnnnnnnggacattttgatgagatccaaaggagttgtatgcacatgaaagtttgagaagcatcatcatagagaagtaaacatcacacccaacttccttatctttccagtggctaaaccacttaacctctctgggtgttacctgctcannnnnnnnnnnnnnnnnnaagtctcacctgctttcatgctgaggacaagttcagatgttcaagcctataatatttaggcagttcctcaaatttatgaaaagtgttctcagaattgggagacagtcaaagggtacaaagcctcagttaggaggaataagtgtgatttttttttaaagatcacttgcacagcatgctaaatataggaataattgaatgtatatttcaatattgctaagagagtaaatttctaatgttctcataaaaaagttaaatatttgagatcatatgttaattagtgtaatcattccaccttatattcaaaaatcataaaaccgtattgtaccctataaaaatatacaataatttgtcaatatataatcaaaataaaaaacaaaacatactctctcccccaaaaaaacatctcagtggggaacagatgtatcttttcatctgaaagacaatgctgggggaagagctccactgagatgcgggcagggaggctgggctcgagccagcccctgcgttagcaggagggggagaacagataggtaactcttttacatttcctttatgatctggcacttctccccagctccttccctctgccccccacccctactcctcaacacttctggtttgccctgacttctctacggctctggcttcttcccgaagagatataggagccatgtaagcacgcagtgggtgaactgcttaatttcactacatgttgatgtacttgtcttccgtcctgtaggtcttttctatataactttatgccacccttaaatgaatcattgggtatacctgtcatgttggatcctgtaatcacagttttccctgctcacctttttgtctaagatctattgagaaagggaaatatgggaaggagaaccatttgatcagaatacaaccaatagtctttaagcattgttaaagtatgaaactgaaatacattcaaaacacttaatccttgaggcttgtgatctgagtaattagcaggtatgatgctgggactggaaaatagaaagtaataactaaagggttaatgtgcaacgttattttttggccttgttcatgattttatgttttcagtgtcctgtgtacatatagaattgttaaagttgtcatttccaatatttatattagaaaaattatttagatactttataattttaaccggcatttttaataatgacacttgcatttattgtattgtaataaatttcacttttaactttaaaagtttaactttaaaatttttttgtgatgttgccttgcctgaaaagataacaaaaatgagagaatttcttgatgttttaaaatgggcagttttgagcaataatctgtcctaacagaacagtagcaataagttttaggataccatcttgaatgtctagttggtgtgcaatagcttttctttctaagatggcaataatgattcatttctactacattttgcaaaagtgtntttgttgcttatacacattt

SEQ ID NO: 577 - protein, 63 aa, Homo sapien
  Unsure 746-837, 978-995, 2448: Unknown amino acid
VWSSRRRVCELSSRGIILQWGYWTDFSYAGMCLRGLWRLLALIRPDFPRHLPHPPFHCQKSHL

SEQ ID NO: 578 - DNA, 1114 bp, Homo sapien
gtctggcttgggcaggctgcccgggccgtggcaggaagccggaagcagccgcggccccagttcgggagacatggcgggcgttaaagctctcgtggcattatccttcagtggggctattggactgacttttcttatgctgggatgtgccttagaggattatggcgtttactggcccttattcgtcctgattttccacgccatctcccccatcccccatttcattgccaaaagagtcacctatgactcagatgcaaccagtagtgcctgtcgggaactggcatatttcttcactactggaattgttgtttctgcctttggatttcctgttattcttgctcgtgtggctgtgatcaaatggggagcctgcggccttgtgttggcaggcaatgcagtcattttccttacaattcaagggtttttccttatatttggaagaggagatgattttagctgggagcagtggtagcactttattctgattacagtgcattgaatttcttagaactcatactatctgtatacatgtgcacatgcggcattttactatgaaatttaatatgctgggttttttaatacctttatatatcatgttcactttaagaaagacttcataagtaggagatgagttttattctcagcaaatagacctgtcaaatttagattatgttactcaaattatgttacttgtttggctgttcatgtagtcacggtgctctcagaaaatatattaacgcagtcttgtaggcagctgccaccttatgcagtgcatcgaaaccttttgcttggggatgtgcttggagaggcagataacgctgaagcaggcctctcatgacccaggaaggccggggtggatccctctttgtgttgtagtccatgctattaaaagtgtggcccacagaccaagagcctcaacatttcctagagccttattagaaatgcagaatctgaagccccactctggacccaggacattttgatgagatccaaaggagttgtatgcacatgaaagtttgagaagcatcatcatagagaagtaaacatcacacccaacttccttatctttccagtggctaaaccacttaacctctctgggtgttacctgctcatttgttta

SEQ ID NO: 579 - protein, 131 aa, Homo sapien
MAGVKALVALSFSGAIGLTFLMLGCALEDYGVYWPLFVLIFHAISPIPHFIAKRVTYDSDATSSACRELAYFFTTGIVVSAFGFPVILARVAVIKWGACGLVLAGNAVIFLTIQGFFLIFGRGDDFSWEQW

SEQ ID NO: 580 - DNA, 2239 bp, Homo sapien
cgtccgtgacaagatgaagctcatcatcctggagcactattctcaggcgagcgagtgggcggctaaatacatcaggaaccgtatcatccagtttaacccagggccagagaagtacttcaccctggggctccccactgggagtaccccacttggctgctacaagaagctgattgaatactataagaatggggacctgtcctttaaatatgtgaagaccttcaacatggatgagtacgtgggccttcctcgagaccacccggagagttaccactccttcatgtggaacaacttcttcaagcacattgacatccacccagaaaacacccacattctggatgggaatgcagtcgacctacaggcagaatgtgatgcctttgaagagaagatcaaggctgcaggtgggatcgagctatttgttggaggcatcggccctgatggacacattgccttcaacgagccaggctccagtctggtgtccaggacccgtgtgaagacgctggccatggataccatcctggccaatgctaggttcttcgatggagaactcaccaaggtgcccaccatggccttgacggtgggggtgggcactgtcatggatgctagagaggtgatgatccttatcacaggtgctcacaaggcatttgctctgtacaaggccatcgaggagggagtgaaccacatgtggaccgtgtctgccttccagcagcatccccgcaccgtgtttgtgtgtgacgaggatgccaccttggagctgaaagtgaagactgtcaagtatttcaaaggtttaatgcttgttcataacaagttggtggaccccttgtacagtatcaaagagaaagaaactgagaaaagccaatcttcgaagaaaccatacagcgattagcctgtgctgggacctagtgtcaagtacccatagggaaaggcaggtctttctggaaattgtctttagaagaaagaattgtatttctttaatctagtatggttactccagataagtgggtgaacttattgttcttggccatgaggctgggagcctagtcacggagtttagctatagggagaatgtttgtaacttaatcagaaaaaaaatatctgcaaaatgtactccatcattttgatgtctgccaaacccaggttgggagttttaaactttttgttctgcttcagccatggttcacacatatgacacactcccgtcaggaatttctctccttacacgcactgattttcaagtgggagggaattaggggcttatgtatattggataccacctcttgagagtccttcttgcacaggcctgccccttggttgagaaccattgttccaagtgaaggcacaaactctcaatatctaaaataagtgcaaggaagcagtctctttggtcagtaacaagtgcaatggaaagaaaacgatcccttccttcttccactttcacagcttttctctgaactaggagaacctgggggtggatttgggtgggtggggccaaagaggaggcttctattgataaatccagagcctcaaggggcccagccacgtcaaacttctctccctcagggactctccagcaccaaaaggcagaaggtggaagccgtttttcccccagagccctgtgtttttgtgaaaggcctcactgtggctcctctgttttacatactcattagtaagtgggaggtccactggggcaacagacactgccacaatttcagtgttgtgttcagccaaggggacggtctggacaggcagcttaagtgtgagtttagtcacaactcctgagtgtcccgctctcctgcttacctaggaggtgagtgccaggaaaatacaccaaatgcttctagtattgtttccccacttaaaatagtcctgcttaaattcacatggtgtggtctgatgttctgagagcatcaggaaatacaacccttttgcccatttacccttctccccggatcccaaggtggtctgttgctctggcttcctttcattgtcttaggccttcatggagtggatgctgcctcctcctggctgtttttgtgcctgtttgaagctactgctgcctccatttctgggaaagacctttgagagcctagcccaggcctaagggctatgtttggtaccagtgttttgtctttagcttttctatgtgattgtgccgtcattctgttttaagctcatggatcaatggatttgtttacaatgtgatattttctattaaatccagtattttcaaaaaaaaaaaaaa

SEQ ID NO: 581 - protein, 289 aa, Homo sapien
MKLIILEHYSQASEWAAKYIRNRIIQFNPGPEKYFTLGLPTGSTPLGCYKKLIEYYKNGDLSFKYVKTFNMDEYVGLPRDHPESYHSFMWNNFFKHIDIHPENTHILDGNAVDLQAECDAFEEKIKAAGGIELFVGGIGPDGHIAFNEPGSSLVSRTRVKTLAMDTILANARFFDGELTKVPTMALTVGVGTVMDAREVMILITGAHKAFALYKAIEEGVNHMWTVSAFQQHPRTVFVCDEDATLELKVKTVKYFKGLMLVHNKLVDPLYSIKEKETEKSQSSKKPYSD

SEQ ID NO: 582 - DNA, 1078 bp, Homo sapien
gtgtcgcgcggcgcggtggcctcggtcggtaccctgggcgcggacgagctgcctcattagtattcgtacccacgaggcggcgcacggggccctcggggacagcgagcgtcgcgccatggcttatcactcgggctacggagcccacggctccaagcacagggcccgggcagccccggatccccctcccctcttcgatgacacaagcggtggttattccagccagcccgggggatacccagccacaggagcagacgtggccttcagtgtcaaccacttgcttggggacccaatggccaatgtggctatggcctatggcagctccatcgcatcccatgggaaggacatggtgcacaaggagctgcaccgttttgtgtctgtgagcaaactcaagtatttttttgctgtggacacagcctacgtggccaagaagctagggctgctggtcttcccctacacacaccagaactgggaagtgcagtacagtcgtgatgctcctctgcccccccggcaagacctcaacgcccctgacctctatatccccacgaaggccttcattacttacgtgctcctggctgggatggcactgggcattcagaaaaggttctccccggaggtgctgggcctgtgtgcaagcacagcgctggtgtgggtggtgatggaggtgctggccctgctcctgggcctctacctggccaccgtgcgcagtgacctgagcacctttcacctgctggcctacagtggctacaaatacgtgggaatgatcctcagtgtgctcacggggctgctgttcggcagcgatggctactacgtggcgctggcctggacctcatcggcgctcatgtacttcattgtgcgctctttgcggacagcagccctgggccccgacagcatggggggccccgtcccccggcagcgtctccagctctacctgactctgggagctgcagccttccagcccctcatcatatactggctgactttccacctggtccggtgaccccctggccccagatggcactgagtttttcattcattgaagatttgatttccttgaaaaaaaaaaaaaaaaaaaaaaaaa

SEQ ID NO: 583 - protein, 293 aa, Homo sapien
MAYHSGYGAHGSKHRARAAPDPPPLFDDTSGGYSSQPGGYPATGADVAFSVNHLLGDPMANVAMAYGSSIASHGKDMVHKELHRFVSVSKLKYFFAVDTAYVAKKLGLLVFPYTHQNWEVQYSRDAPLPPRQDLNAPDLYIPTKAFITYVLLAGMALGIQKRFSPEVLGLCASTALVWVVMEVLALLLGLYLATVRSDLSTFHLLAYSGYKYVGMILSVLTGLLFGSDGYYVALAWTSSALMYFIVRSLRTAALGPDSMGGPVPRQRLQLYLTLGAAAFQPLIIYWLTFHLVR

SEQ ID NO: 584 - DNA, 7869 bp, Homo sapien
ggcacgaggtttggggcatctccgcggtccggcccggggccccgggatctcggctgtccttcctcccggcataagatgcacatttttctgctctggagccgggaatgaaatattcttgagttcttacaactttatgacgagacccatgtgtggtgctattgagaaattcattgggaagttggaagacatttcaaacaacaggttgttttggtttctatagtacaattggggtggcattctgttttgtgaaaggaggaaggacttaggccagaaaactcatatgctatggttaactggttcccagcctccgagaatcttgttttccatggtgtaaaacttactcagcatcaggataagggataacgactctatggatatacagaatccttcaccatggtaaaactcgcaaacccgctttatactgagtggattttggaggccatcaaaaaagtgaaaaagcagaaacagcgtccttcagaagaaaggatatgcaatgctgtgtcttcatcccatggcttggatcgtaaaactgttttagaacaattggagttgagtgttaaagatggaacaattttaaaagtctcaaataaaggactcaattcctataaagatcctgataatcctgggcgaatagcacttcctaagcctcggaaccatggaaaattggataataaacaaaatgtggattggaataaactgataaagcgggcagttgagggcttggcagagtctggtggctcaactttgaaaagcattgaacgttttttgaaaggtcagaaggatgtgtctgcattattcggaggcagtgctgcctctggctttcaccagcagttacgattggctatcaaacgtgccattggccacggcagactccttaaagatggacctctttatcggctcaacactaaagcaaccaacgtggatgggaaagagagttgtgagtctctttcctgtttacctccagtgtcccttcttccacatgaaaaggataagccggttgctgaaccaatccccatctgtagtttctgtcttggtacaaaagaacaaaaccgagaaaagaagccagaggaactcatctcctgtgccgactgtggcaacagtggccatccatcctgtttaaagttttcccctgaactaacggttcgagtgaaggccttacggtggcagtgcatcgagtgtaaaacatgcagctcctgtcgagatcaaggcaaaaatgcggataacatgctcttttgtgattcatgtgaccgaggttttcacatggagtgttgtgatccgccactcacccgtatgccaaaaggcatgtggatatgtcaaatatgtcgacctaggaaaaaaggacgaaaacttctacaaaagaaggcagcacagataaaacggcgctatactaatccaataggacgtccaaaaaacaggttaaagaaacaaaacacggtatcaaaaggtcccttcagcaaagttcgaactggccctggaaggggtaggaaacgaaaaatcactctttccagccaatcagcatcatcatcatcagaagaaggatatttagagcggatagatggcttggacttctgcagagatagcaatgtctccttgaggttcaacaagaaaaccaaagggctcattgatggccttaccaaattttttaccccttcccctgatgggcggaaagctcggggggaagtggtggactactctgagcaatatcgaatcagaaagaggggcaacaggaaatcaagcacttcagattggcccacagacaatcaggatggctgggatggcaaacaagaaaatgaggagcgactttttgggagccaggaaatcatgactgagaaagatatggaattatttcgtgatatccaagaacaagcactgcagaaagttggagtgactggtccccctgatccacaagtccgctgtccctctgtcattgagtttgggaagtatgaaattcacacctggtactcctccccatatcctcaagaatactcaaggctgcccaaattgtatctttgtgaattttgtctaaaatatatgaaaagtagaactattctgcagcagcacatgaagaaatgtggttggttccatcctcctgccaatgagatttacagaaagaataatatttctgtctttgaggttgatgggaatgtgagtaccatttattgtcaaaacctgtgtcttttggcaaagttgtttcttgaccacaaaaccctctattacgatgtggagccatttcttttttatgtactaacacagaatgatgtcaagggctgccaccttgttggctacttttctaaggaaaagcactgccaacagaagtacaatgtttcctgtataatgattcttcctcaataccagcgtaagggctatggcaggtttctcatcgatttcagttatttgttatcaaagcgtgaaggccaagcagggtctccagagaaaccgttatctgatctgggtcgtctttcctacatggcatattggaaaagtgtaatattggagtgcctttatcaccaaaatgacaagcagatcagcattaagaagttaagcaagttgactggaatctgccctcaagacatcacttccacactccaccacctacgaatgctggacttccgtagtgaccaatttgtgattatccgccgggaaaaacttatccaggatcacatggcaaagcttcagctgaatttgcgacctgtagatgtagatccagaatgtttgcgctggactccagtcatagtgtccaactctgtggtctcagaggaggaagaagaggaggctgaggaaggagaaaacgaagagccacagtgccaggaaagagaattagagatcagtgtgggaaagtctgtgtctcatgagaacaaagaacaagattcttattcagtagaaagtgaaaagaaaccagaagttatggctccagtcagttctacacgtttgagcaaacaagtccttcctcatgatagtcttcctgcaaatagccagccatctcggaggggccgctgggggaggaagaacagaaaaacccaggaacgttttggtgataaagattctaaactgctcttggaagagacgtcttcagctcctcaggaacaatatggagaatgtggggagaaatcagaagccacccaggaacaatacactgaaagtgaagaacagctggtggcttctgaggagcagccaagccaggacgggaaacctgaccttcccaagagaagactcagtgagggggttgagccctggcgaggacagctcaagaaaagccctgaggctctgaagtgcagattaacagaaggaagtgagaggctgccccgtcgctacagtgagggtgacagggctgtcctcaggggcttcagtgagagcagcgaggaggaggaggagccggaaagccctcggtcaagctcgccaccaattctcacaaagcccacgctgaagcgaaagaaaccatttctccaccgaaggaggagagtccgaaagcgcaaacaccacaatagcagtgtagtcacagaaactatttctgagaccactgaagtgttagatgaaccttttgaagattctgactccgagaggccaatgccaagattagaacccacatttgagatcgatgaagaagaggaggaagaggatgaaaatgaacttttccctagagaatacttccgtcgtttgtcttcgcaggatgtactcaggtgtcagtcctcttctaagaggaagtctaaagatgaagaagaagatgaagagtcagatgatgctgatgacactcctatcttaaagccagtatctcttttgcgaaaacgtgatgtgaagaattctcctcttgagccagatacatccacacctttgaaaaagaaaaagggatggcccaaaggcaagagccgcaaaccaatccactggaagaaaagacctggtcgaaaaccaggatttaagttgagtcgggaaatcatgccagtttctactcaagcatgcgtcattgagcccatcgtttccattcctaaagctggacgtaaacccaagatccaggagagtgaagaaactgttgagccaaaagaagacatgcccctacccgaggagaggaaggaggaggaggagatgcaagcagaggcagaagaggctgaagagggtgaggaagaggatgcagccagcagtgaagtcccagcagcctctccagcagacagcagcaatagtcctgagaccgaaaccaaggagcctgaggtggaggaggaagaagagaagccccgtgtctcagaggagcagaggcagtcagaggaggagcagcaggaattagaggagccagagccagaggaggaggaagatgcagctgcagagactgcccagaatgacgaccacgacgctgatgatgaggatgatggccacctggagtccacaaagaaaaaggagctagaggaacagcccacgagggaagatgtcaaggaggagcctggtgttcaagagtcttttttagatgctaatatgcagaagagtagggaaaagataaaggataaagaggaaaccgagctggattccgaagaggagcagccttcccatgacacgtccgtggtgtcagagcagatggctgggtctgaggacgaccacgaagaagactcccacactaaggaagagttaatcgaattaaaagaggaggaagagattcctcatagtgagctggatctggaaactgtacaggcagtgcagtctttgactcaagaagaaagcagtgagcatgagggcgcctaccaggactgtgaggaaactcttgcggcgtgtcagaccctgcagagttacacccaggctgacgaggaccctcagatgtccatggttgaagactgtcatgcgtcagaacataatagccctatctcctccgttcagtctcaccccagccagtcagtccgttcggtcagcagtcccaacgtgcctgcccttgagagtggctacacccagatcagcccagaacaaggatccctgtccgcaccctctatgcagaacatggagaccagccccatgatggatgtgccttccgtatcagaccactctcagcaggtggtggacagcggcttcagtgacctgggcagcattgagagcaccactgaaaactatgagaacccaagcagttacgactccacgatgggcggcagcatctgtgggaacagctcttcccagagcagctgctcctacggtgggctgtcgtcctccagcagcctcacccagagcagctgtgtggtcactcagcagatggccagcatgggcagcagctgcagcatgatgcagcagagcagcgtccagcctgctgccaactgcagcatcaagtcacctcagagctgcgtggtggagaggcctcccagtaaccagcagcagcagccgccaccaccgcctccacagcagccacagccgccgccgccacaaccacaaccagcaccacagcctccaccaccccagcagcagccgcaacagcagccgcagcctcagccccagcagcctccacccccaccccctccccagcagcagcccccgctgtcacagtgtagtatgaataacagtttcaccccagctcctatgatcatggagataccagaatctggaagcactgggaacataagtatctatgagaggattccaggggattttggtgccggcagctactctcaaccatcagccaccttcagcctagccaagctgcagcagctgaccaacaccattatggaccctcatgccatgccttatagccattctcctgctgtgacttcctatgcaaccagtgtttctctgtccaatacaggactggctcagctggctccatctcatcccttagctgggactcctcaagcacaagccaccatgacgccacccccaaacttggcatccactaccatgaacctcacatctcctctgcttcagtgcaacatgtctgccaccaacattggcattcctcacacgcagagattgcaagggcaaatgccagtgaaggggcacatttccatccgctccaagtctgcgccactgccctctgcggctgctcaccagcagcagctgtatggccgtagcccatcggcagttgccatgcaggctggccctcgcgcactggctgttcagcgtggcatgaacatgggggttaatctgatgcctactcccgcctataatgtcaattccatgaatatgaacaccttgaatgccatgaacagctatcgaatgacacagcccatgatgaacagcagttaccatagtaaccctgcctacatgaaccagacagcacagtatcctatgcagatgcagatgggaatgatggggagccaggcctatacccagcagcctatgcagcctaaccctcatgggaacatgatgtacacaggcccctcccatcacagctacatgaacgctgctggcgtgcccaagcagtcactcaacggaccttacatgagaagatgagcaagatgaacttgcaatcaaaaacttaaatatatataaataaaggaaccttttatactgacaaaccagagaaaaatggacctttttccagttaaaatattgctgtagatttagaggaatttttctttggtttattttattttttagaaaacctgatcttctcttttttttgggttcattttgttgtgggttttggttttcttcacaatcttgaacattttacagtagaactcatctaaaaatggatttggggatggggaaacatgcacaaaatcttttcataattaaaaagagccttactttctttacataccacatggacagaatttgtgtaaaagtgaattatctttattttaaaatgtatgtttcccctcactgtttgcagctcccaatgttgtcatttttaaatgttatatacatctcaagggttaaccagaccctttcctccaaacccaacctttcatttcctacttcattccagcaggaggcacttaggggagactcggatggggacatggagaacaacccaagctccttaaacttattattattgttaatattattattattattattaataaagtgaggcaggaaaatgcttctccttttaaaatcccctccactcctcacacacacacacctcttgaaacccttccccaagaatgtttctttatagacggacttcattgaaatctttgttgttcttgaatcaagtgtaatataatttttttcttcttttttaaaatattcccactcagcactcagagacacaaaaatactgtaagtctcaattaacagcagaatctcagagaaaagctgtttgcaatccaaatccagcctttggaggaatagagatggtcaattaacaatcaaaaagaggagattaacctcttgtttttttaccacctggtgaatcagccataacgcacacacacgccacccagcctcttgtttctagtatgtactttgaaatgctaactgagggtcttgatgcttgagcctttgactgataaaactcaaatagcagtccccagtgatttgcctcttaggttctttcttaaattgttggtggatgactgtacattttagtgatttgaaaaataactgacaaaccattgaaacagtttattttatgttggaagagatggcgcagatgtgtgtcagaagggagatcacggtgtgagtttcgtagctatttaagtgatacatacctctagtttttgtatgtcttttgagatcctgagttcatcccctgtgaatcagagtgcacaagcacctctcctgtgagtggctaatgagaagagggacagaccgaccaccagcacagtagggcagatctggacagcagaatgttataacgcaagttcatgtgttgctcccaactccattctcttttctctcgtgcaaccagtttgcccattctcttcctattacttgctccagggataggtaaaaaaaaaa

SEQ ID NO: 585 - protein, 2000 aa, Homo sapien
MVKLANPLYTEWILEAIKKVKKQKQRPSEERICNAVSSSHGLDRKTVLEQLELSVKDGTILKVSNKGLNSYKDPDNPGRIALPKPRNHGKLDNKQNVDWNKLIKRAVEGLAESGGSTLKSIERFLKGQKDVSALFGGSAASGFHQQLRLAIKRAIGHGRLLKDGPLYRLNTKATNVDGKESCESLSCLPPVSLLPHEKDKPVAEPIPICSFCLGTKEQNREKKPEELISCADCGNSGHPSCLKFSPELTVRVKALRWQCIECKTCSSCRDQGKNADNMLFCDSCDRGFHMECCDPPLTRMPKGMWICQICRPRKKGRKLLQKKAAQIKRRYTNPIGRPKNRLKKQNTVSKGPFSKVRTGPGRGRKRKITLSSQSASSSSEEGYLERIDGLDFCRDSNVSLRFNKKTKGLIDGLTKFFTPSPDGRKARGEVVDYSEQYRIRKRGNRKSSTSDWPTDNQDGWDGKQENEERLFGSQEIMTEKDMELFRDIQEQALQKVGVTGPPDPQVRCPSVIEFGKYEIHTWYSSPYPQEYSRLPKLYLCEFCLKYMKSRTILQQHMKKCGWFHPPANEIYRKNNISVFEVDGNVSTIYCQNLCLLAKLFLDHKTLYYDVEPFLFYVLTQNDVKGCHLVGYFSKEKHCQQKYNVSCIMILPQYQRKGYGRFLIDFSYLLSKREGQAGSPEKPLSDLGRLSYMAYWKSVILECLYHQNDKQISIKKLSKLTGICPQDITSTLHHLRMLDFRSDQFVIIRREKLIQDHMAKLQLNLRPVDVDPECLRWTPVIVSNSVVSEEEEEEAEEGENEEPQCQERELEISVGKSVSHENKEQDSYSVESEKKPEVMAPVSSTRLSKQVLPHDSLPANSQPSRRGRWGRKNRKTQERFGDKDSKLLLEETSSAPQEQYGECGEKSEATQEQYTESEEQLVASEEQPSQDGKPDLPKRRLSEGVEPWRGQLKKSPEALKCRLTEGSERLPRRYSEGDRAVLRGFSESSEEEEEPESPRSSSPPILTKPTLKRKKPFLHRRRRVRKRKHHNSSVVTETISETTEVLDEPFEDSDSERPMPRLEPTFEIDEEEEEEDENELFPREYFRRLSSQDVLRCQSSSKRKSKDEEEDEESDDADDTPILKPVSLLRKRDVKNSPLEPDTSTPLKKKKGWPKGKSRKPIHWKKRPGRKPGFKLSREIMPVSTQACVIEPIVSIPKAGRKPKIQESEETVEPKEDMPLPEERKEEEEMQAEAEEAEEGEEEDAASSEVPAASPADSSNSPETETKEPEVEEEEEKPRVSEEQRQSEEEQQELEEPEPEEEEDAAAETAQNDDHDADDEDDGHLESTKKKELEEQPTREDVKEEPGVQESFLDANMQKSREKIKDKEETELDSEEEQPSHDTSVVSEQMAGSEDDHEEDSHTKEELIELKEEEEIPHSELDLETVQAVQSLTQEESSEHEGAYQDCEETLAACQTLQSYTQADEDPQMSMVEDCHASEHNSPISSVQSHPSQSVRSVSSPNVPALESGYTQISPEQGSLSAPSMQNMETSPMMDVPSVSDHSQQVVDSGFSDLGSIESTTENYENPSSYDSTMGGSICGNSSSQSSCSYGGLSSSSSLTQSSCVVTQQMASMGSSCSMMQQSSVQPAANCSIKSPQSCVVERPPSNQQQQPPPPPPQQPQPPPPQPQPAPQPPPPQQQPQQQPQPQPQQPPPPPPPQQQPPLSQCSMNNSFTPAPMIMEIPESGSTGNISIYERIPGDFGAGSYSQPSATFSLAKLQQLTNTIMDPHAMPYSHSPAVTSYATSVSLSNTGLAQLAPSHPLAGTPQAQATMTPPPNLASTTMNLTSPLLQCNMSATNIGIPHTQRLQGQMPVKGHISIRSKSAPLPSAAAHQQQLYGRSPSAVAMQAGPRALAVQRGMNMGVNLMPTPAYNVNSMNMNTLNAMNSYRMTQPMMNSSYHSNPAYMNQTAQYPMQMQMGMMGSQAYTQQPMQPNPHGNMMYTGPSHHSYMNAAGVPKQSLNGP

SEQ ID NO: 586 - DNA, 4425 bp, Homo sapien
gcgcgcgtggggctccattccgcggtgctgggtctccgtgccggggtgggtgctcgtgtgtgcgcttctcctccccatcccccttcccccaagaataaaagaagaaccgggaggcgtgctcagaaaataaataaataaccaccacacacgcgcagcccggagcgagtcggcggggctggcggcagcggcggaggaggagtgaaggcggcggcggcggaggagggacgcgcggaaaaggcagcaactttaaagccagctcagagcctagacctccagccgagcggtttgcagcgcggcggcggcggcggcggcggcggcggcggcgttgagtgtctggcccgccggtccggtcggggtgtgcagtcggacggacgagcagcgcgtcgctgtcctccggcagctggagatgtccgagcccaaggcaattgatcccaagttgtcgacgaccgacagggtggtgaaagctgttccatttcctccaagtcaccggcttacagcaaaagaagtgtttgataatgatggaaaacctcgtgtggatatcttaaaggcgcatcttatgaaggagggaaggctggaagagagtgttgcattgagaataataacagagggtgcatcaattcttcgacaggaaaaaaatttgctggatattgatgcgccagtcactgtttgtggggacattcatggacaattctttgatttgatgaagctctttgaagtcgggggatctcctgccaacactcgctacctcttcttaggggactatgttgacagagggtacttcagtattgaatgtgtgctgtatttgtgggccttgaaaattctctaccccaaaacactgtttttacttcgtggaaatcatgaatgtagacatctaacagagtatttcacatttaaacaagaatgtaaaataaagtattcagaacgcgtatatgatgcctgtatggatgcctttgactgccttcccctggctgccctgatgaaccaacagttcctgtgtgtgcatggtggtttgtctccagagattaacactttagatgatatcagaaaattagaccgattcaaagaaccacctgcatatggacctatgtgtgatatcctgtggtcagaccccctggaagattttggaaatgagaagactcaggaacatttcactcacaacacagtcagggggtgttcatacttctacagttacccggctgtatgtgaattcttacagcacaataacttgttatctatactccgagcccacgaagcccaagatgcagggtaccgcatgtacaggaaaagccaaacaacaggcttcccttctctaattacaattttttcagcaccaaattacttagatgtatacaataacaaagctgcagtattgaagtatgagaacaatgttatgaatatcaggcaattcaactgttctcctcatccatactggcttccaaatttcatggatgtttttacttggtcccttccatttgttggggaaaaagtgactgagatgctggtaaatgtcctcaacatctgctcagatgatgaactagggtcagaagaagatggatttgatggtgcaacagctgcagcccggaaagaggtgataaggaacaagatccgagcaataggcaaaatggccagagtgttctcagtgctcagagaagagagtgagagtgtgctgacgctgaaaggcttgaccccaactggcatgctccccagcggagtactttctggagggaagcaaaccctgcaaagcgctactgttgaggctattgaggctgatgaagctatcaaaggattttcaccacaacataagatcactagcttcgaggaagccaagggcttagaccgaattaatgagaggatgccgcctcgcagagatgccatgccctctgacgccaaccttaactccatcaacaaggctctcacctcagagactaacggcacggacagcaatggcagtaatagcagcaatattcagtgaccacttcctgttcacttttttttttttttttttttttttttgagctgcggggcatgatggggattgctgcatatcagcagttggatgttcttgcctctgacagtagcttatttgctctgggggccaggaattggattcagtttacactatcattaaaaaagagggagagagataataaactatattttggtggggatggtgattaaacacctcttttgggtatgccttttaaaaatgcttatagagaaaaaaattttaaaaagaaagctaatgctagtatatactgcaatgttaggggaatgaacatgttttcctactgcattggggacttctagataggttaatgaaaggccttttattctgttactggacatgaaaactttgtctaatttcttactctattgtacgtttacagtcgcagcactaaaaatggatgacatcaaacatttttaacaaaatgatgtacaaactaaggactatttattgataatgttttgctactcttgtcagacaatggctataaactgaattaggcagtcttaaaaaaaaaaaaaaaacagaaaaagaaaaaaaagaacgttgcaaatttgttaaaatgccaaaaaggacagtttaattttgtacagattatgcttacctcaggtttctttagtgtgcttgaatgcccttctttccatataacacttatcttcttcttaattcggcaatggaatatcttttaagttttaaaaaaactggaataattatatctatcttttttgccgtttatatttaggggtttttgttgataaaatcaagtcttggttgtggcttgctgaattaaatatttatgagtggtgcatttttaagtatagtgaacaagacaccatattaagtacagtgataaagcatctatattctgtaaaaaaaaaaaaaatctgcctatgcatgttttttaagaaaaaaaaaatggctgtatcggcctgtatgggactgtaatgcgcttagtggtctgacatatactggaaatgtatgtatactggcgtactttatattctctaaaatgcttaatgcctttgaaattttgtaatcaaaaaaaagctttgaaaaaatctaaaggggagagtattctttaaagtttttaacataagcttgtcaatgcacatgtagatggttagcatgtttagcaaaccttgtgaaattataataagtttgtagttacatgtgaaactctaaatgcatggcaactgttaatgtcataacagtttagttattttgttctgttctgtcatgtgccacaaaatatgtacttttttcacttttttccctttgtatatcagttacgggttacaactggttcattctgaaaacaacaacaacaaaagtccattcatattttttaacaattgtataagtgcccaagtaattcactacagcctaaagccttgcctttgtaatttgacttctgacatgttggcaatcaaagcatgcacttgtaacaatgaaaaagaaaaagcattttatattactactcaataaaatgtgcatgaacttacagaattctcatccttccactgagtccgctgaagggatttatgtgcacaaccaccatgtgtcttctaggtgctggcccaccaccacacatcacaggctgatttccacaggcttcttcctaggggcctcgtgatctgaggggtggtgcctacttccactgtaagaaagaatcttggtggatttgtgtctcaaatcagataagagaagcctgtttaaagagcagatgccatcttctggcttcctcaaggagccagttaaaaaaccagagcattcctttttattgaaaaataaaattaatttgttatcaggttgtttcagttgtattggatgccctatctatctgctaaagcaaaaagtactaggctactaagtgcattttcatcacagaaaagagttgcatttgtattaacaagaaatttgtatacccacgcttcagctactatctaatcatcacccgaagatttaagatacaccaaatttcagtttgtttgtaacattgttcatctttagtgcactttgttttatataataaagtatgcctgttatattaaataataagaatatggcaattagcgatatagcatacccaaacaaagatgttctcgatacagtctggcaaagactatcccaaggttattttaatgaattcagacattttttcctgtggatatttctccatcctaaaaaaagtggcaaccaaggaaaatatttagatgcaacttactagagtgatgatgtgaaagaaatggtgattctggtatcatggtgtttattttctttcttataactgcagagaaaatatcctgactaaaaaaatttcatttttttggattcctttcttttacaaattgtgctgaggcaactatggcatagaaataaacatttgacattaaaataagtaaaaaaaaaaaaaaaaaaaa

SEQ ID NO: 587 - protein, 521 aa, Homo sapien
MSEPKAIDPKLSTTDRVVKAVPFPPSHRLTAKEVFDNDGKPRVDILKAHLMKEGRLEESVALRIITEGASILRQEKNLLDIDAPVTVCGDIHGQFFDLMKLFEVGGSPANTRYLFLGDYVDRGYFSIECVLYLWALKILYPKTLFLLRGNHECRHLTEYFTFKQECKIKYSERVYDACMDAFDCLPLAALMNQQFLCVHGGLSPEINTLDDIRKLDRFKEPPAYGPMCDILWSDPLEDFGNEKTQEHFTHNTVRGCSYFYSYPAVCEFLQHNNLLSILRAHEAQDAGYRMYRKSQTTGFPSLITIFSAPNYLDVYNNKAAVLKYENNVMNIRQFNCSPHPYWLPNFMDVFTWSLPFVGEKVTEMLVNVLNICSDDELGSEEDGFDGATAAARKEVIRNKIRAIGKMARVFSVLREESESVLTLKGLTPTGMLPSGVLSGGKQTLQSATVEAIEADEAIKGFSPQHKITSFEEAKGLDRINERMPPRRDAMPSDANLNSINKALTSETNGTDSNGSNSSNIQ

SEQ ID NO: 588 - DNA, 2077 bp, Homo sapien
ccgagcgccagcgcggggaaccgggaaaaggaaaccgtgttgtgtacgtaagattcaggaaacgaaaccaggagccgcgggtgttggcgcaaaggttactcccagacccttttccggctgacttctgagaaggttgcgcacagctgtgcccggcagtctagaggcgcagaagaggaagccatcgcctggccccggctctctggaccttgtctcgctcgggagcggaaacagcggcagccagagaactgttttaatcatggacaaacaaaactcacagatgaatgcttctcacccggaaacaaacttgccagttgggtatcctcctcagtatccaccgacagcattccaaggacctccaggatatagtggctaccctgggccccaggtcagctacccacccccaccagccggccattcaggtcctggcccagctggctttcctgtcccaaatcagccagtgtataatcagccagtatataatcagccagttggagctgcaggggtaccatggatgccagcgccacagcctccattaaactgtccacctggattagaatatttaagtcagatagatcagatactgattcatcagcaaattgaacttctggaagttttaacaggttttgaaactaataacaaatatgaaattaagaacagctttggacagagggtttactttgcagcggaagatactgattgctgtacccgaaattgctgtgggccatctagaccttttaccttgaggattattgataatatgggtcaagaagtcataactctggagagaccactaagatgtagcagctgttgttgtccctgctgccttcaggagatagaaatccaagctcctcctggtgtaccaataggttatgttattcagacttggcacccatgtctaccaaagtttacaattcaaaatgagaaaagagaggatgtactaaaaataagtggtccatgtgttgtgtgcagctgttgtggagatgttgattttgagattaaatctcttgatgaacagtgtgtggttggcaaaatttccaagcactggactggaattttgagagaggcatttacagacgctgataactttggaatccagttccctttagaccttgatgttaaaatgaaagctgtaatgattggtgcctgtttcctcattgacttcatgttttttgaaagcactggcagccaggaacaaaaatcaggagtgtggtagtggattagtgaaagtctcctcaggaaatctgaagtctgtatattgattgagactatctaaactcatacctgtatgaattaagctgtaaggcctgtagctctggttgtatacttttgcttttcaaattatagtttatcttctgtataactgatttataaaggtttttgtacattttttaatactcattgtcaatttgagaaaaaggacatatgagtttttgcatttattaatgaaacttcctttgaaaaactgctttgaattatgatctctgattcattgtccattttactaccaaatattaactaaggccttattaatttttatataaattatatcttgtcctattaaatctagttacaatttatttcatgcataagagctaatgttattttgcaaatgccatatattcaaaaaagctcaaagataattttctttactattatgttcaaataatattcaatatgcatattatctttaaaaagttaaatgtttttttaatcttcaagaaatcatgctacacttaacttctcctagaagctaatctataccataatattttcatattcacaagatattaaattaccaattttcaaattattgttagtaaagaacaaaatgattctctcccaaagaaagacacattttaaatactccttcactctaaaactctggtattataacttttgaaagttaatatttctacatgaaatgtttagctcttacactctatccttcctagaaaatggtaattgagattactcagatattaattaaatacaatatcatatatatattcacagagtataaacctaaataatgatctattagattcaaatatttgaaataaaaacttgatttttttgt

SEQ ID NO: 589 - protein, 318 aa, Homo sapien
MDKQNSQMNASHPETNLPVGYPPQYPPTAFQGPPGYSGYPGPQVSYPPPPAGHSGPGPAGFPVPNQPVYNQPVYNQPVGAAGVPWMPAPQPPLNCPPGLEYLSQIDQILIHQQIELLEVLTGFETNNKYEIKNSFGQRVYFAAEDTDCCTRNCCGPSRPFTLRIIDNMGQEVITLERPLRCSSCCCPCCLQEIEIQAPPGVPIGYVIQTWHPCLPKFTIQNEKREDVLKISGPCVVCSCCGDVDFEIKSLDEQCVVGKISKHWTGILREAFTDADNFGIQFPLDLDVKMKAVMIGACFLIDFMFFESTGSQEQKSGVW

SEQ ID NO: 590 - DNA, 2121 bp, Homo sapien
ctgctcgcggccgccaccgccgggccccggccgtccctggctcccctcctgcctcgagaagggcagggcttctcagaggcttggcgggaaaaaagaacggagggagggatcgcgctgagtataaaagccggttttcggggctttatctaactcgctgtagtaattccagcgagaggcagagggagcgagcgggcggccggctagggtggaagagccgggcgagcagagctgcgctgcgggcgtcctgggaagggagatccggagcgaatagggggcttcgcctctggcccagccctcccgcttgatcccccaggccagcggtccgcaacccttgccgcatccacgaaactttgcccatagcagcgggcgggcactttgcactggaacttacaacacccgagcaaggacgcgactctcccgacgcggggaggctattctgcccatttggggacacttccccgccgctgccaggacccgcttctctgaaaggctctccttgcagctgcttagacgctggatttttttcgggtagtggaaaaccagcagcctcccgcgacgatgcccctcaacgttagcttcaccaacaggaactatgacctcgactacgactcggtgcagccgtatttctactgcgacgaggaggagaacttctaccagcagcagcagcagagcgagctgcagcccccggcgcccagcgaggatatctggaagaaattcgagctgctgcccaccccgcccctgtcccctagccgccgctccgggctctgctcgccctcctacgttgcggtcacacccttctcccttcggggagacaacgacggcggtggcgggagcttctccacggccgaccagctggagatggtgaccgagctgctgggaggagacatggtgaaccagagtttcatctgcgacccggacgacgagaccttcatcaaaaacatcatcatccaggactgtatgtggagcggcttctcggccgccgccaagctcgtctcagagaagctggcctcctaccaggctgcgcgcaaagacagcggcagcccgaaccccgcccgcggccacagcgtctgctccacctccagcttgtacctgcaggatctgagcgccgccgcctcagagtgcatcgacccctcggtggtcttcccctaccctctcaacgacagcagctcgcccaagtcctgcgcctcgcaagactccagcgccttctctccgtcctcggattctctgctctcctcgacggagtcctccccgcagggcagccccgagcccctggtgctccatgaggagacaccgcccaccaccagcagcgactctgaggaggaacaagaagatgaggaagaaatcgatgttgtttctgtggaaaagaggcaggctcctggcaaaaggtcagagtctggatcaccttctgctggaggccacagcaaacctcctcacagcccactggtcctcaagaggtgccacgtctccacacatcagcacaactacgcagcgcctccctccactcggaaggactatcctgctgccaagagggtcaagttggacagtgtcagagtcctgagacagatcagcaacaaccgaaaatgcaccagccccaggtcctcggacaccgaggagaatgtcaagaggcgaacacacaacgtcttggagcgccagaggaggaacgagctaaaacggagcttttttgccctgcgtgaccagatcccggagttggaaaacaatgaaaaggcccccaaggtagttatccttaaaaaagccacagcatacatcctgtccgtccaagcagaggagcaaaagctcatttctgaagaggacttgttgcggaaacgacgagaacagttgaaacacaaacttgaacagctacggaactcttgtgcgtaaggaaaagtaaggaaaacgattccttctaacagaaatgtcctgagcaatcacctatgaacttgtttcaaatgcatgatcaaatgcaacctcacaaccttggctgagtcttgagactgaaagatttagccataatgtaaactgcctcaaattggactttgggcataaaagaacttttttatgcttaccatcttttttttttctttaacagatttgtatttaagaattgtttttaaaaaattttaa

SEQ ID NO: 591 - protein, 439 aa, Homo sapien
MPLNVSFTNRNYDLDYDSVQPYFYCDEEENFYQQQQQSELQPPAPSEDIWKKFELLPTPPLSPSRRSGLCSPSYVAVTPFSLRGDNDGGGGSFSTADQLEMVTELLGGDMVNQSFICDPDDETFIKNIIIQDCMWSGFSAAAKLVSEKLASYQAARKDSGSPNPARGHSVCSTSSLYLQDLSAAASECIDPSVVFPYPLNDSSSPKSCASQDSSAFSPSSDSLLSSTESSPQGSPEPLVLHEETPPTTSSDSEEEQEDEEEIDVVSVEKRQAPGKRSESGSPSAGGHSKPPHSPLVLKRCHVSTHQHNYAAPPSTRKDYPAAKRVKLDSVRVLRQISNNRKCTSPRSSDTEENVKRRTHNVLERQRRNELKRSFFALRDQIPELENNEKAPKVVILKKATAYILSVQAEEQKLISEEDLLRKRREQLKHKLEQLRNSCA

SEQ ID NO: 592 - DNA, 5128 bp, Homo sapien
actctggagtgggagtgggagcgagcgcttctgcgactccagttgtgagagccgcaagggcatgggaattgacgccactcaccgacccccagtctcaatctcaacgctgtgaggaaacctcgactttgccaggtccccaagggcagcggggctcggcgagcgaggcacccttctccgtccccatcccaatccaagcgctcctggcactgacgacgccaagagactcgagtgggagttaaagcttccagtgagggcagcaggtgtccaggccgggcctgcgggttcctgttgacgtcttgccctaggcaaaggtcccagttccttctcggagccggctgtcccgcgccactggaaaccgcacctccccgcagcatgggcaccagcctcagcccgaacgacccttggccgctaaacccgctgtccatccagcagaccacgctcctgctactcctgtcggtgctggccactgtgcatgtgggccagcggctgctgaggcaacggaggcggcagctccggtccgcgcccccgggcccgtttgcgtggccactgatcggaaacgcggcggcggtgggccaggcggctcacctctcgttcgctcgcctggcgcggcgctacggcgacgttttccagatccgcctgggcagctgccccatagtggtgctgaatggcgagcgcgccatccaccaggccctggtgcagcagggctcggccttcgccgaccggccggccttcgcctccttccgtgtggtgtccggcggccgcagcatggctttcggccactactcggagcactggaaggtgcagcggcgcgcagcccacagcatgatgcgcaacttcttcacgcgccagccgcgcagccgccaagtcctcgagggccacgtgctgagcgaggcgcgcgagctggtggcgctgctggtgcgcggcagcgcggacggcgccttcctcgacccgaggccgctgaccgtcgtggccgtggccaacgtcatgagtgccgtgtgtttcggctgccgctacagccacgacgaccccgagttccgtgagctgctcagccacaacgaagagttcgggcgcacggtgggcgcgggcagcctggtggacgtgatgccctggctgcagtacttccccaacccggtgcgcaccgttttccgcgaattcgagcagctcaaccgcaacttcagcaacttcatcctggacaagttcttgaggcactgcgaaagccttcggcccggggccgccccccgcgacatgatggacgcctttatcctctctgcggaaaagaaggcggccggggactcgcacggtggtggcgcgcggctggatttggagaacgtaccggccactatcactgacatcttcggcgccagccaggacaccctgtccaccgcgctgcagtggctgctcctcctcttcaccaggtatcctgatgtgcagactcgagtgcaggcagaattggatcaggtcgtggggagggaccgtctgccttgtatgggtgaccagcccaacctgccctatgtcctggccttcctttatgaagccatgcgcttctccagctttgtgcctgtcactattcctcatgccaccactgccaacacctctgtcttgggctaccacattcccaaggacactgtggtttttgtcaaccagtggtctgtgaatcatgacccagtgaagtggcctaacccggagaactttgatccagctcgattcttggacaaggatggcctcatcaacaaggacctgaccagcagagtgatgattttttcagtgggcaaaaggcggtgcattggcgaagaactttctaagatgcagctttttctcttcatctccatcctggctcaccagtgcgatttcagggccaacccaaatgagcctgcgaaaatgaatttcagttatggtctaaccattaaacccaagtcatttaaagtcaatgtcactctcagagagtccatggagctccttgatagtgctgtccaaaatttacaagccaaggaaacttgccaataagaagcaagaggcaagctgaaattttagaaatattcacatcttcggagatgaggagtaaaattcagtttttttccagttcctcttttgtgctgcttctcaattagcgtttaaggtgagcataaatcaactgtccatcaggtgaggtgtgctccatacccagcggttcttcatgagtagtgggctatgcaggagcttctgggagatttttttgagtcaaagacttaaagggcccaatgaattattatatacatactgcatcttggttatttctgaaggtagcattctttggagttaaaatgcacatatagacacatacacccaaacacttacaccaaactactgaatgaagaagtattttggtaaccaggccatttttggtgggaatccaagattggtctcccatatgcagaaatagacaaaaagtatattaaacaaagtttcagagtatattgttgaagagacagagacaagtaatttcagtgtaaagtgtgtgattgaaggtgataagggaaaagataaagaccagaaattcccttttcaccttttcaggaaaataacttagactctagtatttatgggtggatttatccttttgccttctggtatacttccttacttttaaggataaatcataaagtcagttgctcaaaaagaaatcaatagttgaattagtgagtatagtggggttccatgagttatcatgaattttaaagtatgcattattaaattgtaaaactccaaggtgatgttgtacctcttttgcttgccaaagtacagaatttgaattatcagcaaagaaaaaaaaaaaagccagccaagctttaaattatgtgaccataatgtactgatttcagtaagtctcataggttaaaaaaaaaagtcaccaaatagtgtgaaatatattacttaactgtccgtaagcagtatattagtattatcttgttcaggaaaaggttgaataatatatgccttgtgtaatattgaaaattgaaaagtacaactaacgcaaccaagtgtgctaaaaatgagcttgattaaatcaaccacctatttttgacatggaaatgaagcagggtttcttttcttcactcaaattttggcgaatctcaaaattagatcctaagatgtgttcttatttttataacatctttattgaaattctatttataatacagaatcttgttttgaaaataacctaattaatatattaaaattccaaattcatggcatgcttaaattttaactaaattttaaagccattctgattattgagttccagttgaagttagtggaaatctgaacattctcctgtggaaggcagagaaatctaagctgtgtctgcccaatgaataatggaaaatgccatgaattacctggatgttctttttacgaggtgacaagagttggggacagaactcccattacaactgaccaagtttctcttctagatgattttttgaaagttaacattaatgcctgctttttggaaagtcagaatcagaagatagtcttggaagctgtttggaaaagacagtggagatgaggtcagttgtgttttttaagatggcaattactttggtagctgggaaagcataaagctcaaatgaaatgtatgcattcacatttagaaaagtgaattgaagtttcaagttttaaagttcattgcaattaaacttccaaagaaagttctacagtgtcctaagtgctaagtgcttattacattttattaagctttttggaatctttgtaccaaaattttaaaaaagggagtttttgatagttgtgtgtatgtgtgtgtggggtggggggatggtaagagaaaagagagaaacactgaaaagaaggaaagatggttaaacattttcccactcattctgaattaattaatttggagcacaaaattcaaagcatggacatttagaagaaagatgtttggcgtagcagagttaaatctcaaataggctattaaaaaagtctacaacatagcagatctgttttgtggtttggaatattaaaaaacttcatgtaattttattttaaaatttcatagctgtacttcttgaatataaaaaatcatgccagtatttttaaaggcattagagtcaactacacaaagcaggcttgcccagtacatttaaattttttggcacttgccattccaaaatattatgccccaccaaggctgagacagtgaatttgggctgctgtagcctatttttttagattgagaaatgtgtagctgcaaaaataatcatgaaccaatctggatgcctcattatgtcaaccaggtccagatgtgctataatctgtttttacgtatgtaggcccagtcgtcatcagatgcttgcggcaaaagaaagctgtgtttatatggaagaaagtaaggtgcttggagtttacctggcttatttaatatgcttataacctagttaaagaaaggaaaagaaaacaaaaaacgaatgaaaataactgaatttggaggctggagtaatcagattactgctttaatcagaaaccctcattgtgtttctaccggagagagaatgtatttgctgacaaccattaaagtcagaagttttactccaggttattgcaataaagtataatgtttattaaatgcttcatttgtatgtcaaagctttgactctataagcaaattgcttttttccaaaacaaaaagatgtctcaggtttgttttgtgaattttctaaaagctttcatgtcccagaacttagcctttacctgtgaagtgttactacagccttaatattttcctagtagatctatattagatcaaatagttgcatagcagtatatgttaatttgtgtgtttttagctgtgacacaactgtgtgattaaaaggtatactttagtagacatttataactcaaggataccttcttatttaatcttttcttatttttgtactttatcatgaatgcttttagtgtgtgcataatagctacagtgcatagttgtagacaaagtacattctggggaaacaacatttatatgtagcctttactgtttgatataccaaattaaaaaaaaattgtatctcattacttatactgggacaccattaccaaaataataaaaatcactttcataatcttgaaaaaa

SEQ ID NO: 593 - protein, 543 aa, Homo sapien
MGTSLSPNDPWPLNPLSIQQTTLLLLLSVLATVHVGQRLLRQRRRQLRSAPPGPFAWPLIGNAAAVGQAAHLSFARLARRYGDVFQIRLGSCPIVVLNGERAIHQALVQQGSAFADRPAFASFRVVSGGRSMAFGHYSEHWKVQRRAAHSMMRNFFTRQPRSRQVLEGHVLSEARELVALLVRGSADGAFLDPRPLTVVAVANVMSAVCFGCRYSHDDPEFRELLSHNEEFGRTVGAGSLVDVMPWLQYFPNPVRTVFREFEQLNRNFSNFILDKFLRHCESLRPGAAPRDMMDAFILSAEKKAAGDSHGGGARLDLENVPATITDIFGASQDTLSTALQWLLLLFTRYPDVQTRVQAELDQVVGRDRLPCMGDQPNLPYVLAFLYEAMRFSSFVPVTIPHATTANTSVLGYHIPKDTVVFVNQWSVNHDPVKWPNPENFDPARFLDKDGLINKDLTSRVMIFSVGKRRCIGEELSKMQLFLFISILAHQCDFRANPNEPAKMNFSYGLTIKPKSFKVNVTLRESMELLDSAVQNLQAKETCQ

SEQ ID NO: 594 - DNA, 5128 bp, Homo sapien; identical to SEQ ID NO: 592

SEQ ID NO: 595 - protein, 543 aa, Homo sapien; identical to SEQ ID NO: 593

SEQ ID NO: 596 - DNA, 12177 bp, Homo sapien
gagctcaattaaccctcactaaagggagtcgactcgatctaaaaactagatggcattattgaggagttggacaggcggtcttaggaacaacctcgttttatactttttaaaaataggaatttacttaaaggcaacttccatctgctctcattctggcagaggtattgtgataaaggctttcaggaatgtcaacagctcaggattggcattagctcatagataattcccgtctactaaattaaagtctatgagagattgatgcatgcaccagagtcttgaattattaggcaaggatcttgctaaagctggacatgggaaggttgctatgaaactcatttcaaaggctgtgtaggccaactcacctctgggaaaccaacgcttattattaaaccaatgcaactgctcaaaaactaaaactccatcactatctaagttccccatcatggtgtgtgaaatcatttccagaaaactcttcaaaagataccgaataaaaggcatcacaggccgggcacggtggctcatgcctgtaatcccagcactttgggaggcccaggctggtggatcacctgaggtcaggagtttgagaccagcctggccagcatggtgaaaccccatctctactagaaaaatacaaaaattagccgggtgtggtggtgcgcacctgtaatcccagctacttgggaggctgagccaggagaacctggcaggcggaggttgcagtgagccgagatcacgccattgcactgcagcccaggtgacagagtgagactccatctcaaaaaaaataaataaataaaaataaaaataaaaaaagccatcacgaaaagacatttctttatcaggtcagcaaattgattgctggtttcaatctctcaagaagtcagattctcttcagacactcctttgtgtttctttacaatgtaatcagtcattccagggtcagctatgaggcacactcccctggcctccctcataagcaatttaattgcaaagggttagcatactatttcttctctgctattctcagaattctcaattatgaaaacaaaaacaataattaaaaagttcttccagctgatttttttttttttttttgagacagagtctcacttaaactctgctgcccaggctgtagtgcagtggtgcaatctctgctcactgcaacctctgcctcccacgttcaaccaattctgctgccttcccccctgatccccgagtagctgggattacaggtgtgcaccaccacgtccggctaacttttgtatttttagtagatggggtttcgccatgttggccaggctggtctcgaactcctgacctcaagtgatccgcccgcttaagcctcccaaagtgctgggattacaggcgtgagccactgcgcctagccccacgtgcatttttttttttttaagggaggcaggaaagaaggcatttgggcctcttatctgcaattttcttccgtgtaaacttatgtgaaggatctggagtgggacttggtggcttcaagccctggctccacttcttgatggctgcgcgacctgggttaagtcacgcaacctctctgaaccctagtttattcatctgtaaacaggtcaataatagcacgagattgcagcgcgagtggagctcaaagtgcagggttgtccctggtgaacctatcacttttatatttatcctttgatgaagccagtacaattcctacctggttaaccagatacatcccacctcttccctcgagttcgcccttccccccgcctcgtgaagtccttgttctcttagctgtcttgaaaatcctatgcatcagcatgtaggaaagggcgcgccaggcgggggaagccacccccgcccgagcgcctccggttcccttataaagggagggcccccttcgcgaccgcaagcgcgcccaggaagaccacagagccgccggtgcgcacggaggtggcgatacgcgcccgggctcggcctgcgggtggtggcccaagcgtccgcctcgctggcctggcaggcgcgactgtgcgtgcgcagccgagggtggtggcggccggcaccccacgccaagggtggtggtggccggcaccccaccctcggccgccgcctccgcgtgtcaggtgccgtgagaagcgcgggaggagcggccgcaggcagcgcccagggatatgactggagccgactttccagaagcggcgcacgcaaagcccagctccgcacgcaaaggggaggcgacacgagaaacttcaacccgataaagttcgccggagcgcggagattcgcctcctcctgccactctccgccccgctcgggtcccgccccgctagctcccccaggcccccccagtcgccccagcttggctccccgccctgcgccaacggcttccatcgcagcctgggcggccccgcgcccaccagcgggcggcgccacctggagtggcctctacgcgggaaatctcagggccagctgcgccccaggagcctttgtgtgcccaagcactgtcggggccccggggcgggggagcggctacttttagggattcctgatctcgccgcaagaactggaaaaaatttagcatgccaaagagcctccactgaggtggcaatttgtttgcgagaacctaagataaaatttaaacaaccaaccaggggcgctgtgaggcaaaccgctgccactacactggctttccgggaagcaagctcaagccgcggagagggaagggaggtcgtgcgctcggggcggggcgcgctcccaagtcgagcgcagcggccggggcaggttgtaccgagcgtggttctggggacaccgtgcggccttgattggaggtggctgtgatgaagcgcggttaccgcacaatggaaacgtgggcacctccgctcccatgaaagcctgctggtagagctccgaggccggccggtgcgcctggacgggagtccgggtcaaagcggcctggtgtgcggcgcgccccgccccccgcaggccccgccctgccaggtcgcgctgccctccttctacccagtccttaaaacccggaggagcgggatggcgcgctttgactctggagtgggagtgggagcgagcgcttctgcgactccagttgtgagagccgcaagggcatgggaattgacgccactcaccgacccccagtctcaatctcaacgctgtgaggaaacctcgactttgccaggtccccaagggcagcggggctcggcgagcgaggcacccttctccgtccccatcccaatccaagcgctcctggcactgacgacgccaagagactcgagtgggagttaaagcttccagtgagggcagcaggtgtccaggccgggcctgcgggttcctgttgacgtcttgccctaggcaaaggtcccagttccttctcggagccggctgtcccgcgccactggaaaccgcacctccccgcaggtcagtctgtctgccgaggcgctgcccggcgacctcttcagatggattattacaggtagcgggtggcgtggtaggtactttaaaggaaatcaagcgccaccgcctcgatgcccgcagcgttgtccccaaattgcaggaaccgttacgcgccttgcggggaggggaagggtttggcgctgggttacagcgaggtggaaacacgccccttctcttctccaagggagagtgggttggggatgggaaggggcgtcttcggccatttctccagagagtcagctccgacctctccacccaacggcactcagtccccagaggctggggtaggggcgtggggcgcccgctcctgtctctgcacccctgagtgtcacgccttctcctttctgtccccagcatgggcaccagcctcagcccgaacgacccttggccgctaaacccgctgtccatccagcagaccacgctcctgctactcctgtcggtgctggccactgtgcatgtgggccagcggctgctgaggcaacggaggcggcagctccggtccgcgcccccgggcccgtttgcgtggccactgatcggaaacgcggcggcggtgggccaggcggctcacctctcgttcgctcgcctggcgcggcgctacggcgacgttttccagatccgcctgggcagctgccccatagtggtgctgaatggcgagcgcgccatccaccaggccctggtgcagcagggctcggccttcgccgaccggccggccttcgcctccttccgtgtggtgtccggcggccgcagcatggctttcggccactactcggagcactggaaggtgcagcggcgcgcagcccacagcatgatgcgcaacttcttcacgcgccagccgcgcagccgccaagtcctcgagggccacgtgctgagcgaggcgcgcgagctggtggcgctgctggtgcgcggcagcgcggacggcgccttcctcgacccgaggccgctgaccgtcgtggccgtggccaacgtcatgagtgccgtgtgtttcggctgccgctacagccacgacgaccccgagttccgtgagctgctcagccacaacgaagagttcgggcgcacggtgggcgcgggcagcctggtggacgtgatgccctggctgcagtacttccccaacccggtgcgcaccgttttccgcgaattcgagcagctcaaccgcaacttcagcaacttcatcctggacaagttcttgaggcactgcgaaagccttcggcccggggccgccccccgcgacatgatggacgcctttatcctctctgcggaaaagaaggcggccggggactcgcacggtggtggcgcgcggctggatttggagaacgtaccggccactatcactgacatcttcggcgccagccaggacaccctgtccaccgcgctgcagtggctgctcctcctcttcaccaggtaaagcctctgggaggcgtgggccaggtcttttctcctctgaaaaaggcggagtagagacagaatatgctgagtttgcaagcagggccccgggtttggggtttcgctccaggtccccacccctcaaaaccaagatcgcgtcggtaaagggactcacagtgagggctgcgacacgcacgcgccccacccagcggtgccccgacccctccggtctcctatcttgtctctatcgtcccctcccctgcttgcgagtgagaacacatttgcaaagacccctccaccccccgggaaaaacaagagtttttaaatgcttggagatgagccctgatatctctctccctggcgcattacaatcagaactggaatagttccgaaagaaaaggtaatgtcataaatatgttaaacacagcagcctctcctaggctagtcctcggcgtgcatccgaggccgcccagccctggcgctaaaagcgggccgcccgtcagggctttgttccaggccaaggaagcccatggaggccgggccagccgacaggtaacccgcacagaaactttcagaaggcggccacaactagcgggcagcgctaggtttataaaacctccgcgctaggagtttgagaaatgccggggtagaagacaagaagcagtcacttttacgaaagcagagtagcattcagaaaggcagatgggatatccaggaggcgcctgcagacgtttctggcccctgcgcttggctcagttagcggaccccctgatgcccacgttggtctctactaagcacggattcaacaggtccctggtgtcgggttgccagatttggcaaaagaaaagtaagttttacacgggaatactcacactaaaagattagcccttgttgatctgaaatccatatttaactgggcggcctgtagtatttactgtggaaacactatccctaggggcaaatgtttcgcaaggcaaattttgattgccgaagagaccagaaatcctggttttgtgtcatttcttggagcacaagtgagcagttggagatgctgaatctgcaggcgccacagaaaggtgtttggaaggcagagaatgactctttccttattaaaatccactgcaatctatatttccttagatactgtacagctaccttcacaaattaaaagtttctgtatacttaaaatggctttttagtattaaaatcatagaaacacccatggtgggtgagggagaggcagaaatcgaataaagaaaagtcaaccagagatcagggaaaaggaaatcccggaataggttccataggtttttgtgcatccgcagataggcattttaacttttgaaacggcctttgtttttcattagaaccacaatagttctccgagtactccaattaggcggcaaaaagaaataaaacaatttggaggtcactttcaattcaatatgctgatacttttttttcctttttagtgaaaagacgtatgacagggcttggcaaattacacgatctgtttttgtatatacgttttattgacgcagtcatgcccattcatttatacattgtcgatggctgcgttcactctacaacacaaggcagagcagagtagtgcaacaaagagggtttggtccacaaagtctaaaatagatactctctggctctccccaccatacatgtttctatgaaaaaagttggcagactcctgcaatataatgttgaagaagcgattctaaaaataactccacttcatcacatacgtgtatacattttttttcggagttgcaaacaatcagttacttgttttttgacttctaacactttgactcaaggtagtggacatttctaatcttttaatatttattttggtaatttttgatggctatatagtattttgctatgataatgtatagttatatataatcatttattgaactttaatgttggtcattggccttgattgcatttttaaaatttttattttaattttatgtatttacttaccttagagacagggtctcactaccttacccaggctggtcccaaactcctgggctcaagcagttctcccgccgctgtctggcaggtagctggggctacaggcgtgtaccaccatgcctggctaatttttagaattttaggtcctgttgtggttacatatttttgtatctcttaaattattttctgaaaatacatttctaggcatggattactgggtttaaaatgaggcgggaagaggttaccttcatgtctcttgcctcgtattaagattttgttttttaaaaagattgtatcagtttgtatcatcaacagtgaataagtactacagtttgtaccataattttatgaacattgggtatttgctttcaaatttaaaaaatacagtatgtagctttatccatcaggacaccaattatctttgtataaaatgagaacagcatgtctgttggaattgtccagggaaatgagggagaaaaaaaatttactttcacattgtaactttcgtgggccctgggtgcttttgcctttgtagattccttatactataaaaaaattaaaaattaaatttcatgactaccctgatataaagatgaatgcattaaaatgatgtatgaaaatattttcttctacctaaaagtgagtttttttaggtctgaagattgtaaaagacgtaaaaatattttcatgggcccctaaaaagtgttgtgagccctaggcactgtcctgcggtacccaatggaaaagtcagccttatctactattgtgctttttgaggctgggaaaacttaagagttttttgacttataatgggaaagacagcattagtcatgcaaggcctattacaggaaatataattcttaaagtccatcttgtaatttagtgagaaattaggaagctgttttagatttttttcccagaaatattaatttagtcactgagctagatagcctatttaagaaaaagtggaattaaaataaattataatgtgctttctagatgaaataagaattttgctcacttgcttttctctctccacattaaacaccaaacaggtatcctgatgtgcagactcgagtgcaggcagaattggatcaggtcgtggggagggaccgtctgccttgtatgggtgaccagcccaacctgccctatgtcctggccttcctttatgaagccatgcgcttctccagctttgtgcctgtcactattcctcatgccaccactgccaacacctctgtcttgggctaccacattcccaaggacactgtggtttttgtcaaccagtggtctgtgaatcatgacccactgaagtggcctaacccggagaactttgatccagctcgattcttggacaaggacggcctcatcaacaaggacctgaccagcagagtgatgattttttcagtgggcaaaaggcggtgcattggcgaagaactttctaagatgcagctttttctcttcatctccatcctggctcaccagtgcgatttcagggccaacccaaatgagcctgcgaaaatgaatttcagttatggtctaaccattaaacccaagtcatttaaagtcaatgtcactctcagagagtccatggagctccttgatagtgctgtccaaaatttacaagccaaggaaacttgccaataagaagcaagaggcaagctgaaattttagaaatattcacatcttcggagatgaggagtaaaattcagtttttttccagttcctcttttgtgctgcttctcaattagcgtttaaggtgagcataaatcaactgtccatcaggtgaggtgtgctccatacccagcggttcttcatgagtagtgggctatgcaggagcttctgggagatttttttgagtcaaagacttaaagggcccaatgaattattatatacatactgcatcttggttatttctgaaggtagcattctttggagttaaaatgcacatatagacacatacacccaaacacttacaccaaactactgaatgaagaagtattttggtaaccaggccatttttggtgggaatccaagattggtctcccatatgcagaaatagacaaaaagtatattaaacaaagtttcagagtatattgttgaagagacagagacaagtaatttcagtgtaaagtgtgtgattgaaggtgataagggaaaagataaagaccagaaattcccttttcaccttttcaggaaaataacttagactctagtatttatgggtggatttatccttttgccttctggtatacttccttacttttaaggataaatcataaagtcagttgctcaaaaagaaatcaatagttgaattagtgagtatagtggggttccatgatttatcatgaattttaaagtatgcattattaaattgtaaaactccaaggtgatgttgtacctcttttgcttgccaaagtacagaatttgaattatcagcaaagaaaaaaaaaaaagccagccaagctttaaattatgtgaccataatgtactgatttcagtaagtctcataggttaaaaaaaaaagtcaccaaatagtgtgaaatatattacttaactgtccgtaagcagtatattagtattatcttgttcaggaaaaggttgaataatatatgccttgtgtaatattgaaaattgaaaagtacaactaacgcaaccaagtgtgctaaaaatgagcttgattaaatcaaccacctatttttgacatggaaatgaagcagggtttcttttcttcactcaaattttggcgaatctcaaaattagatcctaagatgtgttcttatttttataacatctttattgaaattctatttataatacagaatcttgttttgaaaataacctaattaatatattaaaattccaaattcatggcatgcttaaattttaactaaattttaaagccattctgattattgagttccagttgaagttagtggaaatctgaacattctcctgtggaaggcagagaaatctaagctgtgtctgcccaatgaataatggaaaatgccatgaattacctggatgttctttttacgaggtgacaagagttggggacagaactcccattacaactgaccaagtttctcttctagatgattttttgaaagttaacattaatgcctgctttttggaaagtcagaatcagaagatagtcttggaagctgtttggaaaagacagtggagatgaggtcagttgtgttttttaagatggcaattactttggtagctgggaaagcataaagctcaaatgaaatgtatgcattcacatttagaaaagtgaattgaagtttcaagttttaaagttcattgcaattaaacttccaaagaaagttctacagtgtcctaagtgctaagtgcttattacattttattaagctttttggaatctttgtaccaaaattttaaaaaagggagtttttgatagttgtgtgtatgtgtgtgtggggtggggggatggtaagagaaaagagagaaacactgaaaagaaggaaagatggttaaacattttcccactcattctgaattaattaatttggagcacaaaattcaaagcatggacatttagaagaaagatgtttggcgtagcagagttaaatctcaaataggctattaaaaaagtctacaacatagcagatctgttttgtggtttggaatattaaaaaacttcatgtaattttattttaaaatttcatagctgtacttcttgaatataaaaaatcatgccagtatttttaaaggcattagagtcaactacacaaagcaggcttgcccagtacatttaaattttttggcacttgccattccaaaatattatgccccaccaaggctgagacagtgaatttgggctgctgtagcctatttttttagattgagaaatgtgtagctgcaaaaataatcatgaaccaatctggatgcctcattatgtcaaccaggtccagatgtgctataatctgtttttacgtatgtaggcccagtcgtcatcagatgcttgcggcaaaagaaagctgtgtttatatggaagaaagtaaggtgcttggagtttacctggcttatttaatatgcttataacctagttaaagaaaggaaaagaaaacaaaaaacgaatgaaaataactgaatttggaggctggagtaatcagattactgctttaatcagaaaccctcattgtgtttctaccggagagagaatgtatttgctgacaaccattaaagtcagaagttttactccaggttattgcaataaagtataatgtttattaaatgcttcatttgtatgtcaaagctttgactctataagcaaattgcttttttccaaaacaaaaagatgtctcaggtttgttttgtgaattttctaaaagctttcatgtcccagaacttagcctttacctgtgaagtgttactacagccttaatattttcctagtagatctatattagatcaaatagttgcatagcagtatatgttaatttgtgtgtttttagctgtgacacaactgtgtgattaaaaggtatactttagtagacatttataactcaaggataccttcttatttaatcttttcttatttttgtactttatcatgaatgcttttagtgtgtgcataatagctacagtgcatagttgtagacaaagtacattctggggaaacaacatttatatgtagcctttactgtttgatataccaaattaaaaaaaaattgtatctcattacttatactgggacaccattaccaaaataataaaaatcactttcataatcttgttatgaagttttatgttgtagcaaatatagtctaatgtatcactttatttcaactattactatggattattcaattaaaatattgcactgtaaacattttatttgtccattctacatttcaggccgaggccacatgcttttttttcccgtaggttttcatcaaccaaatttctaatctctatatttttgaatttctaagaaccaacacggaggttacatttcaatcaaacaatcaagccaaatgagaattaatttgcaatgttgaaagattgaatagattgcgactttaagttgctgatcgatttctgcttcatctaaagaatgcagtacacatttttcttcctcagcctcataccagtcctttctctgagtattttcttctttcatttttttaaaggtacatgtgcctcaattagtgcaattaatgtccaataaaataagatgggtacaagtattctgtcatgtactatgtggaaatgttttattgccaatctttttacttggtaaaaatacttgacttcacagggcctaggtcatgactctccaggccttcactgtgccacactcacagatgacagggcttgcggtac

SEQ ID NO: 597 - DNA, 4205 bp, Homo sapien
aataagaattagttgaagaaatgaataggaagggagtccccttagatggaggaagggactttctcaaaaggcctcatggaaggagaatggcattgaggctggcttacaagaagtgtgtcttttataaaaagaaggaagggcagggcttccaggtgaaaggcatagcacaagccaaggccaaaagacgggtaactgctagttgttaagggcagtggctgaatcgctatacccctagcagttctacacctaggggcctgcgggccgctgggtctgcgaagcttgcaaggcaactggcccgcccccgctctgcgcctgtctctcggccacgcctaatgctgcaggatgacgcgcacctctagaacccgccccggaggggagggacgcagggaagagtcgcacggacgcactcgcgctgcggccagcgcccgggcctgcgggcccgggcggcggctgtgttgcgcagtcttcatgggttcccgacgaggaggtctctgtggctgcggcggcggctgctaactgcgccacctgctgcagcctgtccccgccgctctgaagcggccgcgtcgaagccgaaatgccgccaccccggaccggccgaggccttctctggctgggtctggttctgagctccgtctgcgtcgccctcggatccgaaacgcaggccaactcgaccacagatgctctgaacgttcttctcatcatcgtggatgacctgcgcccctccctgggctgttatggggataagctggtgaggtccccaaatattgaccaactggcatcccacagcctcctcttccagaatgcctttgcgcagcaagcagtgtgcgccccgagccgcgtttctttcctcactggcaggagacctgacaccacccgcctgtacgacttcaactcctactggagggtgcacgctggaaacttctccaccatcccccagtacttcaaggagaatggctatgtgaccatgtcggtgggaaaagtctttcaccctgggatatcttctaaccataccgatgattctccgtatagctggtcttttccaccttatcatccttcctctgagaagtatgaaaacactaagacatgtcgagggccagatggagaactccatgccaacctgctttgccctgtggatgtgctggatgttcccgagggcaccttgcctgacaaacagagcactgagcaagccatacagttgttggaaaagatgaaaacgtcagccagtcctttcttcctggccgttgggtatcataagccacacatccccttcagataccccaaggaatttcagaagttgtatcccttggagaacatcaccctggcccccgatcccgaggtccctgatggcctaccccctgtggcctacaacccctggatggacatcaggcaacgggaagacgtccaagccttaaacatcagtgtgccgtatggtccaattcctgtggactttcagcggaaaatccgccagagctactttgcctctgtgtcatatttggatacacaggtcggccgcctcttgagtgctttggacgatcttcagctggccaacagcaccatcattgcatttacctcggatcatgggtgggctctaggtgaacatggagaatgggccaaatacagcaattttgatgttgctacccatgttcccctgatattctatgttcctggaaggacggcttcacttccggaggcaggcgagaagcttttcccttacctcgacccttttgattccgcctcacagttgatggagccaggcaggcaatccatggaccttgtggaacttgtgtctctttttcccacgctggctggacttgcaggactgcaggttccacctcgctgccccgttccttcatttcacgttgagctgtgcagagaaggcaagaaccttctgaagcattttcgattccgtgacttggaagaggatccgtacctccctggtaatccccgtgaactgattgcctatagccagtatccccggccttcagacatccctcagtggaattctgacaagccgagtttaaaagatataaagatcatgggctattccatacgcaccatagactataggtatactgtgtgggttggcttcaatcctgatgaatttctagctaacttttctgacatccatgcaggggaactgtattttgtggattctgacccattgcaggatcacaatatgtataatgattcccaaggtggagatcttttccagttgttgatgccttgagttttgccaaccatggatggcaaatgtgatgtgctcccttccagctggtgagaggaggagttagagctggtcgttttgtgattacccataatattggaagcagcctgagggctagttaatccaaacatgcatcaacaatttggcctgagaatatgtaacagccaaaccttttcgtttagtctttattaaaatttataattggtaattggaccagttttttttttaatttccctctttttaaaacagttacggcttatttactgaataaatacaaagcaaacaaactcaagttatgtcatacctttggatacgaagaccatacataataaccaaacataacattatacacaaagaatactttcattatttgtggaatttagtgcatttcaaaaagtaatcatatatcaaactaggcaccacactaagttcctgattattttgtttataatttaataatatatcttatgagccctatatattcaaaatattatgttaacatgtaatccatgtttctttttcaaatctaaagttaaaaaaaaatagcagaagccagtgtcttaaagtctatcttttgtttctaagaccatgggatttcataatctcaagataaaatatgtatgaagtaattaatgtagaatttttacaccaaataataaataatgcttaataaactagagatatgagatgtgtaggaaatttggttaaacttttttcagatactttctggcccaaataataatttgttagcaaataatatgacccttgaactcaatggccatctattaaaagactgttgttcacactggaaaacatttaaagatgtgactatatccatgggtggattgaatcactcaaaatatattagtatccttctttagggatggttggttacagacatgtatttattcaggaggcagaaaatattccattttaattgcttattaaagaaaacattaaattctaaattattttgaggactgtgaagacttttcattagtgtaatattaggtcattgtcaatctcccagaatgtagttctatattctctaaatatgaaagtatccagaaaggccagtggtagtaaaaagcttagtgtatataatctcaaaagggatggaatatttacaactcatatttataacatgttgaatcttctcagttatcagtagtcatcagaagtgtcaatagctttctaaataaatattaaatatctactgtcctgtagtgaaggagtaatttttagtaattttctctttacaaagtctccagtgtttccaggtaaatatttgtgaaacaaaatacagcaaactacattgttacttcagtgtattgttgccaaaaatgacaagatattatattaaaatcagtaaattttagacagattttaaaaattaattagcctacaatagaggttatatggtaacacggtgatcttctaagcagttaagtgactgactgttctggcaacaacgacttctccgtgactgaagggccctgttcatttcctgatcctgaagctcgtctctcttttgagcctccgcttgctttggtcgatggtttccctcagctttttctttgctgttcttcatcctcgttgttgctgtcatcatgttcactgtggcttttacaatacagcctgtaaattccttatgacatagttcagtgcatttggctttatcgcctgctccacagttctttacctttacttggcttagagaaactgtatctttgttgcttcatataacctttccccaaccccactaagctggacataacttattagtggtcctcccgtcactttatttgtagaaatctctctttcacatgagcaggggttctttcatgtggtttagctgacagcagaactagtgattctagacattttgcatggccctcattcagtggctcacaaaacatgagggagcatcagaactacttgaggggcttgtttaaaacccagtgcgttagaagtccggatg

SEQ ID NO: 598 - protein, 550 aa, Homo sapien
MPPPRTGRGLLWLGLVLSSVCVALGSETQANSTTDALNVLLIIVDDLRPSLGCYGDKLVRSPNIDQLASHSLLFQNAFAQQAVCAPSRVSFLTGRRPDTTRLYDFNSYWRVHAGNFSTIPQYFKENGYVTMSVGKVFHPGISSNHTDDSPYSWSFPPYHPSSEKYENTKTCRGPDGELHANLLCPVDVLDVPEGTLPDKQSTEQAIQLLEKMKTSASPFFLAVGYHKPHIPFRYPKEFQKLYPLENITLAPDPEVPDGLPPVAYNPWMDIRQREDVQALNISVPYGPIPVDFQRKIRQSYFASVSYLDTQVGRLLSALDDLQLANSTIIAFTSDHGWALGEHGEWAKYSNFDVATHVPLIFYVPGRTASLPEAGEKLFPYLDPFDSASQLMEPGRQSMDLVELVSLFPTLAGLAGLQVPPRCPVPSFHVELCREGKNLLKHFRFRDLEEDPYLPGNPRELIAYSQYPRPSDIPQWNSDKPSLKDIKIMGYSIRTIDYRYTVWVGFNPDEFLANFSDIHAGELYFVDSDPLQDHNMYNDSQGGDLFQLLMP

SEQ ID NO: 599 - DNA, 4425 bp, Homo sapien; identical to SEQ ID NO: 586

SEQ ID NO: 600 - protein, 521 aa, Homo sapien; identical to SEQ ID NO: 587

SEQ ID NO: 601 - DNA, 6245 bp, Homo sapien
gagaagaagtggcaggtgatgctgaagcgggggagaagcggcagagccggccacacagtgcaggggatggagacaggtgctgggctggtcctcctgcagcatcctcagttgttggagggcagtcatcctcaggccgtacccagccagagaagaaaaagaacagtgtgaagccacgtgtgatagccgtccaacatcggctcttccctccaattacattgtagttgattgtgtctcaaaccatgaattatgtgggacagctggctgggcaggtgattgtcactgtgaaggaactctacaagggcattaaccaggccaccctctctgggtgcattgatgtcatcgtggtacagcagcaggatggcagctatcagtgttcaccttttcacgttcggtttggaaagctgggagtcctgagatccaaagagaaagtgattgatatagaaatcaacggcagtgcagtggatcttcacatgaagttgggtgataacggagaagctttctttgttgaggagactgaagaagaatatgaaaagcttcctgcttaccttgccacctcaccaattcctactgaagatcagttctttaaagatattgacacccctttggtgaaatcgggtggagatgaaacaccatctcagagttcagacatctcacacgtcttggaaacagagacaatttttactccaagttctgtgaaaaagaaaaaacgaaggagaaagaaatacaaacaggacagtaagaaggaagagcaggccgcatctgctgctgcagaagacacatgtgatgtaggcgtgagctccgatgatgacaagggggcccaggcagcacgaggatcttcaaatgcttccttgaaagaagaagaatgtaaagagcctttgctcttccattctggggatcattaccccttatctgatggagattggtcccctttagagaccacctatccccagacagcgtgtcctaagagtgattcagagctggaggtgaaacctgcggagagcctgctcagatcagagtctcacatggagtggacgtggggcggattcccagagtccaccaaggtcagcaaaagagaacgatctgaccatcatcctaggacagctacaattacaccatcagaaaatactcattttcgggtaattcccagtgaggacaacctcatcagtgaagttgagaaggatgcttccatggaagacactgtctgtaccatagtgaagcccaaacccagagccctgggtacacagatgagcgacccaacatctgtggcagagcttctcgaacctcctcttgagagtactcagatttcatctatgttagatgctgaccaccttcccaacgcagccttagcggaggcgccctcagaatccaaaccggcagctaaagtagactcgccgtcaaagaagaaaggtgttcacaaaagaagccaacaccagggacctgatgatatttaccttgatgacttaaagggtctagaacctgaagttgcagctctttatttccctaaaagtgaatcggagcccggttccaggcagtggcccgagtctgacacactctctggctcccagtccccacagtccgtgggaagcgcagctgcagatagcggcaccgagtgcctctcagattctgccatggacttgcctgacgttaccctctccctttgcgggggcctcagtgaaaatggagaaatttcaaaagaaaaattcatggagcatatcattacttatcacgaatttgcagaaaaccctggacttatagacaatcctaaccttgtaataaggatatataatcgttactataactgggctttggcagctcccatgatccttagcttgcaagtattccagaagagcttgcctaaggccacagttgagtcctgggtgaaagacaagatgccaaagaaatctggtcgctggtggttttggcgaaagagagaaagcatgaccaaacagctgccagaatccaaggagggaaaatctgaggcaccgccagccagtgacctgccatccagctccaaggagccggccggtgccaggccggccgagaatgactcctcgagtgacgagggatcacaggagctcgaagaatccatcacagtggaccccatccccacagagcccctgagccacggcagcacaacttcatataagaagtctctccgcctctcctcagaccagatcgcaaaactgaagctccacgatggcccaaatgatgttgtgtttagtattacaacccagtatcaaggcacctgtcgctgtgcagggaccatttacctgtggaactggaatgacaagatcatcatttctgatattgatgggacaataaccaagtcggatgctttgggacagattctcccacagctgggcaaagactggacccaccagggtatagcaaagctctaccattccatcaatgagaatggctacaagtttctgtactgctcggctcgtgccatcggcatggccgacatgacccgtggctacctgcactgggtcaatgacaagggcacaatcttgccccggggccccctgatgctgtcccccagcagcttgttctccgccttccacagagaagtgatagaaaagaaaccagagaagttcaaaattgagtgtctaaatgatatcaagaatctgtttgccccgtctaagcagcccttctatgctgcctttggaaaccgtccaaatgatgtctatgcctacacacaagttggagttccagactgtagaatattcaccgtgaaccccaagggtgaattaatacaagaaagaaccaaaggaaacaagtcatcgtatcacaggctgagtgagctcgtggagcatgtgttcccccttctcagtaaggagcagaattccgcttttccctgcccggagttcagctccttctgctactggcgagacccgatccctgaagtggacctggatgacctgtcttgaggcggcacctcagtgggtgggcagggcttggtccccctccccacagcaagggaaggcagctggctcttctgctgacctcagataccagccttccccagcggggacgggtgcttctggagctggtcccgccatcctcctttgccttcccaggccagctgctcaggctcggcaggtctgcagctcagctcctggaaggagaagggaggaactgggcctggggctggaggcctgggatccctcctttgtgggtcgcacacatgtttcctgctgtgagctggggcctccttccattgcatcattttaaaggaagaaaaaagcagctaaaaaagagtggaccaaaacactgcacacagtgaagtgttccagtttccactgggcagttgaggtggcttctgtaaccagggctgtcttcagatgtcagggtccctgaactgctgcgggcccagtcagtgatgctggctgaagctgcctgtgcacgtttcttctctggtcgcctcatttcctgctacactgaaggggtcagctgctccagtgggccaagttgggcaggacccccgcccctgcagggcccatgcaccagagccactgagcccagtcccataaacctggccctctttggggaaagatccccacagagcatcctcctctcatctgtgacaactccacgagcccttaatttcttagtcctcaccagaagaacaggtctcacaagtatatatttgatgtctgtaataaaagtgggaaggtgggtcttaaaacagaccaaaccccgccccgcccccaacaactctgcttttagggaggcctccgaaatgcagataggcggttgagtggggtcctgggaagagcgctgaatccctctgcttgctgcctggtgtgggcctttggaaagcatcttgccttgggacaggatttctaaaattctgtgattcagatttgtcagggaagcacagtgaagcttgcttaaaggcactggccagcagtgtgtgactttggcttttgggatcacaccctgtaatcgggcccgtggaagcagcgtcaaagaggggtcttggagctcctatggagcagactgccccccgagcagtgtccccagcctagccctgtgagaccccatggggacacgggtgcctatgtattttcactaaaatatacatggtagctccatttactgatgcggttgtaatgagctcacatcgtgtctgaagagatggcaccagggaaaggtgtgccataagctgctccagagcttttggtatgctgagtgttgacagagctgcactcttaacatcaagagaactgtcaggagcccagaaccaaccccaggtcttggtctccattggcgagaacacaggacgtggtggttcctgagcagagagggatctgcagatacaggcttggcgctcggggtggtctcgtggccaactcttcatgcccctgccgttgtagtggaacctctacatgttttagtttgcttcacctaaaataatgctgatctagagatagagaaataggggtggttatttttccagattggagagttgaaagtccctgactgatttcagccattttcctagtgcttgtcggatgcagagacaatgttgaaatcccctaaacacagttctcagtggcaaaacctaggaaggctcatgttcccagagaagggaccacatgagccttctcccatgcaaagcttcccccagcttaaatagttgataaggactaattgtttaatgagtttatttatctacagtaggttagggatcctgggttctgtttatatgaagttcttcccagtttgtgaattctagtacagcagccatgcagccaccttatttcatagatgccatctgtgtgtcctcttgactaccttctatttagaggaagaatgagagctttgtgtgtttaactgagcttatagtaggacttctttgcatatgtatggtactgaaaaatcttaatatacatctttaatcctttttaggttgtcctttaaagagtttttgactagtttctttttcttgacagctcttctctttggacacatgggccttcttagagggttcagtctaggacccggctctcctggccctgtgttgagggtagctggtccctctgtccctgtgtctgctagcactagactttgttgctgcagattgatccagtgggtacataggctaattaatgtgagtctttttccttgtttaaaggagtccctcttgctgaaagtagatgattactattgctgtagtgttaggaaagtattaagtttgtgctgaaaatccattgccatttggtacaaatgacatttgttctttctgtgaaagagatgccctcgagtgtgtttgtacacaaacccttaggatggtgagttgaagcatcaccctcgcgctatcttcagtgacgggtgacggctcagggagatggcaggcagattgggctctaagtcattattctctcagttactccattggtgaaatggccctttccctctttgcagttcagtctaagtctcgtatttgctttgctgtctgtgtgctgaagctcgtcccgtgtgagttgctgtctgccccttgtcaggctgtgaggtgctcgtgtagacctggagcatgcaggctgcctccgtttttgggtactgtgttgtgttttgctctgtctaaaaacatctgcatagttttcaactggaaaaagaaaaaacttaaaaatgggatgtcctaaaatgaaagctgctcaaagtcacagaacaaccgagggacaaaggagattggatgactgggaagcgctggcccggaacagcccctgcaactgtggggcctgcacacagcccttccacagttggcactgcaggtgcaggccaaccctttaaagaataaacaaggaagtcagctctttcactttttacaagttggcaaaaacagacttccggggaatttcgatgttttcccgtgttgtagagcttccagggtttaataaaactggttaaaaattgagtctttccctgaagtaagtgctctttccagatgaaaactactcttttggttttgtttgaaagtaagaaagggaggggaaactttgctcttttaataattatgttcagcctatgatgaagtatttgattattagacagcaatgtcactaataagttttaagttgtccaaagttaattgtaaacatcatcagtacagtactcttagttacagtaaagcaattgttgcaagatgaatggctaatattttggtgcagtgtttgatgttcaaaacaaaatgttacaacaataaacgaacataacataaactgaaaaaaaaaaaaaaaaaa

SEQ ID NO: 602 - protein, 896 aa, Homo sapien
MNYVGQLAGQVIVTVKELYKGINQATLSGCIDVIVVQQQDGSYQCSPFHVRFGKLGVLRSKEKVIDIEINGSAVDLHMKLGDNGEAFFVEETEEEYEKLPAYLATSPIPTEDQFFKDIDTPLVKSGGDETPSQSSDISHVLETETIFTPSSVKKKKRRRKKYKQDSKKEEQAASAAAEDTCDVGVSSDDDKGAQAARGSSNASLKEEECKEPLLFHSGDHYPLSDGDWSPLETTYPQTACPKSDSELEVKPAESLLRSESHMEWTWGGFPESTKVSKRERSDHHPRTATITPSENTHFRVIPSEDNLISEVEKDASMEDTVCTIVKPKPRALGTQMSDPTSVAELLEPPLESTQISSMLDADHLPNAALAEAPSESKPAAKVDSPSKKKGVHKRSQHQGPDDIYLDDLKGLEPEVAALYFPKSESEPGSRQWPESDTLSGSQSPQSVGSAAADSGTECLSDSAMDLPDVTLSLCGGLSENGEISKEKFMEHIITYHEFAENPGLIDNPNLVIRIYNRYYNWALAAPMILSLQVFQKSLPKATVESWVKDKMPKKSGRWWFWRKRESMTKQLPESKEGKSEAPPASDLPSSSKEPAGARPAENDSSSDEGSQELEESITVDPIPTEPLSHGSTTSYKKSLRLSSDQIAKLKLHDGPNDVVFSITTQYQGTCRCAGTIYLWNWNDKIIISDIDGTITKSDALGQILPQLGKDWTHQGIAKLYHSINENGYKFLYCSARAIGMADMTRGYLHWVNDKGTILPRGPLMLSPSSLFSAFHREVIEKKPEKFKIECLNDIKNLFAPSKQPFYAAFGNRPNDVYAYTQVGVPDCRIFTVNPKGELIQERTKGNKSSYHRLSELVEHVFPLLSKEQNSAFPCPEFSSFCYWRDPIPEVDLDDLS

SEQ ID NO: 603 - DNA, 4322 bp, Homo sapien
gggaccgacgacacgcccccctctcctcctttgttccgggggtcggcggccgctctcctgccagagctcgggatctcggccccgggaggcgggcgctcgggcgcagccgcgaagatgccgttggaactgacgcagagccgagtgcagaagatctgggtgcccgtggaccacaggccctcgttgcccagatcctgtgggccaaagctgaccaactcccccaccgtcatcgtcatggtgggcctccccgcccggggcaagacctacatctccaagaagctgactcgctacctcaactggattggcgtccccacaaaagtgttcaacgtcggggagtatcgccgggaggctgtgaagcagtacagctcctacaacttcttccgccccgacaatgaggaagccatgaaagtccggaagcaatgtgccttagctgccttgagagatgtcaaaagctacctggcgaaagaagggggacaaattgcggttttcgatgccaccaatactactagagagaggagacacatgatccttcattttgccaaagaaaatgactttaaagcgtttttcatcgagtcggtgtgcgacgaccctacagttgtggcctccaatatcatggaagttaaaatctccagcccggattacaaagactgcaactcggcagaagccatggacgacttcatgaagaggatcagttgctatgaagccagctaccagcccctcgaccccgacaaatgcgacagggacttgtcgctgatcaaggtgattgacgtgggccggaggttcctggtgaaccgggtgcaggaccacatccagagccgcatcgtgtactacctgatgaacatccacgtgcagccgcgtaccatctacctgtgccggcacggcgagaacgagcacaacctccagggccgcatcgggggcgactcaggcctgtccagccggggcaagaagtttgccagtgctctgagcaagttcgtggaggagcagaacctgaaggacctgcgcgtgtggaccagccagctgaagagcaccatccagacggccgaggcgctgcggctgccctacgagcagtggaaggcgctcaatgagatcgacgcgggcgtctgtgaggagctgacctacgaggagatcagggacacctaccctgaggagtatgcgctgcgggagcaggacaagtactattaccgctaccccaccggggagtcctaccaggacctggtccagcgcttggagccagtgatcatggagctggagcggcaggagaatgtgctggtcatctgccaccaggccgtcctgcgctgcctgcttgcctacttcctggataagagtgcagaggagatgccctacctgaaatgccctcttcacaccgtcctgaaactgacgcctgtcgcttatggctgccgtgtggaatccatctacctgaacgtggagtccgtctgcacacaccgggagaggtcagaggatgcaaagaagggacctaacccgctcatgagacgcaatagtgtcaccccgctagccagccccgaacccaccaaaaagcctcgcatcaacagctttgaggagcatgtggcctccacctcggccgccctgcccagctgcctgcccccggaggtgcccacgcagctgcctggacaaaacatgaaaggctcccggagcagcgctgactcctccaggaaacactgaggcagacgtgtcggttccattccatttccatttctgcagcttagcttgtgtcctgccctccgcccgaggcaaaacgtatcctgaggacttcttccggagagggtggggtggagcagcgggggagccttggccgaagagaaccatgcttggcaccgtctgtgtcccctcggccgctggacaccagaaagccacgtgggtccctggcgcctgcctttagcctgggggcccccacctccactctctgggttcctaggaatgtccagcctcggagaccttcacaaagccttgggagggtgatgagtgctggtcctgacaagaggccgctggggacactgtccgttttgtttcgtttctgtgatctcccggcacgtttggagctgggaagaccacactggtggcagaatcctaaaattaaaggaggcagcctcctagttgctgaaagttaaggaatgtgtaaaacctccacgtgactgtttggtgcatcttgacctgggaagacgcctcatgggaacgaacttggacaggtgttgggttgacccctcttctgcaggaagtccctgagctgagacgcaaagttggctgggtggtggtcggcaccctggctcctgcaggtccacacaccttccaggcctgtggcctgcctccaaagatgtgcaagggcaggctggctgcacggggagagggaagtattttgccgaaatatgagaactggggcctcctgctcccagggagctccagggcccctctctcctcccacctggacttggggggaactgagaaacactttcctggagctgctggcttttgcacttttttgatggcagaagtgtgacctgagagtcccaccttctcttcaggaacgtagatgtcggggtgtcttgccctggggggcttggaacctctgaaggtggggagcggaacacctggcatccttccccagcacttgcattacggtccctgctcttccaaggtggggacagtggcccaagcaaggcctcacacgcagccacttcttcaagagctgcctgcacactgtcttggagcatctgccttgtgcctggcactctgccggtgccttgggaaggtcggtaagagtggactttgtcctgggcttcccttcatggcgtctagacacttttgtggtgatggaaagcatgggacctgtcgtctcagcctgttggtttctcctcattgcctcaaaccctggggtaggtggaacggggggtctcgtgcccagatgaaaccatttggaaactcggcagcagagtttgtccaaatgacccttttcaggatgtctcaaagcttgtgccaaaggtcacttttctttcctgccttctgctgtgagccctgagatcctcctcccagctcaagggacaggtcctgggtgagggtgggagatttagacacctgaaactgggcgtggagagaagagccgttgctgtttgttttttgggaagagcttttaaagaatgcatatttttttacctggttggaattgagtaggaactgaggctgtgcttcaggtatggtacaatcaagtgggggattttcatgctgaacccattcaaagccctccccgtccccgcatttccaggccaccctttggctggcgtctgctggagaggatgtctctgtcgcattcccgtgcagctcagctcgcgcaggttttctctctctccctggatgttgagctctcatcagaatatgtgggtggggggtggacgtgcacgggtgcatgattgtgcttaacttggttgtatttttcgatttgacatggaagcctgttgctttgctctagagaatagtttctcgtgtccccttcgcacgcctcattctttgaacctcatctctgatgtttgatacagatgggggcttgatagctgtggtcccctttcccttctgactacgtgaaaatcaatacctaaatacagaagccttggtctaaacaccgagacttttagtttgcgaaggggcttagatagggagagaggtaacatgaatctggacaggggagggagatactatagaaaggagaacactgcatactttgcaaagccagtgacctccttttgaaggggacattggacgggggccgggggcgggggttcggtttgactaccgtcatgaacttttggcgtatactgattcctccaactctccaccccacaaaataacggggaccaatatttttaactttgcctatttgtttttgggtgagtttcccccctccattattctgtcctgagaccacgggcaaagctcttccattttgagagagaagaaaaactgtttggaaccacaccaatgatatttttctttgtaatacttgaaatttatttttttattattttgatagcagatgtgctatttatttatttaatatatgtataaggagtcctaaacaatagaaagctgtagaagctgtagagataggcttcagttgttaattggtttggagcctcctatgtgtgacttatgactctctgtgttctgtgtatttgtctgaattaatgacctgggatataaagctatgctagctttcaaacaggagatgccttcagaaagctttgtatattttgcagttgccagaccaataaaatacctggttgaaatacatggacgaaaaaaaaaaaaaaaaaaaaaaa

SEQ ID NO: 604 - protein, 520 aa, Homo sapien
MPLELTQSRVQKIWVPVDHRPSLPRSCGPKLTNSPTVIVMVGLPARGKTYISKKLTRYLNWIGVPTKVFNVGEYRREAVKQYSSYNFFRPDNEEAMKVRKQCALAALRDVKSYLAKEGGQIAVFDATNTTRERRHMILHFAKENDFKAFFIESVCDDPTVVASNIMEVKISSPDYKDCNSAEAMDDFMKRISCYEASYQPLDPDKCDRDLSLIKVIDVGRRFLVNRVQDHIQSRIVYYLMNIHVQPRTIYLCRHGENEHNLQGRIGGDSGLSSRGKKFASALSKFVEEQNLKDLRVWTSQLKSTIQTAEALRLPYEQWKALNEIDAGVCEELTYEEIRDTYPEEYALREQDKYYYRYPTGESYQDLVQRLEPVIMELERQENVLVICHQAVLRCLLAYFLDKSAEEMPYLKCPLHTVLKLTPVAYGCRVESIYLNVESVCTHRERSEDAKKGPNPLMRRNSVTPLASPEPTKKPRINSFEEHVASTSAALPSCLPPEVPTQLPGQNMKGSRSSADSSRKH

SEQ ID NO: 605 - DNA, 2446 bp, Homo sapien
gcgccgcggcgcggagtcccggctgcgggatagaccgagggccatggccgcctctcccggacccgccggcgttggcggcgccggagcagtctacggctccggctcttcgggcttcgccctcgactcgggactggagatcaaaactcgctcggtggagcagacgctactcccgctggtttctcagatcaccacgcttattaatcataaagataataccaaaaagtctgataaaactctgcaagcaattcagcgtgtaggacaagctgtcaacttggcagttggaagatttgttaaagtaggagaagctatagccaatgaaaactgggatttgaaagaagaaataaatattgcttgtattgaagctaaacaagcaggagaaacaattgcagcacttacagacataaccaacttgaaccatctggaatctgatgggcagatcacaatttttacagacaaaacaggagtgataaaggctgcaagattacttctttcttcagtgacaaaagtgttgttgctggcagaccgagtagtcattaaacagataataacatcaagaaataaggttctcgcaactatggaaagactagagaaagtgaatagctttcaagagtttgtccaaatattcagtcaatttggaaatgaaatggtggagtttgcacatctgagtggagatagacaaaatgatttgaaagatgaaaagaaaaaggcaaaaatggcagcagctagggcagttcttgaaaagtgtacaatgatgcttctcacagcttcaaagacatgtctgaggcatcctaactgcgaatcagcccataaaaacaaagaaggagtatttgaccgtatgaaagtggcattggataaggtcattgaaattgtgactgactgtaaaccgaatggagagactgacatttcatctatcagtatttttactggaattaaggaattcaagatgaatattgaagctcttcgggagaatctttattttcagtccaaagagaacctttctgtgacattggaagtcatcttggagcgtatggaggactttactgattctgcctacaccagccatgagcacagagaacgcatcttggaactgtcaactcaggcgagaatggaactgcagcagttaatttctgtgtggattcaagctcaaagcaagaaaacaaaaagcatcgctgaagaactggaactcagtattttgaaaatcagtcacagtcttaatgaacttaagaaagaacttcatagtacagcgacacagctggcagcagatctattaaaataccatgctgatcatgtggttctaaaagcattaaaacttactggagtagaaggaaatttagaagctttggctgaatatgcctgtaaactctctgaacagaaagagcagcttgttgagacctgtcgattgttacgacacatatctgggacagaacctctggaaataacctgtatacatgcagaggagacatttcaggtgactggccaacagataatttctgctgctgaaacattgacattgcatccatctagtaaaattgctaaagaaaacctagatgtattttgtgaagcttgggaatcccaaattagtgacatgtcaacactgctgagagaaatcaatgacgtgtttgaaggaagacgaggagagaagtatggctacctttcacttccaaagccaatgaagaataatgcaaacctgaaatcattaaagccagacaagcctgactctgaggagcaagccaagatagcaaagcttggacttaagctgggtttgctcacctctgacgctgactgcgaaattgagaagtgggaagatcaggagaatgagattgttcaatatggacggaacatgtccagtatggcctattctctgtatttatttactagaggagaggggccactgaaaacttcccaggatttaattcatcaactagaggtttttgctgcagagggtttaaagcttacttccagtgttcaagctttttcaaaacagctgaaagacgatgacaagcttatgcttctcctggaaataaacaagctaattcctctatgccaccagctccagacagtaactaagacttctttgcagaataaagtatttctaaaggttgacaagtgtattacgaagacaagatccatgatggctctcttagtccaacttctttcactttgttataaactgctgaagaagcttcagatggaaaataacggatgggtctcagttacaaataaggacactatggatagtaaaacttgagaagcttttggggtcagatctctggaacatcatgtgatgaagctgacatttttaaaaatcaaatgatcctttatcttttcagaaattcatcaattttataaagaaaacaatattgaaattttgctctattttctgatcatgaaactgattgtaaagctttttgacaactaataaatgtcttggtaattgctagattct

SEQ ID NO: 606 - protein, 734 aa, Homo sapien
MAASPGPAGVGGAGAVYGSGSSGFALDSGLEIKTRSVEQTLLPLVSQITTLINHKDNTKKSDKTLQAIQRVGQAVNLAVGRFVKVGEAIANENWDLKEEINIACIEAKQAGETIAALTDITNLNHLESDGQITIFTDKTGVIKAARLLLSSVTKVLLLADRVVIKQIITSRNKVLATMERLEKVNSFQEFVQIFSQFGNEMVEFAHLSGDRQNDLKDEKKKAKMAAARAVLEKCTMMLLTASKTCLRHPNCESAHKNKEGVFDRMKVALDKVIEIVTDCKPNGETDISSISIFTGIKEFKMNIEALRENLYFQSKENLSVTLEVILERMEDFTDSAYTSHEHRERILELSTQARMELQQLISVWIQAQSKKTKSIAEELELSILKISHSLNELKKELHSTATQLAADLLKYHADHVVLKALKLTGVEGNLEALAEYACKLSEQKEQLVETCRLLRHISGTEPLEITCIHAEETFQVTGQQIISAAETLTLHPSSKIAKENLDVFCEAWESQISDMSTLLREINDVFEGRRGEKYGYLSLPKPMKNNANLKSLKPDKPDSEEQAKIAKLGLKLGLLTSDADCEIEKWEDQENEIVQYGRNMSSMAYSLYLFTRGEGPLKTSQDLIHQLEVFAAEGLKLTSSVQAFSKQLKDDDKLMLLLEINKLIPLCHQLQTVTKTSLQNKVFLKVDKCITKTRSMMALLVQLLSLCYKLLKKLQMENNGWVSVTNKDTMDSKT

SEQ ID NO: 607 - DNA, 4221 bp, Homo sapien
gtcggccgtcccctttaatttttaaatacacggtcccctcttttctctggggggggcaagcaagaaatcaaagaaggaggagacaagccgtcaattttctccaaaacaaaccccaccgggcaatttggtctcggggtagggggagacggggtgattgcaaattattccaggacgagatccagttctccagcgggaaaggggcaaaggaacgccgcgcgttggaagggccagggtacgcagctccccttgcagcgcccgcaggacccccgcaagctcgtgccggcgaaatcggagaccgccgatctgtcctcgttctctcctgcacgtctggctgcattcggaggaagacctggggcgcgagcgagcggcgacagcatgagcctgtgctgacctccgcgcggcgggccgagcccagggctttgtcgcggtacctgcgcccagcccgcgccgcaactctgtgcccagcttttgcaatcttttgttgcagcgctgaccgcaccaagttaaatgctcccttgcaatttttcttttttttgtttgtttgtttaatttttggagagctcgcgatcttggaaaagcctcagacgccatctacagttaaaacgtaggtaactgccctctcccgcaccccccccttacacgccccccaccctttccaccaaaaaaagggggtgcagcgcggattctggctgccgtgcgtcgccagccggtagacccgtgcttgtttcctttctctttttgtttggcttctaacgcgttgggactgagtcgccgccgtgagctccccgaagactgcacaaactaccgcgggctcctccgccccgtctgcgattcggaagccggcctgggggtcgcgtcgggagccctgcgctgcagctccgcaccttagcagcccgggtactcatccagatccacgccggggacacacacacagagtaactaaaagtgcggcgattctgcacatcgccgactgctttggggtaacaaaaagacccgagttgcctgccgaccgaggacccccgggagccgggctcggagcagacgaggtatccggcggcgcccatttgggggcttctaactctttctccacgcagcccctcttctgtcccctcccctctcgctcccttttaaaatcagtggcaccgaggcgcctgcagccgcactcgccagcgactcatctctccagcgggtttttttttgtttgtcgtgtgcgatcctcacactcatgaacatacacaggtctacccccatcacaatagcgagatatgggagatcgcggaacaaaacccaggatttcgaagagttgtcgtctataaggtccgcggagcccagccagagtttcagcccgaacctcggctccccgagcccgcccgagactccgaacttgtcgcattgcgtttcttgtatcgggaaatacttattgttggaacctctggagggagaccacgtttttcgtgccgtgcatctgcacagcggagaggagctggtgtgcaaggtgtttgatatcagctgctaccaggaatccctggcaccgtgcttttgcctgtctgctcatagtaacatcaaccaaatcactgaaattatcctgggtgagaccaaagcctatgtgttctttgagcgaagctatggggacatgcattccttcgtccgcacctgcaagaagctgagagaggaggaggcagccagactgttctaccagattgcctcggcagtggcccactgccatgacggggggctggtgctgcgggacctcaagctgcggaaattcatctttaaggacgaagagaggactcgggtcaagctggaaagcctggaagacgcctacattctgcggggagatgatgattccctctccgacaagcatggctgcccggcttacgtaagcccagagatcttgaacaccagtggcagctactcgggcaaagcagccgacgtgtggagcctgggggtgatgctgtacaccatgttggtggggcggtaccctttccatgacattgaacccagctccctcttcagcaagatccggcgtggccagttcaacattccagagactctgtcgcccaaggccaagtgcctcatccgaagcattctgcgtcgggagccctcagagcggctgacctcgcaggaaattctggaccatccttggttttctacagattttagcgtctcgaattcagcatatggtgctaaggaagtgtctgaccagctggtgccggacgtcaacatggaagagaacttggaccctttctttaactgagctcatgccccacggagacttagcaggttccaggagtgagcgagggcagcggaaaggagttcttccgggggacacgaattgcctggctgagtagcaagaaagacacactcttaagtttcttggttcagagcaggaaaaccttcaaggagctgactgaccacgtagcatgggggcaagaggcgtgggatggggattggggtgagatggatgggagcccgctggagcttgtcttccctaacatagcctgggagaccaccccttgccacttgggccacttccgcctaccccacttttcattttgttccaaaatagttgcagatcctgacagaatcaaaactctctgcctcaaacacacatcctggcatcgcactgttagcatttaacttcttgttaggattcagggaaggaacagttggccaagaattttttttcttttaaacaagccaaccacctagctggtaattaatgaggttcacttaaaaaaaaaattcggtgcacacagactgacatgaaacctgggtgctacagtaaaagaaaacaaaagtccagtttgtgtctcttaatcgctcacttcaactcatttcttctaaataaactatttaatatcctggtcaggaaatgacatgttaatgctttgctccctgaagggggaaaaaatctgtcctttaacaagctattctgttttgtgtcaattgggtccgtggcaaggaagctattaggaagtcaaacggtccaggatgcattacctgctaatccttaggtttaaagggggaaagaaaagggaagaagaaaggaaaagagaaatccaactcctttttcatgttttgcttttgaacaatgagggtttgtgtgacaggcattcctctttgctgagatgatagcaatggcctgagattttagcaagctcctggagtctgatgcttttgcagtactctgatcgcaactaaacatttgtctttgttttattagaaactagtgaaacaaagcaggttgtcccacatgtataaaatacagggcagctatttagttttctttacagagaatgatccttttaaggcttgtaaggccctctggtttggacaaaaaccctcagtagagacaagcgggaaggataattagctgaaagctatgatgatataaataaaaacagctctctatcccaatacgcacctttgtattttcaagaactcttctatttattaaggaaaatgtcacattgtgatgtattaagccagtacttcaattacgggttgacttgggatgacatattacatgctgtagttaacatttataattctttttccttgtttgagtatttctgtctctgaaataaccttttacttggcttttctagatagctttatttgatttcgagtggcaaaatgttttttattacggcttttctattgctgtatgatacagaactcttttggcataaatatttgtgttcccagtacctcacttgttcggatttgactgcctgtatatgttttgtgaaatggtcctgtttttgggtaggtgacacgtggactctagtatgtaaatgttacttgaatctgtgcttcataatagtgtgtggcatgtatgtgcagactcttggatgctttatgcctgcgcaccaggagccctgtcctcacgttcccaggagggcggcttcacccttcgtaaccaggagacaaggcggccatggatttgcccttgattctattttgctaatggaagatagaaaggagagaaggtttttttttttttttaacattctgaagatggtgctgtgtcaagaaggaccttttttttcccctctcccctattttttaagtaccttggaggaggagaggttggtgacatgcatggtggggatctatggcctctggtgctttgtcctgtatttggtttaatgtttttgtcctaatctcttcaatcaataaaattgtgcgtatttaactaaaaaaaaaaaaaaaaaa

SEQ ID NO: 608 - protein, 343 aa, Homo sapien
MNIHRSTPITIARYGRSRNKTQDFEELSSIRSAEPSQSFSPNLGSPSPPETPNLSHCVSCIGKYLLLEPLEGDHVFRAVHLHSGEELVCKVFDISCYQESLAPCFCLSAHSNINQITEIILGETKAYVFFERSYGDMHSFVRTCKKLREEEAARLFYQIASAVAHCHDGGLVLRDLKLRKFIFKDEERTRVKLESLEDAYILRGDDDSLSDKHGCPAYVSPEILNTSGSYSGKAADVWSLGVMLYTMLVGRYPFHDIEPSSLFSKIRRGQFNIPETLSPKAKCLIRSILRREPSERLTSQEILDHPWFSTDFSVSNSAYGAKEVSDQLVPDVNMEENLDPFFN

SEQ ID NO: 609 - DNA, 4221 bp, Homo sapien; identical to SEQ ID NO: 607

SEQ ID NO: 610 - protein, 343 aa, Homo sapien; identical to SEQ ID NO: 608

SEQ ID NO: 611 - DNA, 884 bp, Homo sapien
cgaggttcgggtcgtggggcggagggaagagcgggcgggcgggaggcgccggcgccagacgcggagggaaggagctacgagtagccgccgagaggccgcggagccagcgacgaccgacccagccgagccgccgccgccgccgcgcccccatggcggccgccaaggacactcatgaggaccatgatacttccactgagaatacagacgagtccaaccatgaccctcagtttgagccaatagtttctcttcctgagcaagaaattaaaacactggaagaagatgaagaggaactttttaaaatgcgggcaaaactgttccgatttgcctctgagaacgatctcccagaatggaaggagcgaggcactggtgacgtcaagctcctgaagcacaaggagaaaggggccatccgcctcctcatgcggagggacaagaccctgaagatctgtgccaaccactacatcacgccgatgatggagctgaagcccaacgcaggtagcgaccgtgcctgggtctggaacacccacgctgacttcgccgacgagtgccccaagccagagctgctggccatccgcttcctgaatgctgagaatgcacagaaattcaaaacaaagtttgaagaatgcaggaaagagatcgaagagagagaaaagaaagcaggatcaggcaaaaatgatcatgccgaaaaagtggcggaaaagctagaagctctctcggtgaaggaggagaccaaggaggatgctgaggagaagcaataaatcgtcttattttattttcttttcctctctttcctttcctttttttaaaaaattttaccctgcccctctttttcggtttgtttttattctttcatttttacaagggacgttatataaagaactgaactc

SEQ ID NO: 612 - protein, 201 aa, Homo sapien
MAAAKDTHEDHDTSTENTDESNHDPQFEPIVSLPEQEIKTLEEDEEELFKMRAKLFRFASENDLPEWKERGTGDVKLLKHKEKGAIRLLMRRDKTLKICANHYITPMMELKPNAGSDRAWVWNTHADFADECPKPELLAIRFLNAENAQKFKTKFEECRKEIEEREKKAGSGKNDHAEKVAEKLEALSVKEETKEDAEEKQ

SEQ ID NO: 613 - DNA, 2584 bp, Homo sapien
gggggcgtggccccgagaaggcggagacaagatggccgcccatagcgcttggaggacctaagaggcggtggccggggccacgccccgggcaggagggccgctctgtgcgcgcccgctctatgatgcttgcgcgcgtcccccgcgcgccgcgctgcgggcggggcgggtctccgggattccaagggctcggttacggaagaagcgcagcgccggctggggagggggctggatgcgcgcgcacccggggggaggccgctgctgcccggagcaggaggagggggagagtgcggcgggcggcagcggcgctggcggcgactccgccatagagcaggggggccagggcagcgcgctcgccccgtccccggtgagcggcgtgcgcagggaaggcgctcggggcggcggccgtggccgggggcggtggaagcaggcgggccggggcggcggcgtctgtggccgtggccggggccggggccgtggccggggacggggacggggccggggccggggccgcggccgtcccccgagtggcggcagcggccttggcggcgacggcggcggctgcggcggcggcggcagcggtggcggcggcgccccccggcgggagccggtccctttcccgtcggggagcgcggggccggggcccaggggaccccgggccacggagagcgggaagaggatggattgcccggccctcccccccggatggaagaaggaggaagtgatccgaaaatctgggctaagtgctggcaagagcgatgtctactacttcagtccaagtggtaagaagttcagaagcaagcctcagttggcaaggtacctgggaaatactgttgatctcagcagttttgacttcagaactggaaagatgatgcctagtaaattacagaagaacaaacagagactgcgaaacgatcctctcaatcaaaataagggtaaaccagacttgaatacaacattgccaattagacaaacagcatcaattttcaaacaaccggtaaccaaagtcacaaatcatcctagtaataaagtgaaatcagacccacaacgaatgaatgaacagccacgtcagcttttctgggagaagaggctacaaggacttagtgcatcagatgtaacagaacaaattataaaaaccatggaactacccaaaggtcttcaaggagttggtccaggtagcaatgatgagacccttttatctgctgttgccagtgctttgcacacaagctctgcgccaatcacagggcaagtctccgctgctgtggaaaagaaccctgctgtttggcttaacacatctcaacccctctgcaaagcttttattgtcacagatgaagacatcaggaaacaggaagagcgagtacagcaagtacgcaagaaattggaagaagcactgatggcagacatcttgtcgcgagctgctgatacagaagagatggatattgaaatggacagtggagatgaagcctaagaatatgatcaggtaactttcgaccgactttccccaagagaaaattcctagaaattgaacaaaaatgtttccactggcttttgcctgtaagaaaaaaaatgtacccgagcacatagagctttttaatagcactaaccaatgcctttttagatgtatttttgatgtatatatctattattcaaaaaatcatgtttattttgagtcctaggacttaaaattagtcttttgtaatatcaagcaggaccctaagatgaagctgagcttttgatgccaggtgcaatctactggaaatgtagcacttacgtaaaacatttgtttcccccacagttttaataagaacagatcaggaattctaaataaatttcccagttaaagattattgtgacttcactgtatataaacatatttttatactttattgaaaggggacacctgtacattcttccatcatcactgtaaagacaaataaatgattatattcacagactgattggaattctttctgttgaaaagcacacacaataaagaacccctcgttagccttcctctgatttacattcaactctgatccctgggccttaggtttgacatggaggtggaggaagatagcgcatatatttgcagtatgaactattgcctctggacgttgtgagaattgtgctttcaccagaatttctaagaatttctgctaaatatcacctagcatgtgtaattttttttccttgcctgtgacttggacttttgatagttctataagaataaggctttttcttcccttgggcatgagtcagatacacaaggacccttcaggtgttactagaaggcgtccatgtttattgttttttaaagaatgtttggcactctctaacgtccactagcttactgagttatcaggtgcaggtcagactcttggctacagtgagaggcagcttctaggcagagttgcttaatgaaagggtttgtaatactttacaaaccattacctgtacctggcctggcctccaaaatattaacattctttttctgttgaaactcgcgagtgtaactttcataccacttgaatttattgatatttaattatgaaaactagcattacattattaaacgatttctaaaatc

SEQ ID NO: 614 - protein, 411 aa, Homo sapien
MRAHPGGGRCCPEQEEGESAAGGSGAGGDSAIEQGGQGSALAPSPVSGVRREGARGGGRGRGRWKQAGRGGGVCGRGRGRGRGRGRGRGRGRGRGRPPSGGSGLGGDGGGCGGGGSGGGGAPRREPVPFPSGSAGPGPRGPRATESGKRMDCPALPPGWKKEEVIRKSGLSAGKSDVYYFSPSGKKFRSKPQLARYLGNTVDLSSFDFRTGKMMPSKLQKNKQRLRNDPLNQNKGKPDLNTTLPIRQTASIFKQPVTKVTNHPSNKVKSDPQRMNEQPRQLFWEKRLQGLSASDVTEQIIKTMELPKGLQGVGPGSNDETLLSAVASALHTSSAPITGQVSAAVEKNPAVWLNTSQPLCKAFIVTDEDIRKQEERVQQVRKKLEEALMADILSRAADTEEMDIEMDSGDEA

SEQ ID NO: 615 - DNA, 847 bp, Homo sapien
tggggttcgaaccagcaagacaagcgggcattggccacagcagcgcgaggcgggcacggggtattgtccggctccggcggcggcggtcggtgctgcgagagcggcggcggcggcgcgggtcggcagcgggagggcgcgcggccgagcggaggcggagtcggcgccgagaacatggctggaggcaaagctggaaaggacagtgggaaggccaaggctaaggcagtatctcgctcacagagagctgggctacagtttcctgtgggccgcatccacagacacttgaagactcgcaccacaagccatggaagggtgggtgccactgctgccgtgtacagtgctgcgattctggagtacctcactgcagaggtgctggagctggcaggtaatgcttctaaggatctcaaagtaaagcgtatcactccgcgtcacttgcagcttgcaatccgtggtgatgaagagttggattctcttatcaaggctaccatagctgggggtggtgtgatccctcacatccacaaatctctgattggaaagaagggacagcagaaaactgcttagagggatgctttaaccaaccctcttcctccccgtcattgtactgtaactgggacagaagaaataatggggatatgtggaatttttaacaacagttaaatggaaaagcatagacaattactgtagacatgataaaagaaacatttgtatgttcttagactcgaagtttgataaaagtaccttttcatgtggtgacagttgtgtgttgattggctaggtttctcccgtgtgttttatacaaaaatggaattgataaaccattttttacaaaattaaaaaaaaaaaaaaaaaa

SEQ ID NO: 616 - protein, 128 aa, Homo sapien
MAGGKAGKDSGKAKAKAVSRSQRAGLQFPVGRIHRHLKTRTTSHGRVGATAAVYSAAILEYLTAEVLELAGNASKDLKVKRITPRHLQLAIRGDEELDSLIKATIAGGGVIPHIHKSLIGKKGQQKTA

SEQ ID NO: 617 - DNA, 3915 bp, Homo sapien
gtggggtggggtggggctgggggcttgtcgccctttcaggctccaccctttgcggagattataaatagtcatgatcccagcgagacccagagatgcctgtaatggtgagactttggatccttcctgaggacgtggagaaaactttctgctgagaaggacattttgaaggttttgttggctgaaaaagctgtttctggaatcacccctagatctttcttgaagacttgaattagattacagcgatggggacacagaaggtcaccccagctctgatatttgccatcacagttgctacaatcggctctttccaatttggctacaacactggggtcatcaatgctcctgagaagatcataaaggaatttatcaataaaactttgacggacaagggaaatgccccaccctctgaggtgctgctcacgtctctctggtccttgtctgtggccatattttccgtcgggggtatgatcggctccttttccgtcggactcttcgtcaaccgctttggcaggcgcaattcaatgctgattgtcaacctgttggctgtcactggtggctgctttatgggactgtgtaaagtagctaagtcggttgaaatgctgatcctgggtcgcttggttattggcctcttctgcggactctgcacaggttttgtgcccatgtacattggagagatctcgcctactgccctgcggggtgcctttggcactctcaaccagctgggcatcgttgttggaattctggtggcccagatctttggtctggaattcatccttgggtctgaagagctatggccgctgctactgggttttaccatccttcctgctatcctacaaagtgcagcccttccattttgccctgaaagtcccagatttttgctcattaacagaaaagaagaggagaatgctaagcagatcctccagcggttgtggggcacccaggatgtatcccaagacatccaggagatgaaagatgagagtgcaaggatgtcacaagaaaagcaagtcaccgtgctagagctctttagagtgtccagctaccgacagcccatcatcatttccattgtgctccagctctctcagcagctctctgggatcaatgctgtgttctattactcaacaggaatcttcaaggatgcaggtgttcaagagcccatctatgccaccatcggcgcgggtgtggttaatactatcttcactgtagtttctctatttctggtggaaagggcaggaagaaggactctgcatatgataggccttggagggatggctttttgttccacgctcatgactgtttctttgttattaaaggataactataatgggatgagctttgtctgtattggggctatcttggtctttgtagccttctttgaaattggaccaggccccattccctggtttattgtggccgaactcttcagccagggcccccgcccagctgcgatggcagtggccggctgctccaactggacctccaacttcctagtcggattgctcttcccctccgctgctcactatttaggagcctacgtttttattatcttcaccggcttcctcattaccttcttggcttttaccttcttcaaagtccctgagacccgtggcaggacttttgaggatatcacacgggcctttgaagggcaggcacacggtgcagatagatctggaaaggacggcgtcatggagatgaacagcatcgagcctgctaaggagaccaccaccaatgtctaagtcgtgcctccttccacctccctcccggcatgggaaagccacctctccctcaacaagggagagacctcatcaggatgaacccaggacgcttctgaatgctgctacttaattcctttctcatcccacgcactccatgagcaccccaaggctgcggtttgttggatcttcaatggctttttaaattttatttcctggacatcctcttctgcttaggagagaccgagtgaacctaccttcatttcaggagggattggccgcttggcacatgacaactttgccagcttttcctcccttgggttctgatattgccgcactaggggatataggagaggaaaagtaaggtgcagttcccccaacctcagacttaccaggaagcagatacatatgagtgtggaagccggagggtgtttatgtaagagcaccttcctcacttccatacagctctacgtggcaaattaacttgagttttatttattttatcctctggtttaattacataatttttttttttttactttaagtttcaggatacatgtgccgaatgtgcaggtttgttacataggtatatatatgccatgatggaaatatttatttttttaagcgtaattttgccaaataataaaaacagaaggaaattgagattagagggaggtgtttaaagagaggttatagagtagaagatttgatgctggagaggttaaggtgcaataagaatttagggagaaatgttgttcattattggagggtaaatgatgtggtgcctgaggtctgtacgttacctcttaacaatttctgtccttcagatggaaactctttaacttctcgtaaaagtcatatacctatataataaagctactgatttccttggagcttttttctttaagataatagtttacatgtagtagtacttgaaatctaggattattaactaatatgggcattgtagttaatgatggttgatgggttctaattttggatggagtccagggaagagaaagtgatttctagaaagcctgttcccctcactggatgaaataactccttcttgtagtagtctcattacttttgaagtaatcccgccacctatctcgtgggagagccatccaaataagaaacctaaaataattggttcttggtagagattcattatttttccactttgttctttaggagattttaggtgttgattttctgttgtattttaactcatacctttaaaggaattccccaaagaatgtttatagcaaacttggaatttgtaacctcagctctgggagaggatttttttctgagcgattattatctaaagtgtgttgttgctttaggctcacggcacgcttgcgtatgtctgttaccatgtcactgtggtcctatgccgaatgccctcaggggacttgaatctttccaataaaccaggtttagacagtatgagtcaatgtgcagtgtagcccacacttgagaggatgaatgtatgtgcactgtcactttgctctgggtggaagtacgttattgttgacttattttctctgtgtttgttcctacagcccctttttcatatgttgctcagtctccctttcccttcttggtgcttacacatctcagaccctttagccaaacccttgtcagtgacagtattttggttcttagttctcactgttccctctgctcctggagcctttgaataaaaatgcacgtagctgaggccggatgcggtggctcacgcctgtaatcccagcactttgggaggcctaggcgggcggtcaggggttcgagaccagtctggccaacatcgtgaaaccctgtctctactaaaaatgcaaaaattagccgggcgtggtggcgggcgcctgtaatcccagctacttgggaagctgaggcgggagaatcatgtgaacccgggacgcaggggttgcagtgagcggagatcgcatcattgcactctagcctgggccacagggcgagactccgtctcaaaaaaaaaaaaatgcacatagctatcgagtgtgctttagcttgaaaaggtgaccttgcaacttcatgtcaactttctggctcctcaaacagtaggttggcagtaaggcagggtcccatttctcactgagaagattgtgaatatttccatatggattttctattgttactctggttctttgttttaaaataaaaattctgaatgtacacg

SEQ ID NO: 618 - protein, 496 aa, Homo sapien
MGTQKVTPALIFAITVATIGSFQFGYNTGVINAPEKIIKEFINKTLTDKGNAPPSEVLLTSLWSLSVAIFSVGGMIGSFSVGLFVNRFGRRNSMLIVNLLAVTGGCFMGLCKVAKSVEMLILGRLVIGLFCGLCTGFVPMYIGEISPTALRGAFGTLNQLGIVVGILVAQIFGLEFILGSEELWPLLLGFTILPAILQSAALPFCPESPRFLLINRKEEENAKQILQRLWGTQDVSQDIQEMKDESARMSQEKQVTVLELFRVSSYRQPIIISIVLQLSQQLSGINAVFYYSTGIFKDAGVQEPIYATIGAGVVNTIFTVVSLFLVERAGRRTLHMIGLGGMAFCSTLMTVSLLLKDNYNGMSFVCIGAILVFVAFFEIGPGPIPWFIVAELFSQGPRPAAMAVAGCSNWTSNFLVGLLFPSAAHYLGAYVFIIFTGFLITFLAFTFFKVPETRGRTFEDITRAFEGQAHGADRSGKDGVMEMNSIEPAKETTTNV

SEQ ID NO: 619 - DNA, 2192 bp, Homo sapien
cggcgccggggaccgctgccaccccgcctagcgcagcgccccgtccttccgcagcccaaccgcctcttcccgccccgccccatcccgcccacgggctccagtgggcgggaccagaggagtcccgcgttcggggagtatgtcaaggccgtgacccgtgtattattgtccgagtggccggaacgggagccaacatggcagcggggttcgggcgatgctgcagggtcctgagaagtatttctcgttttcattggagatcacagcatacaaaagccaatcgacaacgtgaaccaggattaggatttagttttgagttcaccgaacagcagaaagaatttcaagctactgctcgtaaatttgccagagaggaaatcatcccagtggctgcagaatatgataaaactggtgaatatccagtccccctaattagaagagcctgggaacttggtttaatgaacacacacattccagagaactgtggaggtcttggacttggaacttttgatgcttgtttaattagtgaagaattggcttatggatgtacaggggttcagactgctattgaaggaaattctttggggcaaatgcctattattattgctggaaatgatcaacaaaagaagaagtatttggggagaatgactgaggagccattgatgtgtgcttattgtgtaacagaacctggagcaggctctgatgtagctggtataaagaccaaagcagaaaagaaaggagatgagtatattattaatggtcagaagatgtggataaccaacggaggaaaagctaattggtattttttattggcacgttctgatccagatcctaaagctcctgctaataaagcctttactggattcattgtggaagcagataccccaggaattcagattgggagaaaggaattaaacatgggccagcgatgttcagatactagaggaattgtcttcgaagatgtgaaagtgcctaaagaaaatgttttaattggtgacggagctggtttcaaagttgcaatgggagcttttgataaaaccagacctgtagtagctgctggtgctgttggattagcacaaagagctttggatgaagctaccaagtatgccctggaaaggaaaactttcggaaagctacttgtagagcaccaagcaatatcatttatgctggctgaaatggcaatgaaagttgaactagctagaatgagttaccagagagcagcttgggaggttgattctggtcgtcgaaatacctattatgcttctattgcaaaggcatttgctggagatattgcaaatcagttagctactgatgctgtgcagatacttggaggcaatggatttaatacagaatatcctgtagaaaaactaatgagggatgccaaaatctatcagatttatgaaggtacttcacaaattcaaagacttattgtagcccgtgaacacattgacaagtacaaaaattaaaaaaattactgtagaaatattgaataactagaacacaagccactgtttcagctccagaaaaaagaaagggctttaacgttttttccagtgaaaacaaatcctcttatattaaatctaagcaactgcttattatagtagtttatacttttgcttaactctgttatgtctcttaagcaggtttggtttttattaaaatgatgtgttttctttagtaccactttacttgaattacattaacctagaaaactacataggttattttgatctcttaagattaatgtagcagaaatttcttggaattttatttttgtaatgacagaaaagtgggcttagaaagtattcaagatgttacaaaatttacatttagaaaatattgtagtatttgaatactgtcaacttgacagtaactttgtagacttaatggtattattaaagttctttttattgcagtttggaaagcatttgtgaaactttctgtttggcacagaaacagtcaaaattttgacattcatattctcctattttacagctacaagaactttcttgaaaatcttatttaattctgagcccatatttcacttaccttatttaaaataaatcaataaagcttgccttaaattatttttatatgactgttggtctctaggtagcctttggtctattgtacacaatctcatttcatatgtttgcattttggcaaagaacttaataaaattgttcagtgcttattatcat

SEQ ID NO: 620 - protein, 421 aa, Homo sapien
MAAGFGRCCRVLRSISRFHWRSQHTKANRQREPGLGFSFEFTEQQKEFQATARKFAREEIIPVAAEYDKTGEYPVPLIRRAWELGLMNTHIPENCGGLGLGTFDACLISEELAYGCTGVQTAIEGNSLGQMPIIIAGNDQQKKKYLGRMTEEPLMCAYCVTEPGAGSDVAGIKTKAEKKGDEYIINGQKMWITNGGKANWYFLLARSDPDPKAPANKAFTGFIVEADTPGIQIGRKELNMGQRCSDTRGIVFEDVKVPKENVLIGDGAGFKVAMGAFDKTRPVVAAGAVGLAQRALDEATKYALERKTFGKLLVEHQAISFMLAEMAMKVELARMSYQRAAWEVDSGRRNTYYASIAKAFAGDIANQLATDAVQILGGNGFNTEYPVEKLMRDAKIYQIYEGTSQIQRLIVAREHIDKYKN

SEQ ID NO: 621 - DNA, 836 bp, Homo sapien
gtgaaacaccctcggctgggaagtcagttcgttctctcctctcctctcttcttgtttgaacatggtgcggactaaagcagacagtgttccaggcacttacagaaaagtggtggctgctcgagcccccagaaaggtgcttggttcttccacctctgccactaattcgacatcagtttcatcgaggaaagctgaaaataaatatgcaggagggaaccccgtttgcgtgcgcccaactcccaagtggcaaaaaggaattggagaattctttaggttgtcccctaaagattctgaaaaagagaatcagattcctgaagaggcaggaagcagtggcttaggaaaagcaaagagaaaagcatgtcctttgcaacctgatcacacaaatgatgaaaaagaatagaactttctcattcatctttgaataacgtctccttgtttaccctggtattctagaatgtaaatttacataaatgtgtttgttccaattagctttgttgaacaggcatttaattaaaaaatttaggtttaaatttagatgttcaaaagtagttgtgaaatttgagaatttgtaagactaattatggtaacttagcttagtattcaatataatgcattgtttggtttcttttaccaaattaagtgtctagttcttgctaaaatcaagtcattgcattgtgttctaattacaagtatgttgtatttgagatttgcttagattgttgtactgctgccatttttattggtgtttgattattggaatggtgccatattgtcactccttctacttgctttaaaaagcagagttagatttttgcacattaaaaaattcagtattaatt

SEQ ID NO: 622 - protein, 111 aa, Homo sapien
MVRTKADSVPGTYRKVVAARAPRKVLGSSTSATNSTSVSSRKAENKYAGGNPVCVRPTPKWQKGIGEFFRLSPKDSEKENQIPEEAGSSGLGKAKRKACPLQPDHTNDEKE

SEQ ID NO: 623 - DNA, 5316 bp, Homo sapien
cggacgcgtgggaacgaagccacccattacggtatgatgatgtcaaacgtgatgctgatgctacagttacagcccctgctggcgcagcctctctgattctctctccctctccgcgtccagtgctgggctttttcagacaagtgcatctcctaaccaggtcacatttcagccgcgacccactctccgccagtcaccggaggcagaccgcgggaggagagctgaggacagccgcgtgcgcttcgccagcagcggggtgggaggaaggacattaaaatactgcagaagtcaagaccccccaggtcgaacccagaccacgatgcgcgccccgggctgcgggcggctggtgctgccgctgctgctcctggccgcggcagccctggccgaaggcgacgccaaggggctcaaggagggcgagacccccggcaatttcatggaggacgagcaatggctgtcgtccatctcgcagtacagcggcaagatcaagcactggaaccgcttccgagacgaagtggaggatgactatatcaagagctgggaggacaatcagcaaggagatgaagccctggataccaccaaggacccctgccagaaggtgaagtgcagccgccacaaggtgtgcattgcccagggctaccagcgggccatgtgcatcagtcgcaagaagctggagcacaggatcaagcagccgaccgtgaaactccatggaaacaaagactccatctgcaagccctgccacatggcccagcttgcctctgtctgcggctcagatggccacacttacagctctgtgtgtaagctggagcaacaggcgtgcctgagcagcaagcagctggcggtgcgatgcgagggcccctgcccctgccccacggagcaggctgccacctccaccgccgatggcaaaccagagacttgcaccggtcaggacctggctgacctgggagatcggctgcgggactggttccagctccttcatgagaactccaagcagaatggctcagccagcagtgtagccggcccggccagcgggctggacaagagcctgggggccagctgcaaggactccattggctggatgttctccaagctggacaccagtgctgacctcttcctggaccagacggagctggccgccatcaacctggacaagtacgaggtctgcatccgtcccttcttcaactcctgtgacacctacaaggatggccgggtctctactgctgagtggtgcttctgcttctggagggagaagcccccctgcctggcagagctggagcgcatccagatccaggaggccgccaagaagaagccaggcatcttcatcccgagctgcgacgaggatggctactaccggaagatgcagtgtgaccagagcagcggtgactgctggtgtgtggaccagctgggcctggagctgactggcacgcgcacgcatgggagccccgactgcgatgacatcgtgggcttctcgggggactttggaagcggtgtcggctgggaggatgaggaggagaaggagacggaggaagcaggcgaggaggccgaggaggaggagggcgaggcaggcgaggctgacgacgggggctacatctggtagacgccctcagaagccggctgccgggggggactcaacagcagagctctgagcagcagcaggcaacttcgagaacggatccagaaatgcagtcagaaggaccctgctccacctggggggactgggagtgtgagtgtgcatggcatgtgtgtggcacagatggctgggacgggtgacagtgtgagtgcatgtgtgcatgcatgtgtgtatgtgtgtgtgtgtgtggcatgcgctgacaaatgtgtccttgatccacactgctcctggcagagtgagtaacccaaaggccccttcggcctccttgtagctgttttctttccttttgttgttggttttaaaatacattcacacacaaatacaaattgacaggtcaaaatccatgaaatgagatcccccagccgtgtcctccagcccagccctgaccccttggtttctaccctggctccccttggtttctaccctggctcaaccgacccctgtctgcccttctccctcctgcttctgaggtcaagctctggcctgcgagcctgtccccattgcaaaggggagggaggggcagggagctgtctaccagctgaggtcctcccaaaactgggccgatgtggtgtgacatccccaccagcctcagatgagacgggccaggacgcccagccacagcaagccctgtccctttgccggatccccaaacactagagaagctctcctaacccaaggcggagaatgaaggtggtggcggcagaggaggagggcagcagctgagaggccagggacagggtgcctcgccaagctgtctgaggtctgtcccaggtggcccaggtggtgcaggtagaacagggtgaggagagggggtcggctcaacaggaggaggctgtggctgcagagcctggaggagcttttaggtgttgagatggggcagctctgaatcctagaccctggaatagcctgtcccttttctctgggtctcgtggtggagccatgatctgggctgctctcttggggacactgggtggtggttacacagttgacctctgcctggctcccccttggtgcaactcctgcctccatcccccttgctggggtcccctcatccacttgagggcgcctgagggccaggagcagcaggcaaggagcctgggtctaggctaagggggtgtgtgcccacctcctccctgacccttaacactcctgtcctgcccagaccaacagagagagctgtccctgagaccccggagagaagcagctgccgaaagctgcagcctttccgcactctgagaccatgatcttcctcctgccaggggagagccacccacaggccatgtccagccccacttccctcagcccccagggcttccttctggcccctctgaggattccctagggctgccccgcagaggggcttccccaagctctgttttgaagcctgcaatgtggaaaagtgagaagtcagagggaacaggacaggtgcagccgggctctgaggccacacctcacacctcgctgttccccaacatcccctgagcagtgtgagctcatctcaccagatgagaagaggccctgtgcatttcttttgtttgtttgttgctgttttcccccacccatccagttctcctcagcaaagcaaattccttaacacctttggtggagaatttcttacccagacttggggctgtgatgcccttcagtgcgtggtgagtgcagcgtgtgtgcgtgtgcctgtgtgtgaacctgggggccatcctggtggcctgggagcgtgaggagaggccccctgtgtgctgggtgagtggtgggtgtggggtcaatgcagtgaggctctctgggtgaggctcccaacctggcagtccccagcctcccagcatctgtgagcgtctgttggactttacagaagagcctcatcccgtctgcccctcactctgccctggaatcaacatcttccgagtccttcttgggggaaatagcagagccccacttaactccataaactgcttcccattccgcagcccagttctgattgttgaggtgtcgcgtcgttccaggtcccccagtcccctctttctcctgtcctctctctgtccttcacctccccactccagccccggctcagttcagggaaatgctgttccatatcagccctctgctctctgaggcagccgcgcctctgactcggagctacttgaaacttctgctcttgctaggattggagtctacctatctcttccatttgtcccagctggagttctggaactttcctcctcggggtgggggtgggggttgttaaggatgctggggggcctggggaaggaaggagttcagaggaagggtgtcccctgtcctcttgatgtcaccctccgctcctgggacacgtgctctctctgtctctgggtcttctggctgtgcacgtttgtgtgtccttgtaaatatgttttaggaagaaagcaaaagggactgaactagcctctggtaggattgcaggggtccagccttgcctgtttccgaagcccccacactgcctttcgccccactgagactggtcccctcaaaaggtagacaaaacagcagctccctgtggagctgaagggcggcctcaaagtggctttttgttagacaaggttaaggtttcctcatgagcaaggttgcagatcggtccttcctcagctccttgatttgtgaccttgaccaaggggcctgccacccagcccctccagtgccctctcctcgatgcctcgctccttcctgcccccactcccctggcttaggcaggtaggggaattagggccatgctggaagaagcttaaccatgtgttcaaagaacggtttcttgcttgcttggtcctggaactccccttggctgccccaggcctccttggcccatgggtgctgggggaggtggatgtcagatctggtaggttgcagcagagaaaataaatgtgccttgagagaccactcagagagggtccaagggtgatggagaaggaagcatggcctgggagcttggaagggaggggtggtgggtggcggcatcttgactgccccctgttgtcccacacgtggggggtggtcaccccccttcactccagcccgcctgccttcagccttccatgagcttcacctgcttccaacttcactttggagggggtggggtccgttggcatcaacacggggaccctctgcttcaccaaagcccgagccctcagcccctggggagaacaaatggctgagctttgatacctggggtcgtcgagaggctgcgggctggcggcagtcccaggggagagacaccacagaaggagacccagacatcccgaggaagttcccagcagagcaaactgctttccagcctgaagcctgcttaaactgtgtgatgtgcaataactgagcttagagttaggaattgtgttcaagtgcttggatttccgtctgtagatttaactgctgaaattgtatctctcagtaattttagatgtcttttaaaaaattgaaaaacaaagtgttagactgtgtgcgtgtgcgttgatgggcactcaagagtcccgtgagtcatccagccctgcctttcccctgcgcccccatcctctcacgtcccgccctgcctccacttggggaccctgcctcgtgtcgtctttatctgcctattactcagcctaaggaaacaagtacactccacacatgcataaaggaaatcaaatgttatttttaagaaaatggaaaataaaaactttataaacacc

SEQ ID NO: 624 - protein, 424 aa, Homo sapien
MRAPGCGRLVLPLLLLAAAALAEGDAKGLKEGETPGNFMEDEQWLSSISQYSGKIKHWNRFRDEVEDDYIKSWEDNQQGDEALDTTKDPCQKVKCSRHKVCIAQGYQRAMCISRKKLEHRIKQPTVKLHGNKDSICKPCHMAQLASVCGSDGHTYSSVCKLEQQACLSSKQLAVRCEGPCPCPTEQAATSTADGKPETCTGQDLADLGDRLRDWFQLLHENSKQNGSASSVAGPASGLDKSLGASCKDSIGWMFSKLDTSADLFLDQTELAAINLDKYEVCIRPFFNSCDTYKDGRVSTAEWCFCFWREKPPCLAELERIQIQEAAKKKPGIFIPSCDEDGYYRKMQCDQSSGDCWCVDQLGLELTGTRTHGSPDCDDIVGFSGDFGSGVGWEDEEEKETEEAGEEAEEEEGEAGEADDGGYIW

SEQ ID NO: 625 - DNA, 5316 bp, Homo sapien; identical to SEQ ID NO: 623

SEQ ID NO: 626 - protein, 424 aa, Homo sapien; identical to SEQ ID NO: 624

SEQ ID NO: 627 - DNA, 3900 bp, Homo sapien; identical to SEQ ID NO: 37

SEQ ID NO: 628 - protein, 187 aa, Homo sapien; identical to SEQ ID NO: 38

SEQ ID NO: 629 - DNA, 702 bp, Homo sapien
aggaagccgactaggcgaattcacttactgaccggcctgggctgctctgagacatggaggaagccagtgaaggtggaggaaatgatcgtgtgcggaacctgcaaagtgaggtggagggagttaagaatattatgacccagaatgtggagcggatcctggcccggggggaaaacttggaacatctccgcaacaagacagaggatctggaagccacatctgagcacttcaagacgacatcgcagaaggtggctcggaaattctggtggaagaacgtgaagatgattgtccttatctgcgtgattgtttttatcatcatcctcttcattgtgctctttgccactggtgccttctcttaagtaacagggaacctctcccacctgcccttcttttcagggacaaccctccataaatgtgtgccaagagggtctcctttcctgtcttcctctacagagaatgctgctcggtcctcctacccctcttcccgaggccctgctgccacgttgtatgccccagaaggtaccttggtcccccggaaggagagaaaaaagagagatggactgtggctgcatttcttgggtccttagagtgggctggagagacctagagggcccagcatgtggctgggaaactgttggtggccagtgggtaataaagacctttcagtatccctaaaaaaaaaaaaaaaaaaaaaaaaaaaaaaaa

SEQ ID NO: 630 - protein, 100 aa, Homo sapien
MEEASEGGGNDRVRNLQSEVEGVKNIMTQNVERILARGENLEHLRNKTEDLEATSEHFKTTSQKVARKFWWKNVKMIVLICVIVFIIILFIVLFATGAFS

SEQ ID NO: 631 - DNA, 3998 bp, Homo sapien
agcggagtcatcacaagcctgttcggcgggactgtgatggccagagagatgacgatcttaggatcggctgttttgactctcctgttggccggctatttggcacaacagtatttaccattgcctactcctaaagtgattggtattgatcttggcaccacctattgttctgttggggtgttttttcctggcacaggaaaagtaaaggtgattccagatgaaaatgggcatatcagcatacccagcatggtgtcttttactgacaatgatgtatatgtgggatatgaaagcgtagagctggcagattcaaatcctcaaaacacaatatatgatgccaaaagattcataggcaagatttttaccgcagaagagttggaggctgaaattggcagatacccatttaaggttttaaacaaaaatggaatggttgagttttctgtgacaagtaatgagaccatcacagtgtccccagaatatgttggctctcgactattgttgaagttaaaggaaatggcagaggcatatcttggaatgccagttgccaatgctgtcatttctgtaccagcagaatttgatctaaaacagagaaattcaacaattgaagctgctaaccttgcaggactgaagattttgagggtaataaatgaacccacagcagcagctatggcctatggtctccacaaggctgacgtcttccacgtcttggtgatagacttgggcggaggaactctagatgtgtctttactgaataaacaaggagggatgtttctaacccgagcaatgtctggaaacaataaacttggaggacaggacttcaatcagagattgcttcagtacttatataaacagatctatcaaacatatggcttcgtgccctctaggaaagaggaaatccacagattgagacaagctgtggaaatggtcaaattaaatctgactcttcatcaatctgctcagttgtcagtattactaacggtggaggagcaggacaggaaggaacctcacagtagtgacactgaactgccaaaagacaaactttcctcagcagatgaccatcgcgtgaacagtgggtttggacgtggcctttctgataagaaaagtggagaaagtcaggttttatttgaaacagaaatatcacggaaactctttgatacccttaatgaagacctctttcagaaaatactggtacccattcagcaagtattgaaagaaggccacctggaaaagactgagattgatgaggtggttttagttgggggctccactcgtattcctcggatccgtcaagtcattcaagagttctttggaaaagatcccaacacatctgtagaccctgacctagcagtagtaacgggagtggctatccaagcagggattgatggaggcttttggcctctccaagtcagtgctttagaaattcccaataagcatttacaaaaaaccaacttcaactgaattctgcagaaataatggttatttgtgaacttgtctgatgatctcttcccatttatcagattaccttttccacaaaagaaagtctctaaaatatcacagatttacctagagggcaacatttagatacaggaaaattttacatagtgttttgtcttaggattagacgtgaccagattgatcctgtttgattttggagagatcctattctaacaaatactctaaaatgataaaattgaggtacaactctcttaaaagagtatggataactatattttctggattctggaggttgataaccatatgcacttaacattatattctataaacattaagtagtgccagttatgagattcccagttcttactaaattgtattagcaggagctggtaattacttgtattatcacatgtaactaataatttgaactatacttgaaggaccgtgttgatgtcaggtatttacagtggttggaagatagcagtattattagcataagctgcatacgtaatattcagtaactgccatattatataacaaatttacattcacaaattcagtatcctgttaagtgtcatattcttgtaatctgcattctccaggagttttatgtgtttaatagatgaatttattttatttctaaaggtattcaaatgtttcagcaccatatagtagaaatacccaattatattctagttcctttatgtcctgtacatcattctctgcttggatttccattattctgtttggttagagaataaaatcggtaattgcatttgaagaatgtgttaatgtcataataaagccatgattgctatcttatttttgttatccaagacctttgcaaacattggcaaatagcatcaattacctactgtatttgtttctttgtttatattttcagtaagccctggggaatatagcatggaattgagctactaaatggttttggttccgttttacggagatttttcctcatatttagttttgaatgaggaaaatgtgctcaattataaaagctgtgttattgttttctattattatttttaaataatcacacttggactcttttcaaacattaggttagtttgtaatgaaagcaaaaaatttgtgaatactggaagtaacgtggaaatctaatgtggaagccattgtggcaaggtttctacaaatcggcatttggagcagagttgtttgtttttgttgtttgtttcctttaagaaaaaccacagggaccaagaaagaaaatataacagtttgatttctgtcatacccattgtatttgaagatatatggatacagattatatatatatatacatattttccttaatagaggaatgcttcgtattattcaaaaattatatcctgatcacctttttttgttttttattgtaaagtatctctgcttcatccattgctgaattcgataggatgttgaaatgctggtcaccaaaaaaggaaactgagcaaattcatttcaacaacatcaaaacttcagcttctcatagtaaaaagctgaatgttactaatatttttcatatctaaaaaagaattcttagcaatgaaattgctgttaaaacacaaatttcaatcaaatacttttgtgtatagaaaatatgtatagtaggtagatagaaaagtataaaatgtttgttgaagtatcttattttagaatgaatggagaaatgccaaagatgaatccttcactgcattatgaaaatatttcacatgttctcttggactttatataaatctgtaatagattttagaattgaaaaattctttgtgaaggtcttctaaaagtgttccaatttatctcaaaatctccatatataggatcagcttaaaacataaagaaaaccttgaatttctcaaatgtttgagatgttcaagacagtctcttaatccgttaatgcttttggaaacaattgacaaaatagggcaggcagctcatctcatgtcctgaagttggaatttaaataattcctatttgcaaattagaatgacagtgttggaatttggaggcagtagttgagcatattctctagtatatagctacacctttaataaaatgaaggaatgtcttcaatcatattttagtgggctatttataaatagtcttgaagtcaatttagtttatttatttaaaagataatgcatcctgaaagggatcatttatgaataacaatctgaagtcttttcataaaaaaaattaataaactttagttgtacatttagccagcgttatttgaagtatgtaacttttaaaatattaagtgtcttgtatgattagaatatgtgaatgagtaacttattttgtatcaggaatgttttggtactgtgttttcactcaaaccactgacttaacagatactgctgtgtataacatgtactaaatattacagttattgtgcataacagattgttcctcttatatttgtgtgtatacaggcaattcatgttttaatgtaaataaataccattttgcagtttgttttttaaaaaaaaaaaaaaaaaaaaaaaaaaaaaataaaaaaaaaaaaaaaa

SEQ ID NO: 632 - protein, 471 aa, Homo sapien
MAREMTILGSAVLTLLLAGYLAQQYLPLPTPKVIGIDLGTTYCSVGVFFPGTGKVKVIPDENGHISIPSMVSFTDNDVYVGYESVELADSNPQNTIYDAKRFIGKIFTAEELEAEIGRYPFKVLNKNGMVEFSVTSNETITVSPEYVGSRLLLKLKEMAEAYLGMPVANAVISVPAEFDLKQRNSTIEAANLAGLKILRVINEPTAAAMAYGLHKADVFHVLVIDLGGGTLDVSLLNKQGGMFLTRAMSGNNKLGGQDFNQRLLQYLYKQIYQTYGFVPSRKEEIHRLRQAVEMVKLNLTLHQSAQLSVLLTVEEQDRKEPHSSDTELPKDKLSSADDHRVNSGFGRGLSDKKSGESQVLFETEISRKLFDTLNEDLFQKILVPIQQVLKEGHLEKTEIDEVVLVGGSTRIPRIRQVIQEFFGKDPNTSVDPDLAVVTGVAIQAGIDGGFWPLQVSALEIPNKHLQKTNFN

SEQ ID NO: 633 - DNA, 1333 bp, Homo sapien
aagccccgcgtctccgccttgccgtccagcctgtccttggtgtggggtgcttggaagtgtgagcaccctctctggctctttgccggccccaagggtcgttgcggcggcccccgggcccagtcatcagccctcttttccggtgccggaactatcgtactggtgccctagtttcccagccggcaggcggagtgaggaggaagcggaggcgagaccgcgctcaacactggggaaaggaaggaggcgggccctgcgcgcagcattttgggaaagagtggaattctgggtgttaggcccgccattcgcttgactcacgccttcgccgtagcatctttcgcagcggaccgaagagaagaaaagtaggccagagccgaactctcttcctgccaagatgtctattggtgtgccgattaaagtactgcatgaggccgagggccacattgtgacatgtgagacgaacaccggtgaggtatatcgggggaagctcattgaagcagaggacaacatgaactgccagatgtccaacatcacagtcacatacagagatggccgagtggcacagctggagcaggtatacatccgtggcagcaaaatccgctttctgattttgcctgacatgctgaagaacgcacccatgttaaagagcatgaaaaataaaaaccaaggctcaggggctggccgaggaaaagctgctattctcaaggcccaagtggccgcaagaggaagaggacgtggaatgggacgtggaaacatctttcaaaagcgaagataattttctaagttgaacagaactttgtccttttttctttcaggttatctgagttcattggagtgggtgcttgtgcatatatgctaggtatcttttgccatctttctctttagatcaggggaaatgtttaagctaaataaatctggggggttttttgttctgttttgttttgttttctttgagaaaataaggactttgtgttcatttgaagtttgctttggctaaattttgacaccctgggggatgtcctgggagaatgccagtactttgaaatagcacagctattgatgagattttaagctgctgttcctggccagttgcaggttaagccccagaaaagttcaccttggagaagctccgagaacacacagattgtgtctcattcatcttcagacacaggcacatagtgtggcactttgttcagttaacatttgtggagctgtcatcagctcagctttaacaacacaggtgactctttcccttgataaagtcataggtaattcaggggctgggtgcggcggctcacgcatgtaatcccagcactttgggaggccaaggcgggcggat

SEQ ID NO: 634 - protein, 126 aa, Homo sapien
MSIGVPIKVLHEAEGHIVTCETNTGEVYRGKLIEAEDNMNCQMSNITVTYRDGRVAQLEQVYIRGSKIRFLILPDMLKNAPMLKSMKNKNQGSGAGRGKAAILKAQVAARGRGRGMGRGNIFQKRR

SEQ ID NO: 635 - DNA, 3336 bp, Homo sapien
  Unsure 3317: Unknown base
cggcggcgactgcagtctggagggtccacacttgtgattctcaatggagagtgaaaacgcagattcataatgaaagctagcccccgtcggccactgattctcaaaagacggaggctgccccttcctgttcaaaatgccccaagtgaaacatcagaggaggaacctaagagatcccctgcccaacaggagtctaatcaagcagaggcctccaaggaagtggcggagtccaactcttgcaagtttccagctgggatcaagattattaaccaccccaccatgcccaacacgcaagtagtggccatccccaacaatgctaatattcacagcatcatcacagcactgactgccaagggaaaagagagtggcagtagtgggcccaacaaattcatcctcatcagctgtgggggagccccaactcagcctccaggactccggcctcaaacccaaaccagctatgatgccaaaaggacagaagtgaccctggagaccttgggaccaaaacctgcagctagggatgtgaatcttcctagaccacctggagccctttgcgagcagaaacgggagacctgtgcagatggtgaggcagcaggctgcactatcaacaatagcctatccaacatccagtggcttcgaaagatgagttctgatggactgggctcccgcagcatcaagcaagagatggaggaaaaggagaattgtcacctggagcagcgacaggttaaggttgaggagccttcgagaccatcagcgtcctggcagaactctgtgtctgagcggccaccctactcttacatggccatgatacaattcgccatcaacagcactgagaggaagcgcatgactttgaaagacatctatacgtggattgaggaccactttccctactttaagcacattgccaagccaggctggaagaactccatccgccacaacctttccctgcacgacatgtttgtccgggagacgtctgccaatggcaaggtctccttctggaccattcaccccagtgccaaccgctacttgacattggaccaggtgtttaagccactggacccagggtctccacaattgcccgagcacttggaatcacagcagaaacgaccgaatccagagctccgccggaacatgaccatcaaaaccgaactccccctgggcgcacggcggaagatgaagccactgctaccacgggtcagctcatacctggtacctatccagttcccggtgaaccagtcactggtgttgcagccctcggtgaaggtgccattgcccctggcggcttccctcatgagctcagagcttgcccgccatagcaagcgagtccgcattgcccccaaggtgctgctagctgaggaggggatagctcctctttcttctgcaggaccagggaaagaggagaaactcctgtttggagaagggttttctcctttgcttccagttcagactatcaaggaggaagaaatccagcctggggaggaaatgccacacttagcgagacccatcaaagtggagagccctcccttggaagagtggccctccccggccccatctttcaaagaggaatcatctcactcctgggaggattcgtcccaatctcccaccccaagacccaagaagtcctacagtgggcttaggtccccaacccggtgtgtctcggaaatgcttgtgattcaacacagggagaggagggagaggagccggtctcggaggaaacagcatctactgcctccctgtgtggatgagccggagctgctcttctcagaggggcccagtacttcccgctgggccgcagagctcccgttcccagcagactcctctgaccctgcctcccagctcagctactcccaggaagtgggaggaccttttaagacacccattaaggaaacgctgcccatctcctccaccccgagcaaatctgtcctccccagaacccctgaatcctggaggctcacgcccccagccaaagtagggggactggatttcagcccagtacaaacctcccagggtgcctctgaccccttgcctgaccccctggggctgatggatctcagcaccactcccttgcaaagtgctcccccccttgaatcaccgcaaaggctcctcagttcagaacccttagacctcatctccgtcccctttggcaactcttctccctcagatatagacgtccccaagccaggctccccggagccacaggtttctggccttgcagccaatcgttctctgacagaaggcctggtcctggacacaatgaatgacagcctcagcaagatcctgctggacatcagctttcctggcctggacgaggacccactgggccctgacaacatcaactggtcccagtttattcctgagctacagtagagccctgcccttgcccctgtgctcaagctgtccaccatcccgggcactccaaggctcagtgcaccccaagcctctgagtgaggacagcaggcagggactgttctgctcctcatagctccctgctgcctgattatgcaaaagtagcagtcacaccctagccactgctgggaccttgtgttccccaagagtatctgattcctctgctgtccctgccaggagctgaagggtgggaacaacaaaggcaatggtgaaaagagattaggaaccccccagcctgtttccattctctgcccagcagtctcttaccttccctgatctttgcagggtggtccgtgtaaatagtataaattctccaaattatcctctaattataaatgtaagcttatttccttagatcattatccagagactgccagaaggtgggtaggatgacctggggtttcaattgacttctgttccttgcttttagttttgatagaagggaagacctgcagtgcacggtttcttccaggctgaggtacctggatcttgggttcttcactgcagggacccagacaagtggatctgcttgccagagtcctttttgcccctccctgccacctccccgtgtttccaagtcagctttcctgcaagaagaaatcctggttaaaaaagtcttttgtattgggtcaggagttgaatttggggtgggaggatggatgcaactgaagcagagtgtgggtgcccagatgtgcgctattagatgtttctctgataatgtccccaatcataccagggagactggcattgacgagaactcaggtggaggcttgagaaggccgaaagggcccctgacctgcctggcttccttagcttgcccctcagctttgcaaagagccaccctaggccccagctgaccgcatgggtgtgagccagcttgagaacactaactactcaataaaagcgaaggtggaccnaaaaaaaaaaaaaaaaaaa

SEQ ID NO: 636 - protein, 763 aa, Homo sapien
  Unsure 3317: Unknown amino acid
MKASPRRPLILKRRRLPLPVQNAPSETSEEEPKRSPAQQESNQAEASKEVAESNSCKFPAGIKIINHPTMPNTQVVAIPNNANIHSIITALTAKGKESGSSGPNKFILISCGGAPTQPPGLRPQTQTSYDAKRTEVTLETLGPKPAARDVNLPRPPGALCEQKRETCADGEAAGCTINNSLSNIQWLRKMSSDGLGSRSIKQEMEEKENCHLEQRQVKVEEPSRPSASWQNSVSERPPYSYMAMIQFAINSTERKRMTLKDIYTWIEDHFPYFKHIAKPGWKNSIRHNLSLHDMFVRETSANGKVSFWTIHPSANRYLTLDQVFKPLDPGSPQLPEHLESQQKRPNPELRRNMTIKTELPLGARRKMKPLLPRVSSYLVPIQFPVNQSLVLQPSVKVPLPLAASLMSSELARHSKRVRIAPKVLLAEEGIAPLSSAGPGKEEKLLFGEGFSPLLPVQTIKEEEIQPGEEMPHLARPIKVESPPLEEWPSPAPSFKEESSHSWEDSSQSPTPRPKKSYSGLRSPTRCVSEMLVIQHRERRERSRSRRKQHLLPPCVDEPELLFSEGPSTSRWAAELPFPADSSDPASQLSYSQEVGGPFKTPIKETLPISSTPSKSVLPRTPESWRLTPPAKVGGLDFSPVQTSQGASDPLPDPLGLMDLSTTPLQSAPPLESPQRLLSSEPLDLISVPFGNSSPSDIDVPKPGSPEPQVSGLAANRSLTEGLVLDTMNDSLSKILLDISFPGLDEDPLGPDNINWSQFIPELQ

SEQ ID NO: 637 - DNA, 1536 bp, Homo sapien
ggggggggggggaccacttggcctgcctccgtcccgccgcgccacttggcctgcctccgtcccgccgcgccacttcgcctgcctccgtcccccgcccgccgcgccatgcctgtggccggctcggagctgccgcgccggcccttgccccccgccgcacaggagcgggacgccgagccgcgtccgccgcacggggagctgcagtacctggggcagatccaacacatcctccgctgcggcgtcaggaaggacgaccgcacgggcaccggcaccctgtcggtattcggcatgcaggcgcgctacagcctgagagatgaattccctctgctgacaaccaaacgtgtgttctggaagggtgttttggaggagttgctgtggtttatcaagggatccacaaatgctaaagagctgtcttccaagggagtgaaaatctgggatgccaatggatcccgagactttttggacagcctgggattctccaccagagaagaaggggacttgggcccagtttatggcttccagtggaggcattttggggcagaatacagagatatggaatcagattattcaggacagggagttgaccaactgcaaagagtgattgacaccatcaaaaccaaccctgacgacagaagaatcatcatgtgcgcttggaatccaagagatcttcctctgatggcgctgcctccatgccatgccctctgccagttctatgtggtgaacagtgagctgtcctgccagctgtaccagagatcgggagacatgggcctcggtgtgcctttcaacatcgccagctacgccctgctcacgtacatgattgcgcacatcacgggcctgaagccaggtgactttatacacactttgggagatgcacatatttacctgaatcacatcgagccactgaaaattcagcttcagcgagaacccagacctttcccaaagctcaggattcttcgaaaagttgagaaaattgatgacttcaaagctgaagactttcagattgaagggtacaatccgcatccaactattaaaatggaaatggctgtttagggtgctttcaaaggagcttgaaggatattgtcagtctttaggggttgggctggatgccgaggtaaaagttctttttgctctaaaagaaaaaggaactaggtcaaaaatctgtccgtgacctatcagttattaatttttaaggatgttgccactggcaaatgtaactgtgccagttctttccataataaaaggctttgagttaactcactgagggtatctgacaatgctgaggttatgaacaaagtgaggagaatgaaatgtatgtgctcttagcaaaaacatgtatgtgcatttcaatcccacgtacttataaagaaggttggtgaatttcacaagctatttttggaatatttttagaatattttaagaatttcacaagctattccctcaaatctgagggagctgagtaacaccatcgatcatgatgtagagtgtggttatgaactttatagttgttttatatgttgctataataaagaagtgttctgc

SEQ ID NO: 638 - protein, 313 aa, Homo sapien
MPVAGSELPRRPLPPAAQERDAEPRPPHGELQYLGQIQHILRCGVRKDDRTGTGTLSVFGMQARYSLRDEFPLLTTKRVFWKGVLEELLWFIKGSTNAKELSSKGVKIWDANGSRDFLDSLGFSTREEGDLGPVYGFQWRHFGAEYRDMESDYSGQGVDQLQRVIDTIKTNPDDRRIIMCAWNPRDLPLMALPPCHALCQFYVVNSELSCQLYQRSGDMGLGVPFNIASYALLTYMIAHITGLKPGDFIHTLGDAHIYLNHIEPLKIQLQREPRPFPKLRILRKVEKIDDFKAEDFQIEGYNPHPTIKMEMAV

SEQ ID NO: 639 - DNA, 2135 bp, Homo sapien
gccccaggagcccggcgggtccgggactcccgtccgtgccggtgcgggcgccggcatgtggctgtgggaggaccagggcggcctcctgggccctttctccttcctgctgctagtgctgctgctggtgacgcggagcccggtcaatgcctgcctcctcaccggcagcctcttcgttctactgcgcgtcttcagctttgagccggtgccctcttgcagggccctgcaggtgctcaagccccgggaccgcatttctgccatcgcccaccgtggcggcagccacgacgcgcccgagaacacgctggcggccattcggcaggcagctaagaatggagcaacaggcgtggagttggacattgagtttacttctgacgggattcctgtcttaatgcacgataacacagtagataggacgactgatgggactgggcgattgtgtgatttgacatttgaacaaattaggaagctgaatcctgcagcaaaccacagactcaggaatgatttccctgatgaaaagatccctaccctaagggaagctgttgcagagtgcctaaaccataacctcacaatcttctttgatgtcaaaggccatgcacacaaggctactgaggctctaaagaaaatgtatatggaatttcctcaactgtataataatagtgtggtctgttctttcttgccagaagttatctacaagatgagacaaacagatcgggatgtaataacagcattaactcacagaccttggagcctaagccatacaggagatgggaaaccacgctatgatactttctggaaacattttatatttgttatgatggacattttgctcgattggagcatgcataatatcttgtggtacctgtgtggaatttcagctttcctcatgcaaaaggattttgtatccccggcctacttgaagaagtggtcagctaaaggaatccaggttgttggttggactgttaatacctttgatgaaaagagttactacgaatcccatcttggttccagctatatcactgacagcatggtagaagactgcgaacctcacttctagactttcacggtgggacgaaacgggttcagaaactgccaggggcctcatacagggatatcaaaataccctttgtgctagcccaggccctggggaatcaggtgactcacacaaatgcaatagttggtcactgcatttttacctgaaccaaagctaaacccggtgttgccaccatgcaccatggcatgccagagttcaacactgttgctcttgaaaatctgggtctgaaaaaacgcacaagagcccctgccctgccctagctgaggcacacagggagacccagtgaggataagcacagattgaattgtacaatttgcagatgcagatgtaaatgcatgggacatgcatgataactcagagttgacattttaaaacttgccacacttatttcaaatatttgtactcagctatgttaacatgtactgtagacatcaaacttgtggccatactaataaaattattaaaaggagcactaaaggaaaactgtgtgccaagcatcatatcctaaggcatacggaatttggggaagccaccatgcaatccagtgaggcttcagtgtacagcaaccaaaatggtagggaggtcttgaagccaatgagggatttatagcatcttgaatagagagctgcaaaccaccagggggcagagttgcacttttccaggctttttaggaagctctgcaacagatgtgatctgatcataggcaattagaactggaagaaacttccaaaaatatctaggtttgtcctcattttacaaatgaggaaactaaactctgtggaagggaaggggttgcctcaaaagtcacagcttagctgggcacagtggctcatgccgataatcccagcaattcagaaagctgaggcaggaggattacttgaggccagactgggcaatatagcaagaccccatctctaaaaaattaggcatggtggtgcatgcctgtattcccagctactcaggaggttgaggtgggaggatcacttgagcccagaagttcaaggctgcaatgagccatgattacaccacggcactacaaccttggtggcacagtgagaacctgactcttaaaaaaaaaaaaaaaaaa

SEQ ID NO: 640 - protein, 331 aa, Homo sapien
MWLWEDQGGLLGPFSFLLLVLLLVTRSPVNACLLTGSLFVLLRVFSFEPVPSCRALQVLKPRDRISAIAHRGGSHDAPENTLAAIRQAAKNGATGVELDIEFTSDGIPVLMHDNTVDRTTDGTGRLCDLTFEQIRKLNPAANHRLRNDFPDEKIPTLREAVAECLNHNLTIFFDVKGHAHKATEALKKMYMEFPQLYNNSVVCSFLPEVIYKMRQTDRDVITALTHRPWSLSHTGDGKPRYDTFWKHFIFVMMDILLDWSMHNILWYLCGISAFLMQKDFVSPAYLKKWSAKGIQVVGWTVNTFDEKSYYESHLGSSYITDSMVEDCEPHF

SEQ ID NO: 641 - DNA, 2701 bp, Homo sapien
ccgccgtagcgcgtcttgggtctcccggctgccgctgctgccgccgccgcctcgggtcgtggagccaggagcgacgtcaccgccatggcaggcatcaaagctttgattagtttgtcctttggaggagcaatcggactgatgtttttgatgcttggatgtgcccttccaatatacaacaaatactggcccctctttgttctatttttttacatcctttcacctattccatactgcatagcaagaagattagtggatgatacagatgctatgagtaacgcttgtaaggaacttgccatctttcttacaacgggcattgtcgtgtcagcttttggactccctattgtatttgccagagcacatctgattgagtggggagcttgtgcacttgttctcacaggaaacacagtcatctttgcaactatactaggctttttcttggtctttggaagcaaggacgacttcagctggcagcagtggtgaaaagaaattactgaactattgtcaaatggacttcctgtcatttgttggccattcacgcacacaggagatggggcagttaatgctgaatggtatagcaagcctcttgggggtattttaggtgctcccttctcacttttattgtaagcatactattttcacagagacttgctgaaggattaaaaggattttctcttttggaaaagcttgactgatttcacacttatctatagtatgctttttgtggtgtcctgctgaatttaaatatttatgtgtttttcctgttaggttgattttttttggaatcaatatgcaatgttaaacacttttttaatgtaatcatttgcattggttaggaattcagaattccgccggctctattactggtcaagtacatcttttctcttaaaattatttagcctccattattacaaaaaattataaaaataagttttcagtcagtcaggatgacatcactcccaatgttatgcagacatacagacggttggcatacgttatagactgtatactcagtgcaaatatagctgcatttatacctcagaggggccaagtgttaatgcccatgccctccgttaagggttgttggttttactggtagacagatgttttgtggattgaaaattattttatggaattgctacagaggagtgcttttcttctcaattgttagaagaatttatgttaaactttaaggtaagggtgtaaaaacatttttgagataaggtttttatttatgtttattattgttagagtgagttgcaatgtgggaagaaatgacattgaaattccagtttttgaatcctgtttctatttataagtgaaatttgtgatctcctatcaacctttcatgttttaccctgttaaaatggacatacatggaaccactactgatgagggacagttgtatgtttgcatcatatatgccagaaaaccttcctctgcttcctccttttgacttatttggtatgttgtatatattacataaaataacttttcaaatatagtttaataacacttagaagtgtttacttacctggaaaataattgctatgccgtacattcagagtgccccctcccctgcaaggccttgccatgattaacaagtaacttgttagtcttacagataattcatgcattaacagtttaagatttagaccatggtaatagtagttcttattctctaaggttatatcatatgtaatttaaaagtatttttaagccaagtttcctgtatacctctgaactgttttgattttgagttcatcatgatagatctgctgtttccttataaaaggcatttgttgtgtgagttaatgcaaagtagccaagtccagctatatagcagcttcagaaacatacctgaccaaaaaattcccagtaaccaggcatgatcaatttatagtggtcgtttacatctaataattatcaggacttttttcaggagtgggttataaaaacattcaagttggtctgacagtattttgttaaggatatttgtttgtatgtttattcagtatacttacataaaaattatttcgccatcagccaaaactcagtaatcatgacagctgtctgttgttttatgaagtttatttctcaagaaaatgggaataaatttgggatttgttcagcttttttactaaagatgcctaaagccacaggttttattgcctaacttaagccatgacttttagatatgagatgacgggaagcaggacgaaatatcggcgtgtggctggagccttcccactggaggctgaaagtggcttgtggtattataatgttcagatttcaagaggaaggtgcaggtacacatgagttagagagctggtgagacagttgggaactctttgtgcttgtgatctactggactttttttttgcaggaagtgcattctctggtccttccctattttctgttctggatgtcagtgcagtgcactgctactgttttatccacttggccacagactttttctaacagctgcgtattatttctatatactaattgcattggcagcattgtgtctttgaccttgtatactagcttgacatagtgctgtctctgatttctaggctagttacttgagatatgaattttccatagaatatgcactgatacaacattaccattcttctatggaaagaaaacttttgatgatgaaacaataaagattttaaatatcaaaaaaaaaaaaaaaaaa

SEQ ID NO: 642 - protein, 131 aa, Homo sapien
MAGIKALISLSFGGAIGLMFLMLGCALPIYNKYWPLFVLFFYILSPIPYCIARRLVDDTDAMSNACKELAIFLTTGIVVSAFGLPIVFARAHLIEWGACALVLTGNTVIFATILGFFLVFGSKDDFSWQQW

SEQ ID NO: 643 - DNA, 2701 bp, Homo sapien; identical to SEQ ID NO: 641

SEQ ID NO: 644 - protein, 131 aa, Homo sapien; identical to SEQ ID NO: 642

SEQ ID NO: 645 - DNA, 2758 bp, Homo sapien
ctatccgcgcgcgtcgccggcccagtcctgtcgctgacgggaggatctgaagccggccgcaggtcaaagagtaaaatgaagtacattctggttactggtggtgttatatcaggaattggaaaaggaatcattgccagcagtgtgggcacaatactcaagtcatgtggtttacatgtaacttcaatcaaaattgacccctacattaacattgatgcaggaacattctctccttatgagcatggtgaggtttttgtgctggatgatggtggggaagtagaccttgacctgggtaactatgagcggttccttgacatccgcctcaccaaggacaataatctgaccactggaaagatataccagtatgtcattaacaaggaacggaaaggagattacttggggaaaactgtccaagttgtccctcatatcacagatgcaatccaggagtgggtgatgagacaggcgttaatacctgtagatgaagatggcctggaacctcaagtgtgtgttattgagcttggtggaaccgtgggggacatagaaagcatgccctttattgaggccttccgtcagttccaattcaaggtcaaaagagagaacttttgtaacatccacgtcagtctagttccccagccaagttcaacaggggaacagaagactaaacctacccagaatagtgttcgggaacttagaggacttgggctttccccagatctggttgtatgcaggtgctcaaatccacttgacacatcagtgaaggagaaaatatcaatgttctgccatgttgagcctgaacaagtgatctgtgtccacgatgtctcatccatctaccgagtccccttgttgttagaggagcaaggggttgtagattattttcttcgaagacttgaccttcctattgagaggcagccaagaaaaatgctgatgaaatggaaagagatggctgacagatatgatcgcttgctggagacctgctctattgcccttgtggcgaaatacaccgagttctcagactcctatgcctctgtcattaaggctctggagcattctgcactggccatcaaccacaaattggaaatcaagtacatagattctgcggacttggagcccatcacctcgcaagaagagcccgtgcgctaccacgaagcttggcagaagctctgtagtgctcatggagtgctggttccaggaggatttggtgttcgaggaacagaaggaaaaatccaagcaattgcctgggctcggaatcagaaaaagccttttttgggcgtgtgcttagggatgcagttggcagtggttgaattctcaagaaacgtgctgggatggcaagatgccaattctacagagtttgaccctacgaccagtcatcccgtggtcgtagacatgccagaacacaacccagggcagatgggcggaaccatgaggctgggcaagaggagaaccctgttccagaccaagaactcagtcatgaggaaactctatggagacgcagactacttggaagagaggcaccgccaccgatttgaggtgaatccagtctggaaaaagtgtttggaagaacaaggcttgaagtttgttggccaagatgttgaaggagagagaatggaaattgtggagttagaagatcatcccttttttgttggggttcagtaccaccctgagttcctgtccaggcctatcaagccctccccaccatactttggcctcctcctggcctctgtggggcggctctcacattacctccagaaaggctgcaggctctcacccagggacacctatagtgacaggagtggaagcagctcccctgactctgaaatcaccgaactgaagtttccatcaataaatcatgactgatcttgtagcggatgattcttcaagagacccttcaaacttgggtagagtttacagctctgactttacactcggctttggagactttctttaaattatgtttttattaagattattttattatgcggaaaggtatttgggaaacttgtcacttgcatgtcccatcacgtgtactggctcctctgtggtgtctgcctgttgcgtgacactctccttgcagttcttgagttgcggcagaacatcgcgatgggaaccgatggtgggtggggctgcagatgtccccatcggtcaccttgtttctcaactacctcgcatcattgcagatcgtagcgcgttgcctgtcgctttcccttggatacctagaccgttataaagtgtgccacatggacttaccgagcatggagagaggattttagctaggatttgaacacttggtgctgggaacctcagggtattgcttgccactaagccatgaaaccagagacaaaatctctatactgccctgagttggggggaattctcagtgccaactgtggctggtcctcattcaaagggacggtcagtttggtgtcaacatgaaacaccaagatgtctgtctctgaagcgtgattttaaaatccccatgcctgtgcgtgcgcttcctatttctagggctgggaaacactccttgcatcaaggggtcacttacagaacaaagaatcttttgggggaaacttcctctaaaaccctctcatatatagacagctttgactggagggtccatttttcttccaggatggtgttactgcagttgaagggcaatatgaagttactttcttaatgtgacctagcaataggcatagctacgtggcactatattctggccagactcgatgtgtactctaacttaagaaataaatcagtaaggcag

SEQ ID NO: 646 - protein, 591 aa, Homo sapien
MKYILVTGGVISGIGKGIIASSVGTILKSCGLHVTSIKIDPYINIDAGTFSPYEHGEVFVLDDGGEVDLDLGNYERFLDIRLTKDNNLTTGKIYQYVINKERKGDYLGKTVQVVPHITDAIQEWVMRQALIPVDEDGLEPQVCVIELGGTVGDIESMPFIEAFRQFQFKVKRENFCNIHVSLVPQPSSTGEQKTKPTQNSVRELRGLGLSPDLVVCRCSNPLDTSVKEKISMFCHVEPEQVICVHDVSSIYRVPLLLEEQGVVDYFLRRLDLPIERQPRKMLMKWKEMADRYDRLLETCSIALVAKYTEFSDSYASVIKALEHSALAINHKLEIKYIDSADLEPITSQEEPVRYHEAWQKLCSAHGVLVPGGFGVRGTEGKIQAIAWARNQKKPFLGVCLGMQLAVVEFSRNVLGWQDANSTEFDPTTSHPVVVDMPEHNPGQMGGTMRLGKRRTLFQTKNSVMRKLYGDADYLEERHRHRFEVNPVWKKCLEEQGLKFVGQDVEGERMEIVELEDHPFFVGVQYHPEFLSRPIKPSPPYFGLLLASVGRLSHYLQKGCRLSPRDTYSDRSGSSSPDSEITELKFPSINHD

SEQ ID NO: 647 - DNA, 6888 bp, Homo sapien
  Unsure 4245-4279: Unknown base
cggaggagcgcgcggttgccgggcgggacgggaaccgggtctgcgcgcgagccgggcggtgggcgcggacagggccgagggcgcccgggagccgtgtcaggcggcggcgaggagcgggcgcgccgggcgcggggagccgtcggcggccgctcgctgcggggacaccccggtgaatgagctctcgccgccaggcgcacggcgtaggggagcctcgcagtgcggcggcgtgcggcggcggctcggggggcgaggcgggccgcctgttcccggggaaggaggcgcgggcgtctgagcgaggccgggcgcggcggccttctctcacgcgccccccgagccagcgcccgcctcccgcgcccgcctctcttctcccgtcggcccagactatccgctcccaccgcgccccccggcccacctggtggccccggccctggccgccgcccccgcggcggttcccggagctcgtcccggacgcgcgcccgggcggcgggggctcggcggccaccgctgcctcgggggagcgagggcgggagggtgtgtgtgcgcgctgtgagcagggggtgccggcggggctgcagcggaggcactttggaagaatgactctggagtccatcatggcgtgctgcctgagcgaggaggccaaggaagcccggcggatcaacgacgagatcgagcggcagctccgcagggacaagcgggacgcccgccgggagctcaagctgctgctgctcgggacaggagagagtggcaagagtacgtttatcaagcagatgagaatcatccatgggtcaggatactctgatgaagataaaaggggcttcaccaagctggtgtatcagaacatcttcacggccatgcaggccatgatcagagccatggacacactcaagatcccatacaagtatgagcacaataaggctcatgcacaattagttcgagaagttgatgtggagaaggtgtctgcttttgagaatccatatgtagatgcaataaagagtttatggaatgatcctggaatccaggaatgctatgatagacgacgagaatatcaattatctgactctaccaaatactatcttaatgacttggaccgcgtagctgaccctgcctacctgcctacgcaacaagatgtgcttagagttcgagtccccaccacagggatcatcgaatacccctttgacttacaaagtgtcattttcagaatggtcgatgtagggggccaaaggtcagagagaagaaaatggatacactgctttgaaaatgtcacctctatcatgtttctagtagcgcttagtgaatatgatcaagttctcgtggagtcagacaatgagaaccgaatggaggaaagcaaggctctctttagaacaattatcacatacccctggttccagaactcctcggttattctgttcttaaacaagaaagatcttctagaggagaaaatcatgtattcccatctagtcgactacttcccagaatatgatggaccccagagagatgcccaggcagcccgagaattcattctgaagatgttcgtggacctgaacccagacagtgacaaaattatctactcccacttcacgtgcgccacagacaccgagaatatccgctttgtctttgctgccgtcaaggacaccatcctccagttgaacctgaaggagtacaatctggtctaattgtgcctcctagacacccgccctgcccttccctggtgggctattgaagatacacaagagggactgtatttctgtggaaaacaatttgcataatactaatttattgccgtcctggactctgtgtgagcgtgtccacagagtttgtagtaaatattatgattttatttaaactattcagaggaaaaacagaggatgctgaagtacagtcccagcacatttcctctctatcttttttttaggcaaaaccttgtgactcagtgtattttaaattctcagtcatgcactcacaaagataagacttgtttctttctgtctctctctctttttcttttctatggagcaaaacaaagctgatttcccttttttcttcccccgctaattcatacctccctcctgatgtttttcccaggttacaatggcctttatcctagttccattcttggtcaagtttttctctcaaatgatacagtcaggacacaccgttcgatttaagccatcatcagcttaatttaagtttgtagtttttgctgaaggattatatgtattaatacttacggttttaaatgtgttgctttggatacacacatagtttcttttttaatagaatatactgtcttgtctcactttggactgggacagtggatgcccatctaaaagttaagtgtcatttcttttagatgtttaccttcagccatagcttgattgctcagagaaatatgcagaaggcaggatcaaagacacacaggagtcctttcttttgaaatgccacgtgccattgtctttcctcccttctttgcttctttttcttaccctctctttcaattgcagatgccaaaaaagatgccaacagacactacattaccctaatggctgctacccagaacctttttataggttgttcttaatttttttgttgttgttgttcaagcttttcctttcttttttttcttagtgtttgggccacgattttaaaatgacttttattatgggtatgtgttgccaaagctggctttttgtcaaataaaatgaatacgaacttaaaaaataaaagctggtatcttaaaatgtaagagagtaagactgtgaagcctaaaatgactggctgagaatgaaccagaaatgccatttgccaaacagttgtaactagaaatttgattctcacagtccattcttttctttgtccttaagatgacattgttagtgttcacgtcccatgttcagtgtccaaaccggcaatgtaaaaagtatcctgtgtggcttaacaggaaatctgtttatgtctctttatttgaaaccagttttactctcagtggttctttaagttcaatgaagtctgccaggaacattggttggtagtattattccgacacctttaatttccaaaatctgaagttcctgctagtttaccaccttcatgatcttcttgaactggtaactgattaggttgaacttatggaagatttgtggacttaactcaaaagtaacctctcagtgttctatagaacatgtatttgtgtaactgaacctaccaggagaaatgtttggaattctatatgtgcaatttttcaacaaatgcaaaaaaaatacagcacatgtattgacaagcttctgtcaagcagcttgagttgaaatttgatttaagaaaataaatcatgattgttcaaagctgctgggacgttagaattaggccatgatactggtctcattttaactacagtggtatttggcactagtgtaaacttccatataaatcactcttttggaacaacaaagggggagggagaaaaatcacggcctgttaaatgagtaccaaagccgcccaacagtaatgagatgttctcatccttgattctcccagcctcaaacaacacagcttactttttttttcccttgctcagaaagtacctgtaatttaacaaacagactgcctgtaggtatagtgcaattacaaatgctctaatcattgtacatacatctctcttgatattgcagcatccatactggctttgtaatcattaattttttggcagattgaatgtgctgtattgatatgtatctatgtaattgtattgtatgtctatagctaattcacgttttgaataatgttattttatttacttttttaagagaggagaatgtaaatttgtcagtttatttctgactagggatattttctttccatttagaaaagaaggaaaaaaaaaaaaccttactgtcatacagagcggtactagcgtcgtgctgtataaaatcatttgcacattcctgagtagaggtatactgattataagacccaaaggtaatttcatagcaaaatacataaaatcagtcggagcttttatacaaacatggaaaccaactttgtagaacttttgccatttgatctaggattggaatatgagcttttatacaattcatattcttatttggcaaatgcacagtttagtattacctctctgatggcctttactagaaaggcagttttagaagctattgtgatccactaaggaaatgttttaacagctagagaccactgcttgcctgaaagggcgttcttaaatttggtgcagcnnnnnnnnnnnnnnnnnnnnnnnnnnnnnnnnnnncaacatttgaaggcctacagtgtgtatagagaaaacctcatcacaagatcataagtgttacagttttagggaatcaagatattctatttaatagagctatagtaaatgtagtcaattaaacctgatctcaaagcttgaagaagctgagcaaaacagggaaagattgttatatttgtctttatgaaattgggatggaatttgctatgcagaattgaggtttgtggctttgctgttcctgtagggtgcatgacaagatcccttctcttgagaaaggaaaaaattgatcaccctagcagcagtgatgcatagaaacctaattttagccacaccagtcaatcgaagctaaaggattttcttttttgtttcttcggggttttattgaaggggctaggggcgggacgggattcttttcagttttgtataaaaacaaagtttactcatgctttatattatattgtgattgcaagcgttataagcgtgtgccactggcctcctattgttgatgcttaggtaatggaggcctgtggtgagttttatggtgacttgggcatgtcttattcaaaaacaaaaacataaaacacagaaacctttcttcagcataccaaggcaagcagccatttcatgactcacttaacacattgcagtgtaccagtttacagatgatttttccctttttgcgtgacatggcagttctaacccccagagaattccttatttgtaaattggaagtttctactatgccttacagagcttaaattcagaagtttgtgcctcatatctgaaacaaagggaaataacacacccattcaaaagtaaataaatctcctagaagtttttgtttttaacatttccatataaagagctctgttgaatgtcatgaatagactggaaaaaaaaattttaagaacctgcatatgttgtttactagcagatgacaactacaaaaggaatctgaagaacacgtaaaacttgtatttttttttttttggtagattaactagcaggcctattttaaaaaggtaattcagctaaagggcaatttacttttttgtacttcagactatcttgattgtcaaagtgtacgaactgtaattttaaaatttatactgccacatgattgtaaattttagttgtcttaagttaggaattggtgaaaagctatttatgctggatttgggtcaaaatgacttatttgcaaaaaaataaataatgggaagaaagggctgtataatgaaatactgcaagactcacatattggttggaaatttccctcaaatcacctaccgattacccttgatttccctttgttttcagtttctcaaaacgaatgaaatgaaatatagcagaatgttaacccatataaaaataaagtgtacccaaatattgtaatgtatattgctgctcttcttcaaattaaataagggtttaaaaccacttaattggtaatcaacatctcaattgatacaaataaggtgtgcttggtatacattaatattttcttccaaagatatatctttggttagaaacacaaaaaaataaaactagtaatattgtatgtttatctatctctacatatttccagcatatgtagcgttaatagatctgtcctggtaactgtgtctttgggatttcattttggttccatcaaattaggaaaagaaatggcttagttgtatatgattagctagagatttttggagccagacacctgctgtttagtagataacttagtacagaccctaaacttgtcatttgtttttctcacagaatagccatttcctgctgtcttcccaatgatcactgccctttcaataacactcttgcctctagaatcatatgttcaaagtatgaatacacacctagcacatagtaggtgctcaaatattaatttcctccttgccttccttatctaccctgtgtcctccatttccccgtatgattccaacccaatatagcaaatgacatttacatgttatgaaaacatctattgggtaaaatcagatcttggataaagaaattctgacttttatataagcttttggtagacagaaaaaacagaaaggtattcgttggtagaacatttttaagttcaggaaagaaagctggaataatactacgtaactttgtccaggttactttgactgaaacacgtttttggtggatttcttttcctcaaagaactctctaaatgcaactccttgctggattcctcacccatcatcctgttggaaacccttactagacctatgtatttagggagttttgtcagaaaacatttttaacttgcagtatttaaaagaatatttactgttcctaaaatgtcattcaaatgcatgtactgtctattgtttggggatgggaactagttttgcaaaaaacacctaatgttgtataataatgccccaatgatcttgctggttaaaaatacagtatttttggccataattttgtactatagtattcttcattgttgagttttgcttccattaaagttgcccgagcccctctcagaatgttttgtattagtaggagtactgaaatacatctttccttccttaacacaccttgtgcatattgcattttccaaaataaacaagtttaatggtttc

SEQ ID NO: 648 - protein, 499 aa, Homo sapien
  Unsure 4245-4279: Unknown amino acid
MSSRRQAHGVGEPRSAAACGGGSGGEAGRLFPGKEARASERGRARRPSLTRPPSQRPPPAPASLLPSAQTIRSHRAPRPTWWPRPWPPPPRRFPELVPDARPGGGGSAATAASGERGREGVCARCEQGVPAGLQRRHFGRMTLESIMACCLSEEAKEARRINDEIERQLRRDKRDARRELKLLLLGTGESGKSTFIKQMRIIHGSGYSDEDKRGFTKLVYQNIFTAMQAMIRAMDTLKIPYKYEHNKAHAQLVREVDVEKVSAFENPYVDAIKSLWNDPGIQECYDRRREYQLSDSTKYYLNDLDRVADPAYLPTQQDVLRVRVPTTGIIEYPFDLQSVIFRMVDVGGQRSERRKWIHCFENVTSIMFLVALSEYDQVLVESDNENRMEESKALFRTIITYPWFQNSSVILFLNKKDLLEEKIMYSHLVDYFPEYDGPQRDAQAAREFILKMFVDLNPDSDKIIYSHFTCATDTENIRFVFAAVKDTILQLNLKEYNLV

SEQ ID NO: 649 - DNA, 7222 bp, Homo sapien
agccggacggcgcggtggtcgggacagactggccgttgctgtggagacgcctggagagttgtggactggggcaacctttgccagtgatgagaagtgatgctcgtggcagtgctgaatctctctgaatatgattcgaattgcagccttaaatgccagctccaccattgaggatgatcatgaaggaagctttaaaagtcacaaaacccagacaaaggaggctcaggaagcagaggcttttgcattgtaccacaaggcccttgatctgcagaaacatgaccggtttgaggagtctgccaaagcctaccatgagctcttggaggcgagcctgctgcgggaggcagtttcatccggtgatgagaaagaggggttgaaacaccctgggctgatactgaaatattccacttataagaacttggcccagctggcagcccagcgggaggatctggagacagccatggagttctacttagaggcagtgatgctggactccacagatgtcaacctctggtataagattggacatgtggccctgaggctcatccggatccccctggctcgccatgcttttgaggaagggctgcggtgcaatcctgaccactggccctgtttggataacctaatcactgtcctgtacaccctcagtgattacacaacatgtctgtacttcatctgcaaagctttggagaaggattgccggtacagcaaagggctggtcctcaaggagaagatttttgaggagcagccttgtctccggaaggactctctcagaatgttcctcaaatgtgacatgtcgattcacgatgtttcggtgagtgcagctgagacacaggcgattgtagatgaggccttggggctgcgaaaaaagaggcaagcgctgattgtgcgggagaaggagccggacctgaaacttgtgcagcccattcctttcttcacctggaagtgcctcggagagagcttgctggccatgtacaatcatctcaccacctgtgagcccccacgtcccagccttggcaaaaggattgatttgtcggactaccaggaccccagccagcctcttgagtcctccatggtggtgacgccagttaacgtgatccagccaagcactgtcagcaccaacccagctgtggctgtcgccgagcctgtggtctcctacacctctgtggctacaaccagcttcccactgcacagtcctggtctgttggagacaggcgctcctgtgggtgatatttctgggggagataaatccaagaaaggggtaaaacggaagaagatttcagaagagagtggagaaacagcaaagcggcggtctgcccgtgtccgaaacaccaagtgcaaaaaagaagagaaagtagacttccaggagcttctgatgaagttcttgccgtccaggttaagaaagctggaccctgaggaggaagatgattcctttaataactatgaagtccagtcagaagccaaactggaaagcttcccaagcattgggcctcaaaggctgtcatttgactcagccacattcatggaatctgaaaagcaggacgtgcatgagttcctgctggagaacctaaccaacgggggcatcctggagctgatgatgcgctacctgaaagccatgggccacaagttcttggtaaggtggcctccaggcttggcggaggtcgtgctcagcgtctaccacagctggaggaggcacagcaccagcctgcccaacccgctgctgagggactgcagcaacaagcacatcaaggacatgatgctgatgtctctctcctgcatggaactccagctggaccagtggctgctgaccaaaggcagaagctctgcagtgtctcctcggaactgtcctgctggtatggtgaatggcagatttggacctgacttcccagggacccactgcctgggtgacctcctacagctgtcatttgcctcgtcccagcgcgacctgttcgaggatggttggctggagtttgtggtccgtgtttactggctgaaggctcgcttcctggcgctgcagggagacatggagcaggccctggagaactatgacatctgcacagaaatgctccagagttccaccgccatccaggtggaggcaggggctgaacgaagagacattgtcatccggctgcccaacctccataatgactctgtggtttccctggaggagattgataagaacctgaagtcgctggagcggtgccagtccctggaggagattcagcggctgtatgaagcaggcgactacaaggctgttgtgcatctgctccgccccactttgtgcaccagtgggtttgaccgggccaaacacctggagtttatgacttccattcctgagaggccagcccagctgcttcttctgcaggactccttgctccggctgaaggactatcggcagtgttttgagtgttccgatgtggctctgaacgaggctgtccagcagatggtgaactcaggtgaggctgccgccaaggaggagtgggtggccacagtgacccaactgctgatgggcatcgagcaggccctctctgcggacagcagtggtagcatcctgaaggtatcatcctccaccactggccttgtgcggctcaccaacaacctcatccaggtcattgactgcagcatggctgtgcaggaggaggccaaggagccccacgtctcttcagtgctaccctggatcattctacaccggatcatctggcaggaggaagacaccttccattctctgtgccaccagcagcagctccaaaacccagcggaggaagggatgtcagagacgcccatgctcccatcctccctcatgctgctgaacacagcccacgagtatttgggcagaaggtcctggtgctgcaattcagatggggctctgctgcgattctatgtgcgagtactccagaaggaactggctgcatccacctctgaagacacgcacccttacaaggaggagctggagacagccttggagcagtgcttctactgcctgtacagcttccccagcaagaagagtaaggccaggtacctggaggaacactcggcccagcaggtggatcttatatgggaggatgcactgttcatgtttgagtattttaagcccaagacccttcctgaatttgacagctataagaccagcaccgtgtctgctgacttggccaacctactgaagagaattgccaccattgtgcctcgcacagagaggccagcccttagcctggacaaagtctctgcctacattgagggaacttcaactgaggtaccctgcctcccagagggggctgacccctcccctccagtggtgaacgagctttactacctcctggctgattatcatttcaaaaacaaggagcagtccaaggccatcaagttctacatgcatgacatctgcatctgccccaataggtttgattcctgggcaggcatggctctggcccgggccagccgcattcaggacaagctgaactccaatgagctgaagagtgatgggcccatttggaagcatgccacgcccgtcttgaactgcttccgtcgggccctggagattgacagctccaacttgtccctatggattgagtatggcaccatgtcctatgccttgcactcattcgcctcacgtcaattgaagcagtggagaggcgagctgccccctgagctcgtgcagcagatggagggccggcgcgacagcatgctagagacagccaagcactgtttcacatcagcagcccgctgcgagggtgatggtgacgaggaggagtggctcatccactacatgctgggcaaggtggctgagaagcagcagcagccacccaccgtttacttgctgcactacaggcaggctggccactacctgcacgaggaggctgcccgctaccccaagaagatccactaccacaacccacctgagctggccatggaggccctggaggtgtactttcggctccatgcttccatcctgaagctcctggggaagcccgattctggggttggtgcagaggtcctggtcaactttatgaaggaggctgcagaaggaccctttgccaggggcgaggagaagaacacacccaaagcttcagaaaaggagaaggcctgcctggtggacgaggactcccactcttcagctgggacactgccgggccccggagcctccctcccctcctcctctggcccaggtctgacatccccaccttacacagccactccgattgaccacgattacgtcaaatgtaaaaaaccccaccagcaggcaacgccggacgaccgaagccaggacagcacagccgtagcactctcagactctagctcaacgcaggacttctttaatgagcccaccagcttactggaaggctccaggaaatcctacacagagaagaggctgcccattctcagttcccaagcaggagcgacgggtaaagatcttcagggggccacagaagaaagaggaaaaaacgaggagtcattggagagtacagaaggcttccgggctgcagagcaaggtgtccagaagcctgctgcagaaaccccagcctctgcttgcatccctggcaagccctcagcatccacacccaccctgtgggatgggaagaagagaggggacctcccaggggagccagtggccttcccccaggggctgccggctggtgctgaggagcagcggcagtttctcacagagcagtgcatcgcctccttccgcctgtgcctgagccgcttcccccagcactataagagtctctaccgtctggccttcctctacacctacagcaagacccaccggaacctccagtgggcccgcgacgtgttgctaggcagcagtatcccgtggcaacaactgcagcacatgccggcacaggggctcttctgcgagaggaacaagaccaatttcttcaacggcatctggcggatccccgtggacgagattgaccggccgggcagctttgcctggcacatgaaccgctccatcgtgctgctgctcaaggtgctggcccagctgcgggaccacagcaccctgctgaaggtgtcctccatgcttcagcggaccccagaccagggcaagaagtatctgcgagatgctgaccgccaggtcctggcgcagcgggccttcatcctcactgtgaaggtgctcgaagacacgctgagcgagctcgcagaggggtcagaacgcccagggcccaaggtctgtggcctccccggagccaggatgaccaccgatgtctcacacaaggccagtcctgaggatggccaggagggcctcccccagccgaagaagccccctctggctgatggctcagggccagggcccgagccaggaggcaaagtgggcctcctcaaccaccggcctgtggccatggatgcaggagacagtgcagaccaaagcggggagcggaaggataaagagagcccacgggcagggcccactgagcccatggacacgagtgaggccactgtttgccactcagacttggagcggacaccacccctgctgccaggtcgccccgcaagggaccggggccccgagagccggcccactgagctgtccctggaggagctgagcatcagtgcccggcagcagcccaccccgctcaccccagcccagccagcccccgcccccgcccccgccaccaccacagggaccagggcagggggccacccggaggagccgctctcccggctcagccgcaagaggaagctcctggaggacacagagtcaggcaagacacttctgttggatgcctaccgtgtgtggcagcagggccagaagggtgtggcctatgacctgggccgtgtggagaggatcatgtcggagacctacatgctcatcaagcaggtggatgaggaggctgcgctggagcaggctgtgaagttctgccaggtccatcttggggctgccgcccagagacaggcctcgggggacacccccaccactccaaagcaccccaaagacagccgagagaacttctttcctgtgacagtggtgcccacagcccctgaccctgtgccagctgactctgtccagcggcccagtgatgctcacaccaagcctcgccctgcactagctgccgccacaactattatcacctgccctccgtcagcatcagcttccaccctggaccagtccaaggaccctgggcctccccggccacacaggcctgaagctacccccagcatggcctctctgggcccagagggagaagagctggcgagagtggcagagggcaccagcttcccgcctcaggagccacggcacagtccgcaggtgaagatggcccccacaagttccccggcagagccacactgctggccggcagaggctgccctgggcacaggcgctgagcccacctgcagccaggaggggaaactgaggcctgagccgagaagggatggggaggctcaggaggctgcgagtgagactcagcccctgagctctcccccaacagctgccagctccaaggcccccagcagtgggagtgcccagccaccagagggtcacccaggcaagcctgagcccagccgggctaagtcccgccccctgcccaacatgccaaagctggtcatcccctccgccgccaccaagttcccccctgagatcaccgtcacgccacccaccccaaccctgctctcccccaaaggcagcatctcggaggagaccaagcagaagctgaagtcagccatcctttctgcccagtctgctgccaacgtgaggaaggagagcctatgccagccagccctggaggtcctggagacatccagccaggagtcctcgctggagagcgagacagacgaggacgacgactacatggacatttgaggggccactgcagccccaccgccacgccccaggggaccagccaggcctggaatgccccctgggcaggaccctgggcaggaccagaggcccacatggatgccactccccacacagcccccaggcctgcccagcccacctcctcatggcatcctccctgtacccaggtcaggctgtccacaccacatgggagcccagaggaggaggggcccgccttagccatgtgaaggtggattggtcgccatctgcacgccaggcggcatccttttctatgaagtgttgactttgtaaatctgcccacacccagctggccatatccacccctcgacgccgggatgagccggctctgcctgtgtcacagtggaggggtcctttagggccaggctcacccctcaccctttttttggttgcttttctaataaagatggaacagtt

SEQ ID NO: 650 - protein, 2000 aa, Homo sapien
MIRIAALNASSTIEDDHEGSFKSHKTQTKEAQEAEAFALYHKALDLQKHDRFEESAKAYHELLEASLLREAVSSGDEKEGLKHPGLILKYSTYKNLAQLAAQREDLETAMEFYLEAVMLDSTDVNLWYKIGHVALRLIRIPLARHAFEEGLRCNPDHWPCLDNLITVLYTLSDYTTCLYFICKALEKDCRYSKGLVLKEKIFEEQPCLRKDSLRMFLKCDMSIHDVSVSAAETQAIVDEALGLRKKRQALIVREKEPDLKLVQPIPFFTWKCLGESLLAMYNHLTTCEPPRPSLGKRIDLSDYQDPSQPLESSMVVTPVNVIQPSTVSTNPAVAVAEPVVSYTSVATTSFPLHSPGLLETGAPVGDISGGDKSKKGVKRKKISEESGETAKRRSARVRNTKCKKEEKVDFQELLMKFLPSRLRKLDPEEEDDSFNNYEVQSEAKLESFPSIGPQRLSFDSATFMESEKQDVHEFLLENLTNGGILELMMRYLKAMGHKFLVRWPPGLAEVVLSVYHSWRRHSTSLPNPLLRDCSNKHIKDMMLMSLSCMELQLDQWLLTKGRSSAVSPRNCPAGMVNGRFGPDFPGTHCLGDLLQLSFASSQRDLFEDGWLEFVVRVYWLKARFLALQGDMEQALENYDICTEMLQSSTAIQVEAGAERRDIVIRLPNLHNDSVVSLEEIDKNLKSLERCQSLEEIQRLYEAGDYKAVVHLLRPTLCTSGFDRAKHLEFMTSIPERPAQLLLLQDSLLRLKDYRQCFECSDVALNEAVQQMVNSGEAAAKEEWVATVTQLLMGIEQALSADSSGSILKVSSSTTGLVRLTNNLIQVIDCSMAVQEEAKEPHVSSVLPWIILHRIIWQEEDTFHSLCHQQQLQNPAEEGMSETPMLPSSLMLLNTAHEYLGRRSWCCNSDGALLRFYVRVLQKELAASTSEDTHPYKEELETALEQCFYCLYSFPSKKSKARYLEEHSAQQVDLIWEDALFMFEYFKPKTLPEFDSYKTSTVSADLANLLKRIATIVPRTERPALSLDKVSAYIEGTSTEVPCLPEGADPSPPVVNELYYLLADYHFKNKEQSKAIKFYMHDICICPNRFDSWAGMALARASRIQDKLNSNELKSDGPIWKHATPVLNCFRRALEIDSSNLSLWIEYGTMSYALHSFASRQLKQWRGELPPELVQQMEGRRDSMLETAKHCFTSAARCEGDGDEEEWLIHYMLGKVAEKQQQPPTVYLLHYRQAGHYLHEEAARYPKKIHYHNPPELAMEALEVYFRLHASILKLLGKPDSGVGAEVLVNFMKEAAEGPFARGEEKNTPKASEKEKACLVDEDSHSSAGTLPGPGASLPSSSGPGLTSPPYTATPIDHDYVKCKKPHQQATPDDRSQDSTAVALSDSSSTQDFFNEPTSLLEGSRKSYTEKRLPILSSQAGATGKDLQGATEERGKNEESLESTEGFRAAEQGVQKPAAETPASACIPGKPSASTPTLWDGKKRGDLPGEPVAFPQGLPAGAEEQRQFLTEQCIASFRLCLSRFPQHYKSLYRLAFLYTYSKTHRNLQWARDVLLGSSIPWQQLQHMPAQGLFCERNKTNFFNGIWRIPVDEIDRPGSFAWHMNRSIVLLLKVLAQLRDHSTLLKVSSMLQRTPDQGKKYLRDADRQVLAQRAFILTVKVLEDTLSELAEGSERPGPKVCGLPGARMTTDVSHKASPEDGQEGLPQPKKPPLADGSGPGPEPGGKVGLLNHRPVAMDAGDSADQSGERKDKESPRAGPTEPMDTSEATVCHSDLERTPPLLPGRPARDRGPESRPTELSLEELSISARQQPTPLTPAQPAPAPAPATTTGTRAGGHPEEPLSRLSRKRKLLEDTESGKTLLLDAYRVWQQGQKGVAYDLGRVERIMSETYMLIKQVDEEAALEQAVKFCQVHLGAAAQRQASGDTPTTPKHPKDSRENFFPVTVVPTAPDPVPADSVQRPSDAHTKPRPALAAATTIITCPPSASASTLDQSKDPGPPRPH

SEQ ID NO: 651 - DNA, 4765 bp, Homo sapien
aggccctctgtaaatgtttgctattaatgcaatgctgagatcccagtgaacagaatctggcttagaagaagtggatatccacggtgcccgagcctaatcttacatcttggatttgtaagtggcatttattgagttagaacatgagcttgagcacgcggtcacacattgtttcagcaaacactggttaggcaccagatgctacgtgcaagcactgccctacatgctgggacgcaactgtagtaggaatgaaataacgccagcattcctgcatgcgggcagtgcgggccctgtacagaaaggtacacgagataggcatcctcacatccattgtcctgggaggaaactgaggctttgagaaacggagaacttgccgggccatttgactctacgtcatcccctcccccatcaatgccctgaacagcctcctgtacacccttaaggaacttactttgtaatgattattaagaactcagcgagaccccgagcatcacctcggcatatcgcatcctttctctagagaacccctaatgttggaagggatcagagcgcacctcctccgctcctgggagcacccccttcactaataataccttggggatgggtcggaaggaaaggaaaggagacgcgagaggtgtagtcagatgtgcctgcgaagcccaggctcctccggagatccttccgtccgtccctacaggagaaggctggcccgggctgctccactccccggagctgcagactgagtcgccaggtttctgtgccttcaaagccctgcgcgacggccacaccaaacacccaaaccttgggcagggaccaaacggtcacttccccgccctccgggctcaatatgcaaatccgagcaccaggaagtagctgggacctctcggccgagcccagagacagccagttcctctcccgccgcgccgggccgcgctgccgctcgctccccggccgtggcgcctccgggccagacgcgctgcagcctccagcccgcggcaagcgggcggggcggccgcgccacccccggccccgcgccagcagcccctcgccgcgcgtccagcgttcccggccagcagcctccccatacgcaggtcctgctgggccgccccgtcgcgccccccactctgaactcaagtcaccgtggagctccgccgccccgaaactttcaccgcgagcgggaaatatgggatgtataaaatcaaaagggaaagacagcttgagtgacgatggagtagatttgaagactcaaccagtacgtaatactgaaagaactatttatgtgagagatccaacgtccaataaacagcaaaggccagttccagaatctcagcttttacctggacagaggtttcaaactaaagatccagaggaacaaggagacattgtggtagccttgtacccctatgatggcatccacccggacgacttgtctttcaagaaaggagagaagatgaaagtcctggaggagcatggagaatggtggaaagcaaagtcccttttaacaaaaaaagaaggcttcatccccagcaactatgtggccaaactcaacaccttagaaacagaagagtggtttttcaaggatataaccgggaaggacgcagaaaggcagcttttggcaccaggaaatagcgctggagctttccttattagagaaagtgaaacattaaaaggaagcttctctctgtctgtcagagactttgaccctgtgcatggtgatgttattaagcactacaaaattagaagtctggataatgggggctattacatctctccacgaatcacttttccctgtatcagcgacatgattaaacattaccaaaagcaggcagatggcttgtgcagaagattggagaaggcttgtattagtcccaagccacagaagccatgggataaagatgcctgggagatcccccgggagtccatcaagttggtgaaaaggcttggcgctgggcagtttggggaagtctggatgggttactataacaacagtaccaaggtggctgtgaaaaccctgaagccaggaactatgtctgtgcaagccttcctggaagaagccaacctcatgaagaccctgcagcatgacaagctcgtgaggctctacgctgtggtcaccagggaggagcccatttacatcatcaccgagtacatggccaagggcagtttgctggatttcctgaagagcgatgaaggtggcaaagtgctgcttccaaagctcattgacttttctgctcagattgcagagggaatggcatacatcgagcggaagaactacattcaccgggacctgcgagcagctaatgttctggtctccgagtcactaatgtgcaaaattgcagattttggccttgctagagtaattgaagataatgagtacacagcaagggaaggtgctaagttccctattaagtggacggctccagaagcaatcaactttggatgtttcactattaagtctgatgtgtggtcctttggaatcctcctatacgaaattgtcacctatgggaaaattccctacccagggagaactaatgccgacgtgatgaccgccctgtcccagggctacaggatgccccgtgtggagaactgcccagatgagctctatgacattatgaaaatgtgctggaaagaaaaggcagaagagagaccacggttgactactacagagcgtcctggatgattctacacagccacggaagggcaataccagcagcagccttagagcacagggagacccgtccatattggcacagggtggctgcctcatttagagaggaaaagttaaccacatcactggttgcacttatgatttcatgtgcggggatcatctgccgtgcctggatcctgaaatagaggctaaattactcaggaagaacaccctctaaatgggaaagtattctgtactcttagatggattctccactcagttgcaacttggacttgtcctcagcagctggtgaatcttgctctgcttgaccaacatctgagtgcagccgtttgagaagaaaacatctattctctccaaaaatgcacccaactagctctatgtttacaaatggacataggactcaaagtttcagagaccattgcaatgaatccccaataattgcagaactaaactcatttataaagctaaaataaccggatatatacatagcatgacatttctttgtgctttggcttacttgtttaagagaccattgcaatgaatccccaataattgcagaactaaactcatttataaagctaaaataaccggatatatacatagcatgacatttctttgtgctttggcttacttgtttaaaaaaaaaaaaaaactaatccaacctgttagattttgcaggtgaagtcagcagcttaaaaatgtctttcccagatttcaatgatttttttccccctacctcccaaaatctgagactgttaaaacatttttcttctatgaacactgctcagacctgctagacatgccataggagtggcgtgcacatctctctctcttccagcaggaggagcccgtgagcacgcacagctgccctgtctgctcacccgaaggcaccgggctcacctggacctcccaggaaagggagaagagcctcagaaactgctctgtgtttagaaggaatatttttaagagtccagctttttcatttccacaatttcctatatccagatttgttttgacaatgtagtttggaagaactaagattctaatctctgaagaaccttatagggccttctaaaacataagagtttcctttgttgcttcaaatatttgaacattatgttaaagatcaagtattaattttagttgtactctagaaagctaaagtgccacattcggggctatttttatgattcagcaatcttttctaaattgtgtagcatgtgtatgagactatttatacccaaggatatgaaggaacataagtgactacaaggctctaataagccacggtggcaggaggttcaagcggttctgttcactaaatttttctcctgtaagctttgaatggaaacttctgtatcacatgatgtgtttcacttatgctgttgtgtatatacctaatatttctatttttgattttattttaatacacctcgtccaataacatctcaagctttttatttgcatttacattttcagctgtggtcagtgtaaaaattggtcatcagctgggggcggggtggttagaagtgattcaacagagctacatgctttaaacttgcctaagttctacctccttcctttgaacatttcagattggagaaccaaggagttgattgcctgaacacctgaacatccgtttatgggggccagatagaatttgttttcaaataggcttaacaggcatcattaaaatttcattctgtgtgttttgtttaggcttgaggtgcttagaagatgggataaaatattctacttttttctaaattttaactttgtttcctatgtgatttttttaaatgtcctttctaaaatattctaaaattattgattcacaagtgccatgttcagaactatagaatattactgttacataatgtctgcacagctggtcccttgattcagtggtaaggtttttgtgtacacccccctgcttgcattttatttcagaaccacaagtattacccaatatgttacatggagaggaactataaagaatccctaaggcaaaaagaagtctctagaaaatgactagaggttttttttttagcataacaaatttatttaaagaaaattattaaatttatcttcgccttaaaaaaa

SEQ ID NO: 652 - protein, 609 aa, Homo sapien [sequence omitted]

SEQ ID NO: 653 - DNA, 2298 bp, Homo sapien
tcggccgagcccagagacagccagttcctctcccgccgcgccgggccgcgtgccgctcgctccccggccgtggcgcctccgggccagacgcgctgcagcctccagcccgcggcaagcgggcggggcggccgcgccacccccggccccgcgccagcagcccctcgccgcgcgtccagcgttcccggccagcagcctccccatacgcagtcctgctggaccgccccgtcgcgccccccactctgaactcaagtcaccgtggagctccgccgccccgaaactttcacgcgagcgggaaatatgggatgtataaaatcaaaagggaaagacagcttgagtgacgatggagtagatttgaagactcaaccagtacgtaatactgaaagaactatttatgtgagagatccaacgtccaataaacagcaaaggccagttccagaatctcagcttttacctggacagaggtttcaaactaaagatccagaggaacaaggagacattgtggtagccttgtacccctatgatggcatccacccggacgacttgtctttcaagaaaggagagaagatgaaagtcctggaggagcatggagaatggtggaaagcaaagtcccttttaacaaaaaaagaaggcttcatccccagcaactatgtggccaaactcaacaccttagaaacagaagagtggtttttcaaggatataaccaggaaggacgcagaaaggcagcttttggcaccaggaaatagcgctggagctttccttattagagaaagtgaaacattaaaaggaagcttctctctgtctgtcagagactttgaccctgtgcatggtgatgttattaagcactacaaaattagaagtctggataatgggggctattacatctctccacgaatcacttttccctgtatcagcgacatgattaaacattaccaaaagcaggcagatggcttgtgcagaagattggagaaggcttgtattagtcccaagccacagaagccatgggataaagatgcctgggagatcccccgggagtccatcaagttggtgaaaaggcttggcgctgggcagtttggggaagtctggatgggttactataacaacagtaccaaggtggctgtgaaaaccctgaagccaggaactatgtctgtgcaagccttcctggaagaagccaacctcatgaagaccctgcagcatgacaagctcgtgaggctctacgctgtggtcaccagggaggagcccatttacatcatcaccgagtacatggccaagggcagtttgctggatttcctgaagagcgatgaaggtggcaaagtgctgcttccaaagctcattgacttttctgctcagattgcagagggaatggcatacatcgagcggaagaactacattcaccgggacctgcgagcagctaatgttctggtctccgagtcactaatgtgcaaaattgcagattttggccttgctagagtaattgaagataatgagtacacagcaagggaaggtgctaagttccctattaagtggacggctccagaagcaatcaactttggatgtttcactattaagtctgatgtgtggtcctttggaatcctcctatacgaaattgtcacctatgggaaaattccctacccagggagaactaatgccgacgtgatgaccgccctgtcccagggctacaggatgccccgtgtggagaactgcccagatgagctctatgacattatgaaaatgtgctggaaagaaaaggcagaagagagaccaacgtttgactacttacagagcgtcctggatgatttctacacagccacggaagggcaataccagcagcagccttagagcacagggagacccgtccatttggcaggggtggctgcctcatttagagaggaaaagtaaccatcactggttgcacttatgatttcatgtgcggggatcatctgccgtgcctggatcctgaaatagaggctaaattactcaggaagaacaccctctaaatgggaaagtattctgtactcttagatggattctccactcagttgcaacttggacttgtcctcagcagctggtaatcttgctctgcttgacaacatctgagtgcagccgtttgagaagaaaacatctattctctccaaaaatgcacccaactagctctatgtttacaaatggacataggactcaaagtttcagagaccattgcaatgaatccccaataattgcagaactaaactcatttataaagctaaaataaccggatatatacatagcatgacatttctttgtgctttggcttacttgttt

SEQ ID NO: 654 - protein, 512 aa, Homo sapien
MGCIKSKGKDSLSDDGVDLKTQPVRNTERTIYVRDPTSNKQQRPVPESQLLPGQRFQTKDPEEQGDIVVALYPYDGIHPDDLSFKKGEKMKVLEEHGEWWKAKSLLTKKEGFIPSNYVAKLNTLETEEWFFKDITRKDAERQLLAPGNSAGAFLIRESETLKGSFSLSVRDFDPVHGDVIKHYKIRSLDNGGYYISPRITFPCISDMIKHYQKQADGLCRRLEKACISPKPQKPWDKDAWEIPRESIKLVKRLGAGQFGEVWMGYYNNSTKVAVKTLKPGTMSVQAFLEEANLMKTLQHDKLVRLYAVVTREEPIYIITEYMAKGSLLDFLKSDEGGKVLLPKLIDFSAQIAEGMAYIERKNYIHRDLRAANVLVSESLMCKIADFGLARVIEDNEYTAREGAKFPIKWTAPEAINFGCFTIKSDVWSFGILLYEIVTYGKIPYPGRTNADVMTALSQGYRMPRVENCPDELYDIMKMCWKEKAEERPTFDYLQSVLDDFYTATEGQYQQQP

SEQ ID NO: 655 - DNA, 540 bp, Homo sapien
cctggactagccgggttgtatttggaaacgcggagtgagtttttccgtgctgtgtaggggctaacaatggacacccagaaggacgttcaacctccaaagcagcaaccaatgatatatatctgtggagagtgtcacacagaaaatgaaataaaatctagggatccaatcagatgcagagaatgtggatacagaataatgtacaagaaaaggactaaaagattggtcgtttttgatgctcgatgaatgctgggaattcagaggaatgtcttcacttatacttggatttgctctcttcccatttctgattgttgtatagctttcgattttgcttacagtagttcccccttatcttcgggagatacattccaaggcccccagtgaactcctgaaacctcaaacagtaccaaacctttatacactgttttttccatatatatatacctatgataaagtataatgtataaattaagcatagcaagagattaataataatgtaatagaacaatgataacatactataataaaagttatgtgaatgtg

SEQ ID NO: 656 - protein, 58 aa, Homo sapien
MDTQKDVQPPKQQPMIYICGECHTENEIKSRDPIRCRECGYRIMYKKRTKRLVVFDAR

SEQ ID NO: 657 - DNA, 2986 bp, Homo sapien
gcgccccagtcgacgctgagctcctctgctactcagagttgcaacctcagcctcgctatggctcccagcagcccccggcccgcgctgcccgcactcctggtcctgctcggggctctgttcccaggacctggcaatgcccagacatctgtgtccccctcaaaagtcatcctgccccggggaggctccgtgctggtgacatgcagcacctcctgtgaccagcccaagttgttgggcatagagaccccgttgcctaaaaaggagttgctcctgcctgggaacaaccggaaggtgtatgaactgagcaatgtgcaagaagatagccaaccaatgtgctattcaaactgccctgatgggcagtcaacagctaaaaccttcctcaccgtgtactggactccagaacgggtggaactggcacccctcccctcttggcagccagtgggcaagaaccttaccctacgctgccaggtggagggtggggcaccccgggccaacctcaccgtggtgctgctccgtggggagaaggagctgaaacgggagccagctgtgggggagcccgctgaggtcacgaccacggtgctggtgaggagagatcaccatggagccaatttctcgtgccgcactgaactggacctgcggccccaagggctggagctgtttgagaacacctcggccccctaccagctccagacctttgtcctgccagcgactcccccacaacttgtcagcccccgggtcctagaggtggacacgcaggggaccgtggtctgttccctggacgggctgttcccagtctcggaggcccaggtccacctggcactgggggaccagaggttgaaccccacagtcacctatggcaacgactccttctcggccaaggcctcagtcagtgtgaccgcagaggacgagggcacccagcggctgacgtgtgcagtaatactggggaaccagagccaggagacactgcagacagtgaccatctacagctttccggcgcccaacgtgattctgacgaagccagaggtctcagaagggaccgaggtgacagtgaagtgtgaggcccaccctagagccaaggtgacgctgaatggggttccagcccagccactgggcccgagggcccagctcctgctgaaggccaccccagaggacaacgggcgcagcttctcctgctctgcaaccctggaggtggccggccagcttatacacaagaaccagacccgggagcttcgtgtcctgtatggcccccgactggacgagagggattgtccgggaaactggacgtggccagaaaattcccagcagactccaatgtgccaggcttgggggaacccattgcccgagctcaagtgtctaaaggatggcactttcccactgcccatcggggaatcagtgactgtcactcgagatcttgagggcacctacctctgtcgggccaggagcactcaaggggaggtcacccgcgaggtgaccgtgaatgtgctctccccccggtatgagattgtcatcatcactgtggtagcagccgcagtcataatgggcactgcaggcctcagcacgtacctctataaccgccagcggaagatcaagaaatacagactacaacaggcccaaaaagggacccccatgaaaccgaacacacaagccacgcctccctgaacctatcccgggacagggcctcttcctcggccttcccatattggtggcagtggtgccacactgaacagagtggaagacatatgccatgcagctacacctaccggccctgggacgccggaggacagggcattgtcctcagtcagatacaacagcatttggggccatggtacctgcacacctaaaacactaggccacgcatctgatctgtagtcacatgactaagccaagaggaaggagcaagactcaagacatgattgatggatgttaaagtctagcctgatgagaggggaagtggtgggggagacatagccccaccatgaggacatacaactgggaaatactgaaacttgctgcctattgggtatgctgaggcccacagacttacagaagaagtggccctccatagacatgtgtagcatcaaaacacaaaggcccacacttcctgacggatgccagcttgggcactgctgtctactgaccccaacccttgatgatatgtatttattcatttgttattttaccagctatttattgagtgtcttttatgtaggctaaatgaacataggtctctggcctcacggagctcccagtccatgtcacattcaaggtcaccaggtacagttgtacaggttgtacactgcaggagagtgcctggcaaaaagatcaaatggggctgggacttctcattggccaacctgcctttccccagaaggagtgatttttctatcggcacaaaagcactatatggactggtaatggttcacaggttcagagattacccagtgaggccttattcctcccttccccccaaaactgacacctttgttagccacctccccacccacatacatttctgccagtgttcacaatgacactcagcggtcatgtctggacatgagtgcccagggaatatgcccaagctatgccttgtcctcttgtcctgtttgcatttcactgggagcttgcactattgcagctccagtttcctgcagtgatcagggtcctgcaagcagtggggaagggggccaaggtattggaggactccctcccagctttggaagggtcatccgcgtgtgtgtgtgtgtgtatgtgtagacaagctctcgctctgtcacccaggctggagtgcagtggtgcaatcatggttcactgcagtcttgaccttttgggctcaagtgatcctcccacctcagcctcctgagtagctgggaccataggctcacaacaccacacctggcaaatttgattttttttttttttttcagagacggggtctcgcaacattgcccagacttcctttgtgttagttaataaagctttctcaactgcc

SEQ ID NO: 658 - protein, 532 aa, Homo sapien
MAPSSPRPALPALLVLLGALFPGPGNAQTSVSPSKVILPRGGSVLVTCSTSCDQPKLLGIETPLPKKELLLPGNNRKVYELSNVQEDSQPMCYSNCPDGQSTAKTFLTVYWTPERVELAPLPSWQPVGKNLTLRCQVEGGAPRANLTVVLLRGEKELKREPAVGEPAEVTTTVLVRRDHHGANFSCRTELDLRPQGLELFENTSAPYQLQTFVLPATPPQLVSPRVLEVDTQGTVVCSLDGLFPVSEAQVHLALGDQRLNPTVTYGNDSFSAKASVSVTAEDEGTQRLTCAVILGNQSQETLQTVTIYSFPAPNVILTKPEVSEGTEVTVKCEAHPRAKVTLNGVPAQPLGPRAQLLLKATPEDNGRSFSCSATLEVAGQLIHKNQTRELRVLYGPRLDERDCPGNWTWPENSQQTPMCQAWGNPLPELKCLKDGTFPLPIGESVTVTRDLEGTYLCRARSTQGEVTREVTVNVLSPRYEIVIITVVAAAVIMGTAGLSTYLYNRQRKIKKYRLQQAQKGTPMKPNTQATPP

SEQ ID NO: 659 - DNA, 900 bp, Homo sapien
gggactcggcggaggatgggcttgctctcaattttgcgcaagttgaaaagtgcaccagaccaggaggtgagaatacttctcctgggcttggataatgctggcaagaccactcttctgaagcagcttgcatctgaagacatcagccacatcacacctacacagggtttcaacatcaaaagtgtacaatcacaaggttttaaactgaatgtatgggacattggtggacagaggaaaatcagaccatactggaagaattattttgaaaataccgatattcttatatatgtaatcgacagtgcagacagaaaaagatttgaagagacgggtcaggaactagcggaattactggaggaagaaaaactaagttgtgtgccagtgctcatctttgctaataagcaggatttgctcacagcagcccctgcctctgaaattgcagaaggactgaacctgcataccatccgcgaccgagtctggcagatccagtcttgctcagctctcacaggagagggcgttcaggatggcatgaactgggtctgcaaaaatgtcaatgcaaagaagaaataaaatctagacgaatggagatgcaggagctgcgggagccgaattcgggccttaaaaacactaatttgctgctttctgaccaaatgtttttcatctgtgtacactccagctgtttgaagagagggaacaacacggtttagaaagaatccccattccagcagtagatttaactgatctctgaggttcagtatcatttttcaaataaaggaattatattatttcctctgcataattgaaatagtattaaatgtctaaagcacatgattagaaaatgagatcttttaaatgagcaagagattgcattgcagtttagacaattccagtgggctttttttttcg

SEQ ID NO: 660 - protein, 182 aa, Homo sapien
MGLLSILRKLKSAPDQEVRILLLGLDNAGKTTLLKQLASEDISHITPTQGFNIKSVQSQGFKLNVWDIGGQRKIRPYWKNYFENTDILIYVIDSADRKRFEETGQELAELLEEEKLSCVPVLIFANKQDLLTAAPASEIAEGLNLHTIRDRVWQIQSCSALTGEGVQDGMNWVCKNVNAKKK

SEQ ID NO: 661 - DNA, 4446 bp, Homo sapien
tgccttgaccaggacttgggactttgcgaaaggatcgcggggcccggagaggtgttggagagcacaatggctgaacaagtccttcctcaggctttgtatttgagcaatatgcggaaagctgtgaagatacgggagagaactccagaagacatttttaaacctactaatgggatcattcatcattttaaaaccatgcaccgatacacactggaaatgttcagaacttgccagttttgtcctcagtttcgggagatcatccacaaagccctcatcgacagaaacatccaggccaccctggaaagccagaagaaactcaactggtgtcgagaagtccggaagcttgtggcgctgaaaacgaacggtgacggcaattgcctcatgcatgccacttctcagtacatgtggggcgttcaggacacagacttggtactgaggaaggcgctgttcagcacgctcaaggaaacagacacacgcaactttaaattccgctggcaactggagtctctcaaatctcaggaatttgttgaaacggggctttgctatgatactcggaactggaatgatgaatgggacaatcttatcaaaatggcttccacagacacacccatggcccgaagtggacttcagtacaactcactggaagaaatacacatatttgtcctttgcaacatcctcagaaggccaatcattgtcatttcagacaaaatgctaagaagtttggaatcaggttccaatttcgcccctttgaaagtgggtggaatttacttgcctctccactggcctgcccaggaatgctacagataccccattgttctcggctatgacagccatcattttgtacccttggtgaccctgaaggacagtgggcctgaaatccgagctgttccacttgttaacagagaccggggaagatttgaagacttaaaagttcactttttgacagatcctgaaaatgagatgaaggagaagctcttaaaagagtacttaatggtgatagaaatccccgtccaaggctgggaccatggcacaactcatctcatcaatgccgcaaagttggatgaagctaacttaccaaaagaaatcaatctggtagatgattactttgaacttgttcagcatgagtacaagaaatggcaggaaaacagcgagcaggggaggagagaggggcacgcccagaatcccatggaaccttccgtgccccagctttctctcatggatgtaaaatgtgaaacgcccaactgccccttcttcatgtctgtgaacacccagcctttatgccatgagtgctcagagaggcggcaaaagaatcaaaacaaactcccaaagctgaactccaagccgggccctgaggggctccctggcatggcgctcggggcctctcggggagaagcctatgagcccttggcgtggaaccctgaggagtccactggggggcctcattcggccccaccgacagcacccagcccttttctgttcagtgagaccactgccatgaagtgcaggagccccggctgccccttcacactgaatgtgcagcacaacggattttgtgaacgttgccacaacgcccggcaacttcacgccagccacgccccagaccacacaaggcacttggatcccgggaagtgccaagcctgcctccaggatgttaccaggacatttaatgggatctgcagtacttgcttcaaaaggactacagcagaggcctcctccagcctcagcaccagcctccctccttcctgtcaccagcgttccaagtcagatccctcgcggctcgtccggagcccctccccgcattcttgccacagagctggaaacgacgcccctgctggctgcctgtctcaagctgcacggactcctggggacaggacggggacgagcaagtgcagaaaagccggctgcgtgtattttgggactccagaaaacaagggcttttgcacactgtgtttcatcgagtacagagaaaacaaacattttgctgctgcctcagggaaagtcagtcccacagcgtccaggttccagaacaccattccgtgcctggggagggaatgcggcacccttggaagcaccatgtttgaaggatactgccagaagtgtttcattgaagctcagaatcagagatttcatgaggccaaaaggacagaagagcaactgagatcgagccagcgcagagatgtgcctcgaaccacacaaagcacctcaaggcccaagtgcgcccgggcctcctgcaagaacatcctggcctgccgcagcgaggagctctgcatggagtgtcagcatcccaaccagaggatgggccctggggcccaccggggtgagcctgcccccgaagacccccccaagcagcgttgccgggcccccgcctgtgatcattttggcaatgccaagtgcaacggctactgcaacgaatgctttcagttcaagcagatgtatggctaaccggaaacaggtgggtcacctcctgcaagaagtggggcctcgagctgtcagtcatcatggtgctatcctctgaacccctcagctgccactgcaacagtgggcttaagggtgtctgagcaggagaggaaagataagctcttcgtggtgcccacgatgctcaggtttggtaacccgggagtgttcccaggtggccttagaaagcaaagcttgtaactggcaagggatgatgtcagattcagcccaaggttcctcctctcctaccaagcaggaggccaggaacttctttggacttggaaggtgtgcggggactggccgaggcccctgcaccctgcgcatcaggactgcttcatcgtcttggctgagaaagggaaaagacacacaagtcgcgtgggttggagaagccagagccattccacctcccctcccccagcatctctcagagatgtgaagccagatcctcatggcagcgaggccctctgcaagaagctcaaggaagctcagggaaaatggacgtattcagagagtgtttgtagttcatggtttttccctacctgcccggttcctttcctgaggacccggcagaaatgcagaaccatccatggactgtgattctgaggctgctgagactgaacatgttcacattgacagaaaaacaagctgctctttataatatgcaccttttaaaaaattagaatattttactgggaagacgtgtaactctttgggttattactgtctttacttctaaagaagttagcttgaactgaggagtaaaagtgtgtacatatataatatacccttacattatgtatgagggatttttttaaattatattgaaatgctgccctagaagtacaataggaaggctaaataataataacctgttttctggttgttgttggggcatgagcttgtgtatacactgcttgcataaactcaaccagctgcctttttaaagggagctctagtcctttttgtgtaattcactttatttattttattacaaacttcaagattatttaagtgaagatatttcttcagctctggggaaaatgccacagtgttctcctgagagaacatccttgctttgagtcaggctgtgggcaagttcctgaccacagggagtaaattggcctctttgatacacttttgcttgcctccccaggaaagaaggaattgcatccaaggtatacatacatattcatcgatgtttcgtgcttctccttatgaaactccagctatgtaataaaaaactatactctgtgttctgttaatgcctctgagtgtcctacctccttggagatgagatagggaaggagcagggatgagactggcaatggtcacagggaaagatgtggccttttgtgatggttttattttctgttaacactgtgtcctgggggggctgggaagtcccctgcatcccatggtaccctggtattgggacagcaaaagccagtaaccatgagtatgaggaaatctctttctgttgctggcttacagtttctctgtgtgctttgtggttgctgtcatatttgctctagaagaaaaaaaaaaaaggaggggaaatgcattttccccagagataaaggctgccattttgggggtctgtacttatggcctgaaaatatttgtgatccataactctacacagcctttactcatactattaggcacactttccccttagagccccctaagtttttcccagacgaatctttataatttctttccaaagataccaaataaacttcagtgttttcatctaattctcttaaagttgatatcttaatattttgtgttgatcattatttccattcttaatgtgaaaaaaagtaattatttatacttattataaaaagtatttgaaatttgcacatttaattgtccctaatagaaagccacctattctttgttggatttcttcaagtttttctaaataaatgtaacttttcacaagagtcaacattaaaaaataaattatttaagaacaaaaaaaaaaaaaaa

SEQ ID NO: 662 - protein, 790 aa, Homo sapien
MAEQVLPQALYLSNMRKAVKIRERTPEDIFKPTNGIIHHFKTMHRYTLEMFRTCQFCPQFREIIHKALIDRNIQATLESQKKLNWCREVRKLVALKTNGDGNCLMHATSQYMWGVQDTDLVLRKALFSTLKETDTRNFKFRWQLESLKSQEFVETGLCYDTRNWNDEWDNLIKMASTDTPMARSGLQYNSLEEIHIFVLCNILRRPIIVISDKMLRSLESGSNFAPLKVGGIYLPLHWPAQECYRYPIVLGYDSHHFVPLVTLKDSGPEIRAVPLVNRDRGRFEDLKVHFLTDPENEMKEKLLKEYLMVIEIPVQGWDHGTTHLINAAKLDEANLPKEINLVDDYFELVQHEYKKWQENSEQGRREGHAQNPMEPSVPQLSLMDVKCETPNCPFFMSVNTQPLCHECSERRQKNQNKLPKLNSKPGPEGLPGMALGASRGEAYEPLAWNPEESTGGPHSAPPTAPSPFLFSETTAMKCRSPGCPFTLNVQHNGFCERCHNARQLHASHAPDHTRHLDPGKCQACLQDVTRTFNGICSTCFKRTTAEASSSLSTSLPPSCHQRSKSDPSRLVRSPSPHSCHRAGNDAPAGCLSQAARTPGDRTGTSKCRKAGCVYFGTPENKGFCTLCFIEYRENKHFAAASGKVSPTASRFQNTIPCLGRECGTLGSTMFEGYCQKCFIEAQNQRFHEAKRTEEQLRSSQRRDVPRTTQSTSRPKCARASCKNILACRSEELCMECQHPNQRMGPGAHRGEPAPEDPPKQRCRAPACDHFGNAKCNGYCNECFQFKQMYG

SEQ ID NO: 663 - DNA, 4446 bp, Homo sapien; identical to SEQ ID NO: 661

SEQ ID NO: 664 - protein, 790 aa, Homo sapien; identical to SEQ ID NO: 662

SEQ ID NO: 665 - DNA, 1103 bp, Homo sapien
cttcggtcctgctgtagtgccttctgcgccaggcccggttcaatcagcggccacaactgtctagggctcagacaccaccagccaatgagggagggcacgtggagccgcgtctgggctcgcggctcctgaccaatggggaagtggcatgtgggagggcgccggggttccccccgccaatggggagctacggcgcgcggccgggacttggaggcggtgcggcgcggcgggtgcggttcagtcggtcggcggcggcagcggaggaggaggaggaggaggaggatgaggaggatgaggaggatgtgggccacgcaggggctggcggtgcgcgtggctctgagcgtgctgccgggcagccgggcgctgcggccgggcgactgcgaagtttgtatttcttatctgggaagattttaccaggacctcaaagacagagatgtcacattctcaccagccactattgaaaacgaacttataaagttctgccgggaagcaagaggcaaagagaatcggttgtgctactatatcggggccacagatgatgcagccaccaaaatcatcaatgaggtatcaaagcctctggcccaccacatccctgtggagaagatctgtgagaagcttaagaagaaggacagccagatatgtgagcttaagtatgacaagcagatcgacctgagcacagtggacctgaagaagctccgagttaaagagctgaagaagattctggatgactggggggagacatgcaaaggctgtgcagaaaagtctgactacatccggaagataaatgaactgatgcctaaatatgcccccaaggcagccagtgcaccgaccgatttgtagtctgctcaatctctgttgcacctgagggggaaaaaacagttcaactgcttactcccaaaacagcctttttgtaatttattttttaagtgggctcctgacaatactgtatcagatgtgaagcctggagctttcctgatgatgctggccctacagtacccccatgaggggattcccttccttctgttgctggtgtactctaggacttcaaagtgtgtctgggatttttttattaaagaaaaaaaatttctagctgtcaaaaaaaaaaa

SEQ ID NO: 666 - protein, 234 aa, Homo sapien
MGKWHVGGRRGSPRQWGATARGRDLEAVRRGGCGSVGRRRQRRRRRRRRMRRMRRMWATQGLAVRVALSVLPGSRALRPGDCEVCISYLGRFYQDLKDRDVTFSPATIENELIKFCREARGKENRLCYYIGATDDAATKIINEVSKPLAHHIPVEKICEKLKKKDSQICELKYDKQIDLSTVDLKKLRVKELKKILDDWGETCKGCAEKSDYIRKINELMPKYAPKAASAPTDL

SEQ ID NO: 667 - DNA, 4676 bp, Homo sapien
ggggacatgcaacatttacaggaaactggctagaagacagcaggggaactcgagaagttggttgttttcagcagattaaaacaatacagatttatcagcaagactgttgaacgcataacgtgcccaagatgcctgtccctccccctccagcacccccgccgcccccgacgtttgcactggccaatacagagaagcctaccttgaataagacagagcaggctgggagaaatgctctcctttctgatatcagcaaagggaagaaactaaagaagacggtcaccaatgacagaagtgcaccaatactggacaaacctaaaggagctggtgctggaggcggtggtggtggctttggtggaggcggcggatttggcggaggaggtggtggcggaggcggtggaagttttggagggggcggacctccaggtctgggaggattgttccaggctggaatgccgaagctgagatccacggccaacagggataatgattctggaggaagccgaccaccattgttgccaccgggaggaagatccacatctgcgaaacccttttcacccccaagtggcccagggaggtttcctgtgccttctccaggccacagaagtggtcccccagagcctcagaggaaccgaatgccgcccccaaggcccgacgtgggctcaaagcctgatagcattcctcctccagtacctagtactccaagacccattcaatcaagtctgcacaaccgggggtccccaccagtgcccggaggccccaggcagcccagccccgggcccactcctccccctttccctggaaaccgcggcactgctttgggaggaggctcaatacgtcagtcccccttgagctcctcctcgcccttctccaaccggcctcccctgccgcctacccccagcagggccttggatgacaaaccccctccaccacctcctccagtgggcaacaggccctccatccacagggaagcggttccccctcctcctcctcagaacaacaagcctccagtgccttccactccgcggccttcggcctcctcacaggccccacctccgccgccacctcccagcaggcccgggccgcctcctctgcctccaagttccagcggcaatgacgaaaccccaagactcccacagcggaatctgtccctcagttcgtccacgcccccgttaccttcgccaggacgttcaggtcctcttcctcccccgcccagtgagagacccccacctccagtgagggacccgccaggccgatcaggccccctcccaccacctcctccagtaagcagaaacggcagcacatctcgggccctgcctgctacccctcagttgccatccaggagtggagtagacagtcccaggagtggacccaggcctccccttcctcctgataggcccagtgctggggcacctcccccacctccaccatcaacatctattagaaatggcttccaagactctccatgtgaagatgagtgggaaagcagattctacttccatccgatttccgatttgccacctccagagccatatgtacaaacgaccaaaagttatcccagcaaactggcaagaaacgaaagccggagtggatccaaccgaagagaaaggggtgctccaccactccctcccatcccgaggtgatctttgcctgctcttctctacccaagctcaagagctgcttctgttgctatctaagaactgcataccctcctccctgcttcttcccttgtgcctcatgtatgggcaggaggaaaggtgggagggggagtgggaatatgcgtgtgtgggtgggaatcggtaagaaatgcacctagcttttcatattgtgtttattctccaggctattgcttgcttcagctgcagcctgcctgtgctggctgctggggtcgataggcttttgtcgtaataggcagagatgacttgcatcccagctttccaccaaccaaattcaaacattcactgcttatttgttacagactgtaattattaaagtccctgagagctgttttctcccgttcctttttcgcatgcttggcctcctctctgtttctatgaaccacagaccacctaagcaagctgctgagtaagggctcactggaaacttgcagtcacaggatgtccaatctttggcagtccgagcttggctctaggacagagctgtccaatagaaatataatgtgagccccatatacaatttttacatttctaatatattttaaacaagtgaagttaatatgcatccaaaatatttcaacctgtaatcaacataaaattttaatgagatattttatattattttttggtactgaatcttcaaaatccagagtgtattttacacttaccgcacatctccattcagactagtcacatttttaagtgctcagtagccagatgtggctggtggctactggattagacagcacgagtctggaagatggaagctagtgcagaaacctcttgtttaaaaaacaaaaaaggcaagatgggcttgagcgattcaagaggcaactaaaaataaaattaggacccagcaccttgtttgacacacagtttgaccttcgattttcctcccttaacttccctcttcccttaatatctgtatacaagtgttgcttcaaagtaccaaggtcagaaattgattcagtacggtttactaaagtcatgtggaataaagccattggaaacaaatggaaagcctgtcgggacttctgggctcagaaccagctggctcacgcactccacttgtcagctggacttctgccttgtgaaatggaagcagcctttgttcctttctggctgagcaagctcctgaggctgggagagactaggaaggcttggtaggaggggaaaaaagtcaggaaaagatatcaaatcagaaacatggaagaagaagggaaccgatttgagttggtgggcaaaactctaaaaatctaaatctgatgcttatgtaagggttgagcgaattagggagattgctagtggaaattggagggaatttgttttgcatcatttgtctaggatctatgcaaatatagctccactaaaggaccatagggaagagccagccttgccttttcttatatgattttgtttacaaaattttactgggacttttaaatctagctatagagttgggaaaaaatatttccacttagatattttacatggttttgtttaaaattaccattacttgttttttaaaaacacatgaccacatatgtatatgtatatctacctaaacattgtatcatggtttcagtatgttattcatgtattactgggagatgctaccaagaaaccaacccaaagaaaattctgaaaaatacatttctatttatagaataaatgtttcatttatataaaagcaaaagaacttagagttctaataaatgggatgtctaataaattatgaagttactgatttgaatatattatatttttataacttccttgccaaagtcctgatttagtacattagagaacctgtgtttcctctctcctctaccattcatctctcttccatacagtcatttgggctttttactcaaagagaatcaagaaataataagatataacaagcttggcaaagtgttggctttttaaaaaaaatttttttaatctctagcagtttggtaatttagcagcatcatttatttgggattcttttatctgatttcaacagtgaaaaacatccctatgataaagcctaatgacccatttcacaaaagatggaatttgcccttcctagaaaatatgacggagaaaagtctgactcagagaaagtgagtctgaattttataaggggtagtaagaattggacaattcctttgcatatctgaacttggcaggtaccgttctaaatctgaaacagggtgatagctcaaagttgccattcatccagaatagattgttttagaatgtagtgtttaagtgactgtttcattaatacacctacaccctttctttgaaagtttgcaacctaattgcatctaaaactatgaataagttctgtggtaaaatcttaaactatggaaaattacaaaaatgaatttttcttccctgaaatcagagcttacatgtgtgtttttttataacattttcagataaatgtattcaacatgtaatacagtattttaacattcacctcttattttatattgaaatgtattacagtattaaaactcagtgttcagtatttatttcactatgcattttatttagtaaaagccaggagaaatgtttaatccaatggtgccttactttgtgatttaaaagaaatcaacttttttttatgtctaagtagtagattatttgcatatttgtaaaaactgttaggtctttatattttaaagtgtaataccagttttgttattttagtagcagaaatgggatgattgttaaagttccccaaaaatgttggcatgaaattaatttttccctccttatagtcaaggaccgtagaggaagaaaaacttttttttcatatcatgcactatgtaaacagacacattttgctatctgtgtcatcaggatagtgtaagtggtagggtagagactaccctagacatctgcatctttgtaagttagccagacaataaagaaaagcagaatgaaaaaaaatctatgtcggtgcggagaaagaggtaatgaaatggcaggaattcgatatcagcttat

SEQ ID NO: 668 - protein, 545 aa, Homo sapien
  unsure 36: unknown amino acid
GHATFTGNWLEDSRGTREVGCFQQIKTIQIYQQDCXTHNVPKMPVPPPPAPPPPPTFALANTEKPTLNKTEQAGRNALLSDISKGKKLKKTVTNDRSAPILDKPKGAGAGGGGGGFGGGGGFGGGGGGGGGGSFGGGGPPGLGGLFQAGMPKLRSTANRDNDSGGSRPPLLPPGGRSTSAKPFSPPSGPGRFPVPSPGHRSGPPEPQRNRMPPPRPDVGSKPDSIPPPVPSTPRPIQSSLHNRGSPPVPGGPRQPSPGPTPPPFPGNRGTALGGGSIRQSPLSSSSPFSNRPPLPPTPSRALDDKPPPPPPPVGNRPSIHREAVPPPPPQNNKPPVPSTPRPSASSQAPPPPPPPSRPGPPPLPPSSSGNDETPRLPQRNLSLSSSTPPLPSPGRSGPLPPPPSERPPPPVRDPPGRSGPLPPPPPVSRNGSTSRALPATPQLPSRSGVDSPRSGPRPPLPPDRPSAGAPPPPPPSTSIRNGFQDSPCEDEWESRFYFHPISDLPPPEPYVQTTKSYPSKLARNESRSGSNRRERGAPPLPPIPR

SEQ ID NO: 669 - DNA, 1914 bp, Homo sapien
gcagccaggcgcgcactgcacagctctcttctctcgccgccgcccgagcgcacccttcagcccgcgcgccggccgtgagtcctcggtgctcgcccgccggccagacaaacagcccgcccgaccccgtcccgaccctggccgccccgagcggagcctggagcaaaatgatgcttcaacacccaggccaggtctctgcctcggaagtgagtgcttctgccatcgtcccctgcctgtcccctcctgggtcactggtgtttgaggattttgctaacctgacgccctttgtcaaggaagagctgaggtttgccatccagaacaagcacctctgccaccggatgtcctctgcgctggaatcagtcactgtcagcgacagacccctcggggtgtccatcacaaaagccgaggtagcccctgaagaagatgaaaggaaaaagaggcgacgagaaagaaataagattgcagctgcaaagtgccgaaacaagaagaaggagaagacggagtgcctgcagaaagagtcggagaagctggaaagtgtgaatgctgaactgaaggctcagattgaggagctcaagaacgagaagcagcatttgatatacatgctcaaccttcatcggcccacgtgtattgtccgggctcagaatgggaggactccagaagatgagagaaacctctttatccaacagataaaagaaggaacattgcagagctaagcagtcgtggtatgggggcgactggggagtcctcattgaatcctcattttatacccaaaaccctgaagccattggagagctgtcttcctgtgtacctctagaatcccagcagcagagaaccatcaaggcgggagggcctgcagtgattcagcaggcccttcccattctgccccagagtgggtcttggaccagggcaagtgcatctttgcctcaactccaggatttaggccttaacacactggccattcttatgttccagatggcccccagctggtgtcctgcccgcctttcatctggattctacaaaaaaccaggatgcccaccgttagattcaggcagcagtgtctgtacctcgggtgggagggatggggccatctccttcaccgtggctaccattgtcactcgtaggggatgtggagtgagaacagcatttagtgaagttgtgcaacggccagggttgtgctttctagcaaatatgctgttatgtccagaaattgtgtgtgcaagaaaactaggcaatgtactcttccgatgtttgtgtcacacaacactgatgtgacttttatatgctttttctcagatctggtttctaagagttttggggggcggggctgtcaccacgtgcagtatctcaagatattcaggtggccagaagagcttgtcagcaagaggaggaacagaattctcccagcgttaacacaaaatccatgggcagcatgatggcaggtcctctgttgcaaactcagttccaaagtcacaggaagaaagcagaaagttcaacttccaaagggttaggactctccactcaatgtcttaggtcaggagttgtgtctaggctggaagagccaaagaaatattccattttcctttccttgtggttgaaaccacagtcagtggagagatgtttggaacacagtcagtggagctggtggtaccaggtttagcattattggatgtcaaaagcattttttttgtcatgtagctgttttaagaaatctggcccagggtgtttgcagctgtgagaagtcactcacactggccacaaggacgctggctactgtctattaaaattctgatgtttctgtgaaattctcagagtgtttaattgtactcaatggtatcattacaattttctgtaagagaaaatattacttatttatcctagtattcctaacctgtcagaataataaatattgtggtaaaa

SEQ ID NO: 670 - protein, 181 aa, Homo sapien
MMLQHPGQVSASEVSASAIVPCLSPPGSLVFEDFANLTPFVKEELRFAIQNKHLCHRMSSALESVTVSDRPLGVSITKAEVAPEEDERKKRRRERNKIAAAKCRNKKKEKTECLQKESEKLESVNAELKAQIEELKNEKQHLIYMLNLHRPTCIVRAQNGRTPEDERNLFIQQIKEGTLQS

SEQ ID NO: 671 - DNA, 736 bp, Homo sapien
cgagctggagaggtggtcggagaagtaggaacctcctgccgggctcgtggcggcttctgtccgctccgcggagggaagcgccttccccacaggacatcaatgcaagcttgaataagaaaaacaaattcttcctcctaagccatggcatatcagttatacagaaatactactttgggaaacagtcttcaggagagcctagatgagctcatacagtctcaacagatcaccccccaacttgcccttcaagttctacttcagtttgataaggctataaatgcagcactggctcagagggtcaggaacagagtcaatttcaggggctctctaaatacgtacagattctgcgataatgtgtggacttttgtactgaatgatgttgaattcagagaggtgacagaacttattaaagtggataaagtgaaaattgtagcctgtgatggtaaaaatactggctccaatactacagaatgaatagaaaaaatatgacttttttacaccatcttctgttattcattgcttttgaagagaagcatagaagagactttttatttattctagaattgcagaaatgactacactgtgctataccagagaattccagtagaaagaaacttgtaactctgtagcctcttacatcacctttattatacagcatgaaaaaccataacttttttttaaggacaaaagttgttgccttcctaagaaccttctttaataaactcattttaaaactctg

SEQ ID NO: 672 - protein, 109 aa, Homo sapien
MAYQLYRNTTLGNSLQESLDELIQSQQITPQLALQVLLQFDKAINAALAQRVRNRVNFRGSLNTYRFCDNVWTFVLNDVEFREVTELIKVDKVKIVACDGKNTGSNTTE

SEQ ID NO: 673 - DNA, 1776 bp, Homo sapien
tttcatttcctcactgactataaaagaatagagaaggaagggcttcagtgaccggctgcctggctgacttacagcagtcagactctgacaggatcatggctatgatggaggtccaggggggacccagcctgggacagacctgcgtgctgatcgtgatcttcacagtgctcctgcagtctctctgtgtggctgtaacttacgtgtactttaccaacgagctgaagcagatgcaggacaagtactccaaaagtggcattgcttgtttcttaaaagaagatgacagttattgggaccccaatgacgaagagagtatgaacagcccctgctggcaagtcaagtggcaactccgtcagctcgttagaaagatgattttgagaacctctgaggaaaccatttctacagttcaagaaaagcaacaaaatatttctcccctagtgagagaaagaggtcctcagagagtagcagctcacataactgggaccagaggaagaagcaacacattgtcttctccaaactccaagaatgaaaaggctctgggccgcaaaataaactcctgggaatcatcaaggagtgggcattcattcctgagcaacttgcacttgaggaatggtgaactggtcatccatgaaaaagggttttactacatctattcccaaacatactttcgatttcaggaggaaataaaagaaaacacaaagaacgacaaacaaatggtccaatatatttacaaatacacaagttatcctgaccctatattgttgatgaaaagtgctagaaatagttgttggtctaaagatgcagaatatggactctattccatctatcaagggggaatatttgagcttaaggaaaatgacagaatttttgtttctgtaacaaatgagcacttgatagacatggaccatgaagccagttttttcggggcctttttagttggctaactgacctggaaagaaaaagcaataacctcaaagtgactattcagttttcaggatgatacactatgaagatgtttcaaaaaatctgaccaaaacaaacaaacagaaaacagaaaacaaaaaaacctctatgcaatctgagtagagcagccacaaccaaaaaattctacaacacacactgttctgaaagtgactcacttatcccaagagaatgaaattgctgaaagatctttcaggactctacctcatatcagtttgctagcagaaatctagaagactgtcagcttccaaacattaatgcaatggttaacatcttctgtctttataatctactccttgtaaagactgtagaagaaagagcaacaatccatctctcaagtagtgtatcacagtagtagcctccaggtttccttaagggacaacatccttaagtcaaaagagagaagaggcaccactaaaagatcgcagtttgcctggtgcagtggctcacacctgtaatcccaacattttgggaacccaaggtgggtagatcacgagatcaagagatcaagaccatagtgaccaacatagtgaaaccccatctctactgaaagtacaaaaattagctgggtgtgttggcacatgcctgtagtcccagctacttgagaggctgaggcaagagaattgtttgaacccgggaggcagaggttgcagtgtggtgagatcatgccactacactccagcctggcgacagagcgagacttggtttcaaaaaaaaaaaaaaaaaaaacttcagtaagtacgtgttatttttttcaataaaattctattacagtatgtcaaaaaaaaaaaaaaaaaa

SEQ ID NO: 674 - protein, 281 aa, Homo sapien [sequence omitted]

SEQ ID NO: 675 - DNA, 1776 bp, Homo sapien; identical to SEQ ID NO: 673

SEQ ID NO: 676 - protein, 281 aa, Homo sapien [sequence omitted]

SEQ ID NO: 677 - DNA, 1614 bp, Mus musculus
agtgctccgcgcgctcttgacgtccggagcccctggagtaggcgcttccggccattcatactgcagtcggtcagtgttcggttgaaggattctgtgtgctgtcggacccagagggtgacggcgccgctaggatgaagctcgtgagatttttgatgaaattgagtcatgaaactgtaaccattgaattgaagaacggaacacaggtccatggaacaatcacaggtgtggatgtcagcatgaatacacatcttaaagctgtgaaaatgaccctgaagaacagagaacctgtacagctggaaacgctgagtattcgaggaaataacattcggtattttattctaccagacagtttacctctggatacactacttgtggatgttgaacctaaggtgaaatctaagaaaagggaagctgttgcaggaagaggcagaggaagaggaagaggaagaggacgtggccgtggcagaggaagagggggtcctaggcgataatgtctctcaagatttcaaagtcatatgagatttgggatattttttgtacaggttgtgtttgtttatgtcagtttttaataaacataaatgtgggacagagctgtctatttagtatatcaaagttttagtagtttcctccacattcacgaaattaccacagtgagagctaagcatttctactgggcagtttcatttttagttgatcaggttttaagtttttgaactaaaatttttctttttctttttatgatgaataaggttaaaataaaagccttagacaaattaaatttggcagagtttaattgagcaaaggacaattcacaaatcaggtagcccctgaaccataataggctcagaggcttcagcccagctgcatagttgaagatttatggacagaaggaaagtgatgtatggaaaatggaagtgagatacagcaacagccggattagttacagttcagcgtttgccttatttgaatatggtttgaacagttcgctgtctttggttggctgaaacttagtgattgccacaagagtagggtaccgtctgtttacacgtccagttaggctacagttctatgtactgagaaacctttaagctgaacttgagatatgtaaagagactttaggctaaacttaacaatatatataggatatatacccttctacttcacatgcactgaatatgcattttattgctttactcttcattctgtggcacctacccacaggggaagtaagaagtttgttttggtatttcggaaactaaagtccttatgggatggggtctagaattgattctcctttcctgagttttactccacggagtcttaggtacctggtaaaaagttgtcttctaaattaagggtcattgctttgttgtctagctgctaatgtcttacttttgtttcttttgctttttaatcagttcttaataggatatagttttatgttttccaagttataacttggagttaatggtcactagattatcagttatgagcagtgttaaaatctcctattaatgtgtaatgtacctgtcagtgcctcctttattaaggggttctttgagaataaaagagaaaagacctactttatttgacagcaaaaaaaaaaaggaattc

SEQ ID NO: 678 - protein, 119 aa, Mus musculus
MKLVRFLMKLSHETVTIELKNGTQVHGTITGVDVSMNTHLKAVKMTLKNREPVQLETLSIRGNNIRYFILPDSLPLDTLLVDVEPKVKSKKREAVAGRGRGRGRGRGRGRGRGRGGPRR

SEQ ID NO: 679 - DNA, 4074 bp, Homo sapien
cacgccccgcgctgctgggtcccgccagacacgccgccgccgcaggaaagtctacagtttggtaccccaggactcgctggtcaggaaagccctgcaggacatgagtgttaggcccgacgcctggcccttggcagcttgggaggtggctggggctgcttttgcctttgccagagacagctccaactgaggacctctccaacgggcccatccacagtccttccttcccctagtgtctgggaagacaggcgcgatgatggactccccgttcctggagctgtggcagtccaaggcagtgtccatcagggagcagctgggactcggggaccggcccaacgactcctattgctacaactcggccaaaaacagcaccgtgctccagggggtcacctttggtggcatccccactgtcctgctcatagacgtcagctgcttcctgttcttaatcttggtgttttctattataagaagaagattctgggactatggccgcattgccctggtgtcagaagcagacagcgagtccagatttcagagattgtcatcgacttcctcctcaggtcaacaagactttgaaaatgagctgggatgctgtccctggctgactgccatcttccgtctgcatgatgaccagatcctggaatggtgtggggaggacgccatccactacctgtccttccagaggcacatcatcttcctgttggtggtggtcagctttttgtccctgtgtgtcatcctgcctgtcaacctctcaggggatttgctggacaaagacccgtatagttttgggaggacaacaatagcaaacctacagactgacaatgacctcctttggctgcacaccatctttgctgtcatttacctcttcttcactgtgggtttcatgcggcaccacactcagtccattaagtacaaagaggagaacctggtgaggcggaccctgttcatcacaggactccccagagatgccaggaaggagactgtggagagccacttccgggacgcgtatcccacgtgtgaggtggttgatgtgcagctgtgctacaacgtggccaaactgatctacctgtgcaaggagaaaaagaagactgagaagagcctgacctattacacaaacctgcaggtgaagacaggccagcggaccctcatcaaccccaagccctgtggccagttttgctgctgtgaagtgctgggctgtgagtgggaagacgccatctcttactacacacggatgaaggacaggctgctggagaggatcacagaggaagaacgccacgtccaggaccagcccctgggaatggccttcgtcaccttccaggagaagtccatggccacctacatcctgaaagatttcaatgcctgcaagtgtcagagccttcagtgcaaaggtgagccccagccgtcctcccatagcagggagctctatacctccaagtggacagtcacctttgctgctgaccctgaggacatctgctggaagaacctctctatccagggcctccgctggtggctacagtggctgggcatcaacttcaccctcttcctggggctatttttcctgaccacaccctccatcatcctgtccaccatggacaagtttaatgtcaccaaacccatccatgcgctgaataacccgatcatcagccagttcttccccaccctcctgctctggtccttctcggccctgctcccctccattgtctactactctacactgctggagtctcactggaccaagtcgggggaaaaccagatcatgatgaccaaagtctacatattcttgatcttcatggtgctgatcctgccctccctgggtctcaccagtctagattttttcttccggtggctctttgacaaaacttcctcggaggcctccatcaggttggagtgcgtcttcctgcctgaccagggtgccttctttgtgaactatgtcatcgcctcggccttcatcggcaatggcatggagctgctgcggctgccaggtctcatcctctataccttccgcatgatcatggccaagacggctgctgaccgcaggaatgtcaagcagaaccaggccttccagtacgagtttggagccatgtatgcatggatgctgtgtgtcttcactgtcatcgtggcctacagcatcacttgtcccatcatcgcgccatttggcctcatctacatcctgctcaagcacatggtggaccggcacaacctctacttcgtctacctcccagccaagctggagaaggggatccactttgccgctgtgaaccaggccttggcagcccccatcctgtgcctcttctggctctacttcttttccttcctgcgcctgggtatgaaggcccccgccactctgttcaccttcctggtgctgctgctcaccatcctggtctgcctggctcacacctgctttggatgcttcaagcacctcagccctctgaactacaaaacagaagagcctgcaagtgacaaaggaagtgaggcagaggcccacatgcccccaccgttcacaccctacgtgcctcggattctgaacggcttggcctcggagaggacagcactgtctccgcagcagcagcagcagcagacctatggtgccatccacaacatcagcgggactatccctggacagtgcttggcgcagagcgccacgggcagtgtggctgctgccccccaggaggcctgaggctgggtctcactgctctgaaaagacacaaccagaatggcctggggctcaggcccttggctgagtgggaatgcgttgggactgcccagctgagctatcaggtgcccatcttttctggtcccagcagtggtgaggagagcacaggcaggcctcgcccctcccttgctcacccagtttcccctccggcacaagcttccagctctgcagctggggtgacatccccagtggtttgtcgccaagaccatgtggtggacttttcgccccccaaactgatgagtccgggagaatatatggagagagagatgtaacaaggggaaggcctcctcccttctgagcacacacacaaccgataaccaaagagatgctgcagtccaggtctgaggtcccgctggcatccagctccctgctccatggccagtccctccccagcccagcagtccctccaggctacatccaggagtaagctatggggaacaggttgggaggtggccagtgctcctgccagctgtgcacacatctctgtatcccgctagagttctgtgtttttgtatcatgttgtcagggacgctagctgggtcagggttaccccatagcaggcagggacaaggaccactcataatatgcccattggaccacagttaagatccagcctctctcacctcttcagggctgagtgcatgagtctgcacctccaggcaggctctgtgcagtactcaccccctccgtctgctccctccaaggtgtgggggtgggcagtgctcagggcctcctcggagccaaaggacagcatggtcggcacagaggaaggggtacctgggctgggtgcagggccatcccactgcccttgagctgtggctctggcaggaaggaggggcagcccatccctcttctccctcctggggattctggggaatgggatgcaacttaagacttctgcctgagaagcctcctccctgctgcctccagggggcaccaaggcacaagcctgtgcagtaggggcgggatgggggtgtggaagagcaggtccaggctcctagcacaactggcctggggccttggcacctctgtaggccctgcctgtgcctgtccgctggcctggggggcctgggcttatctgggccttctcactcagggactctcttgacgctgacttgcccccgcagcggtggccagtgctgcctctgctccaagctgcccctgcgctgggaggggtgggggcggtgccattggtctggtgcagcatagccctggccagtggcctcatccccagcaggcctcccgtgcctctgccagcaaggaggggccggccagctctgcttgcacagggggccccatgtggggtcagcgcacgctcatgtcactgagttccagccgcttttagagtaaagtcgtttatcatc

SEQ ID NO: 680 - protein, 807 aa, Homo sapien
MMDSPFLELWQSKAVSIREQLGLGDRPNDSYCYNSAKNSTVLQGVTFGGIPTVLLIDVSCFLFLILVFSIIRRRFWDYGRIALVSEADSESRFQRLSSTSSSGQQDFENELGCCPWLTAIFRLHDDQILEWCGEDAIHYLSFQRHIIFLLVVVSFLSLCVILPVNLSGDLLDKDPYSFGRTTIANLQTDNDLLWLHTIFAVIYLFFTVGFMRHHTQSIKYKEENLVRRTLFITGLPRDARKETVESHFRDAYPTCEVVDVQLCYNVAKLIYLCKEKKKTEKSLTYYTNLQVKTGQRTLINPKPCGQFCCCEVLGCEWEDAISYYTRMKDRLLERITEEERHVQDQPLGMAFVTFQEKSMATYILKDFNACKCQSLQCKGEPQPSSHSRELYTSKWTVTFAADPEDICWKNLSIQGLRWWLQWLGINFTLFLGLFFLTTPSIILSTMDKFNVTKPIHALNNPIISQFFPTLLLWSFSALLPSIVYYSTLLESHWTKSGENQIMMTKVYIFLIFMVLILPSLGLTSLDFFFRWLFDKTSSEASIRLECVFLPDQGAFFVNYVIASAFIGNGMELLRLPGLILYTFRMIMAKTAADRRNVKQNQAFQYEFGAMYAWMLCVFTVIVAYSITCPIIAPFGLIYILLKHMVDRHNLYFVYLPAKLEKGIHFAAVNQALAAPILCLFWLYFFSFLRLGMKAPATLFTFLVLLLTILVCLAHTCFGCFKHLSPLNYKTEEPASDKGSEAEAHMPPPFTPYVPRILNGLASERTALSPQQQQQQTYGAIHNISGTIPGQCLAQSATGSVAAAPQEA

SEQ ID NO: 681 - DNA, 1830 bp, Homo sapien
ggggagttgaaacctaattttgtggcgtagcagctatgcagcttgaaatccaagtagcactaaattttattatttcgtatttgtacaataagcttcccaggagacgtgtcaacatttttggtgaagaacttgaaagacttcttaagaagaaatatgaagggcactggtatcctgaaaagccatacaaaggatcggggtttagatgtatacacataggggagaaagtggacccagtgattgaacaagcatccaaagagagtggtttggacattgatgatgttcgtggcaatctgccacaggatcttagtgtttggatcgacccatttgaggtttcttaccaaattggtgaaaagggaccagtgaaggtgctttacgtggatgataataatgaaaatggatgtgagttggataaggagatcaaaaacagctttaacccagaggcccaggtttttatgcccataagtgacccagcctcatcagtgtccagctctccatcgcctccttttggtcactctgctgctgtaagccctaccttcatgccccggtccactcagcctttaacctttaccactgccacttttgctgccaccaagttcggctctaccaaaatgaagaatagtggccgtagcaacaaggttgcacgtacttctcccatcaacctcggcttgaatgtgaatgacctcttgaagcagaaagccatctcttcctcaatgcactctctgtatgggcttggcttgggtagccagcagcagccacagcaacagcagcagccagcccagccgccaccgccaccaccaccaccacagcagcaacaacagcagaaaacctctgctctttctcctaatgccaaggaatttatttttcctaatatgcagggtcaaggtagtagtaccaatggaatgttcccaggtgacagcccccttaacctcagtcctctccagtacagtaatgcctttgatgtgtttgcagcctatggaggcctcaatgagaagtcttttgtagatggcttgaattttagcttaaataacatgcagtattctaaccagcaattccagcctgttatggctaactaaaaaaaagaaaatgtatcgtacaagttaaaatgcacgggcccaagggggattttttttttcacctccttgagaatttttttttttaagcttatagtaaggatacattcaagcttggttaaaaaaataataataaaacatgcatcatttttcatttgccaaccaagcacaaagttattttatactgactgtatattttaaagtatactctcagatatggcctcttacagtatttaagatatagcaaggacatggctgatttttttttataaaaattggcactaataagtgggtttattggtcttttctaattgtataatttaatttagtacaaagtttgtaaaatatcagaggatatatatatattgtttctacgacatggtattgcatttatatctttttactacagtgatctgtgacagcagcagcttcatgttgtattttttttactgaaattgtaaaatatccatcttaaagacatcaactattctaaaaattgtgtacaggatattcctttagtggtggaattaaaatgtacgaatacttgctttttcaaaaaaatgtattttctgttaaaagtttaaagatttttgctatatattatggaagaaaaatgtaatcgtaaatattaattttgtacctatattgtgcaatacttgaaaaaaacggtataaaagtattttgagtcagtgtcttacatgttaagagggactgaaatagtttatattaagtttgtattaaaattctttaaaattaaaaa

SEQ ID NO: 682 - protein, 345 aa, Homo sapien
MQLEIQVALNFIISYLYNKLPRRRVNIFGEELERLLKKKYEGHWYPEKPYKGSGFRCIHIGEKVDPVIEQASKESGLDIDDVRGNLPQDLSVWIDPFEVSYQIGEKGPVKVLYVDDNNENGCELDKEIKNSFNPEAQVFMPISDPASSVSSSPSPPFGHSAAVSPTFMPRSTQPLTFTTATFAATKFGSTKMKNSGRSNKVARTSPINLGLNVNDLLKQKAISSSMHSLYGLGLGSQQQPQQQQQPAQPPPPPPPPQQQQQQKTSALSPNAKEFIFPNMQGQGSSTNGMFPGDSPLNLSPLQYSNAFDVFAAYGGLNEKSFVDGLNFSLNNMQYSNQQFQPVMAN

SEQ ID NO: 683 - DNA, 1530 bp, Homo sapien
aatcctggaacaaggctacagcgtcgaagatccccagcgctgcgggctcggagagcagtcctaacggcgcctcgtacgctagtgtcctcccttttcagtccgcgtccctccctgggccgggctggcactcttgccttccccgtccctcatggcgctgctccgacgcccgacggtgtccagtgatttggagaatattgacacaggagttaattctaaagttaagagtcatgtgactattaggcgaactgttttagaagaaattggaaatagagttacaaccagagcagcacaagtagctaagaaagctcagaacaccaaagttccagttcaacccaccaaaacaacaaatgtcaacaaacaactgaaacctactgcttctgtcaaaccagtacagatggaaaagttggctccaaagggtccttctcccacacctgaggatgtctccatgaaggaagagaatctctgccaagctttttctgatgccttgctctgcaaaatcgaggacattgataacgaagattgggagaaccctcagctctgcagtgactacgttaaggatatctatcagtatctcaggcagctggaggttttgcagtccataaacccacatttcttagatggaagagatataaatggacgcatgcgtgccatcctagtggattggctggtacaagtccactccaagtttaggcttctgcaggagactctgtacatgtgcgttggcattatggatcgatttttacaggttcagccagtttcccggaagaagcttcaattagttgggattactgctctgctcttggcttccaagtatgaggagatgttttctccaaatattgaagactttgtttacatcacagacaatgcttataccagttcccaaatccgagaaatggaaactctaattttgaaagaattgaaatttgagttgggtcgacccttgccactacacttcttaaggcgagcatcaaaagccggggaggttgatgttgaacagcacactttagccaagtatttgatggagctgactctcatcgactatgatatggtgcattatcatccttctaaggtagcagcagctgcttcctgcttgtctcagaaggttctaggacaaggaaaatggaacttaaagcagcagtattacacaggatacacagagaatgaagtattggaagtcatgcagcacatggccaagaatgtggtgaaagtaaatgaaaacttaactaaattcatcgccatcaagaataagtatgcaagcagcaaactcctgaagatcagcatgatccctcagctgaactcaaaagccgtcaaagaccttgcctccccactgataggaaggtcctaggctgccgtgggccctggggatgtgtgcttcattgtgccctttttcttattggtttagaactcttgattttgtacatagtcctctggtctatctcatgaaacctcttctcagaccagttttctaaacatatattgaggaaaaataaagcgattggtttttcttaaggtaaaaaaaaaaaaaaaaaa

SEQ ID NO: 684 - protein, 398 aa, Homo sapien
MALLRRPTVSSDLENIDTGVNSKVKSHVTIRRTVLEEIGNRVTTRAAQVAKKAQNTKVPVQPTKTTNVNKQLKPTASVKPVQMEKLAPKGPSPTPEDVSMKEENLCQAFSDALLCKIEDIDNEDWENPQLCSDYVKDIYQYLRQLEVLQSINPHFLDGRDINGRMRAILVDWLVQVHSKFRLLQETLYMCVGIMDRFLQVQPVSRKKLQLVGITALLLASKYEEMFSPNIEDFVYITDNAYTSSQIREMETLILKELKFELGRPLPLHFLRRASKAGEVDVEQHTLAKYLMELTLIDYDMVHYHPSKVAAAASCLSQKVLGQGKWNLKQQYYTGYTENEVLEVMQHMAKNVVKVNENLTKFIAIKNKYASSKLLKISMIPQLNSKAVKDLASPLIGRS

SEQ ID NO: 685 - DNA, 6972 bp, Homo sapien
cgcccccgcctctgagctcccttcccatggcggccctagtgttggaggacgggtcggtcctgcggggccagccctttggggccgccgtgtcgactgccggggaagtggtgtttcaaaccggcatggtcggctaccccgaggccctcactgatccctcctacaaggcacagatcttagtgctcacctatcctctgatcggcaactatggcatccccccagatgaaatggatgagttcggtctctgcaagtggtttgaatcctcgggcatccacgtagcagcactggtagtgggagagtgctgtcctactcccagccactggagtgccacccgcaccctgcatgagtggctgcagcagcatggcatccctggcttgcaaggagtagacactcgggagctgaccaagaagttgcgggaacaggggtctctgctggggaagctggtccagaatggaacagaaccttcatccctgccattcttggaccccaatgcccgccccctggtaccagaggtctccattaagactccacgggtattcaatacagggggtgcccctcggatccttgctttggactgtggcctcaagtataatcagatccgatgcctctgccagcgtggggctgaggtcactgtggtaccctgggaccatgcactagacagccaagagtatgagggtctcttcttaagtaatgggcctggtgaccctgcctcctatcccagtgtcgtatccacactgagccgtgttttatctgagcctaatccccgacctgtctttgggatctgcctgggacaccagctattggccttagccattggggccaagacttacaagatgagatatgggaaccgaggccataaccagccctgcttgttggtgggctctgggcgctgctttctgacatcccagaaccatgggtttgctgtggagacagactcactgccagcagactgggctcctctcttcaccaacgccaatgatggttccaatgaaggcattgtgcacaacagcttgcctttcttcagtgtccagtttcacccagagcaccaagctggcccttcagatatggaactgcttttcgatatctttctggaaactgtgaaagaggccacagctgggaaccctgggggccagacagttagagagcggctgactgagcgcctctgtccccctgggattcccactcccggctctggacttccaccaccacgaaaggttctgatcctgggctcagggggcctctccattggccaagctggagaatttgactactcgggctctcaggcaattaaggccctgaaggaggaaaacatccagacgttgctgatcaaccccaatattgccacagtgcagacctcccaggggctggccgacaaggtctattttcttcccataacacctcattatgtaacccaggtgatacgtaatgaacgccccgatggtgtgttactgacttttgggggccagactgctctgaactgtggtgtggagctgaccaaggccggggtgctggctcggtatggggtccgggtcctgggcacaccagtggagaccattgagctgaccgaggatcgacgggcctttgctgccagaatggcagagatcggagagcatgtggccccgagcgaggcagcaaattctcttgaacaggcccaggcagccgctgaacggctggggtaccctgtgctagtgcgtgcagcctttgccctgggtggcctgggctctggctttgcctctaacagggaggagctctctgctctcgtggccccagcttttgcccataccagccaagtgctagtagacaagtctctgaagggatggaaggagattgagtacgaggtggtgagagacgcctatggcaactgtgtcacggtgtgtaacatggagaacttggacccactgggcatccacactggtgagtccatagtggtggcccctagccagacactgaatgacagggagtatcagctcctgaggcagacagctatcaaggtgacccagcacctgggaattgttggggagtgcaatgtgcagtatgccttgaaccctgagtctgagcagtattacatcattgaagtgaatgccaggctctctcgcagctctgccctggccagtaaggccacaggttatccactggcttatgtggcagccaagctagcattgggcatccctttgcctgagctcaggaactctgtgacagggggtacagcagcctttgaacccagcgtggattattgtgtggtgaagattcctcgatgggaccttagcaagttcctgcgagtcagcacaaagattgggagctgcatgaagagcgttggtgaagtcatgggcattgggcgttcatttgaggaggccttccagaaggccctgcgcatggtggatgagaactgtgtgggctttgatcacacagtgaaaccagtcagcgatatggagttggagactccaacagataagcggatttttgtggtggcagctgctttgtgggctggttattcagtggaccgcctgtatgagctcacacgcatcgaccgctggttcctgcaccgaatgaagcgtatcatcgcacatgcccagctgctagaacaacaccgtggacagcctttgccgccagacctgctgcaacaggccaagtgtcttggcttctcagacaaacagattgcccttgcagttctgagcacagagctggctgttcgcaagctgcgtcaggaactggggatctgtccagcagtgaaacagattgacacagttgcagctgagtggccagcccagacaaattacctatacctaacgtattggggcaccacccatgacctcacctttcgaacacctcatgtcctagtccttggctctggcgtctaccgtattggctctagcgttgaatttgactggtgtgctgtaggctgcatccagcagctccgaaagatgggatataagaccatcatggtgaactataacccagagacagtcagcaccgactatgacatgtgtgatcgactctactttgatgagatctcttttgaggtggtgatggacatctatgagctcgagaaccctgaaggtgtgatcctatccatgggtggacagctgcccaacaacatggccatggcgttgcatcggcagcagtgccgggtgctgggcacctcccctgaagccattgactcggctgagaaccgtttcaagttttcccggctccttgacaccattggtatcagccagcctcagtggagggagctcagtgacctcgagtctgctcgccaattctgccagaccgtggggtacccctgtgtggtgcgcccctcctatgtgctgagcggtgctgctatgaatgtggcctacacggatggagacctggagcgcttcctgagcagcgcagcagccgtctccaaagagcatcccgtggtcatctccaagttcatccaggaggctaaggagattgacgtggatgccgtggcctctgatggtgtggtggcagccatcgccatctctgagcatgtggagaatgcaggtgtgcattcaggtgatgcgacgctggtgacccccccacaagatatcactgccaaaaccctggagcggatcaaagccattgtgcatgctgtgggccaggagctacaggtcacaggacccttcaatctgcagctcattgccaaggatgaccagctgaaagttattgaatgcaacgtacgtgtctctcgctccttccccttcgtttccaagacactgggtgtggacctagtagccttggccacgcgggtcatcatgggggaagaagtggaacctgtggggctaatgactggttctggagtcgtgggagtaaaggtgcctcagttctccttctcccgcttggcgggtgctgacgtggtgttgggtgtggaaatgaccagtactggggaggtggccggctttggggagagccgctgtgaggcatacctcaaggccatgctaagcactggctttaagatccccaagaagaatatcctgctgaccattggcagctataagaacaaaagcgagctgctcccaactgtgcggctactggagagcctgggctacagcctctatgccagtctcggcacagctgacttctacactgagcatggcgtcaaggtaacagctgtggactggcactttgaggaggctgtggatggtgagtgcccaccacagcggagcatcctggagcagctagctgagaaaaactttgagctggtgattaacctgtcaatgcgtggagctgggggccggcgtctctcttcctttgtcaccaagggctaccgcacccgacgcttggccgctgacttctccgtgcccctaatcatcgatatcaagtgcaccaaactctttgtggaggccctaggccagatcgggccagcccctcctttgaaggtgcatgttgactgtatgacctcccaaaagcttgtgcgactgccgggattgattgatgtccatgtgcacctgcgggaaccaggtgggacacataaggaggactttgcttcaggcacagccgctgccctggctgggggtatcaccatggtgtgtgccatgcctaatacccggccccccatcattgacgcccctgctctggccctggcccagaagctggcagaggctggcgcccggtgcgactttgcgctattccttggggcctcgtctgaaaatgcaggaaccttgggcaccgtggccgggtctgcagccgggctgaagctttacctcaatgagaccttctctgagctgcggctggacagcgtggtccagtggatggagcatttcgagacatggccctcccacctccccattgtggctcacgcagagcagcaaaccgtggctgctgtcctcatggtggctcagctcactcagcgctcagtgcacatatgtcacgtggcacggaaggaggagatcctgctaattaaagctgcaaaggcacggggcttgccagtgacctgcgaggtggctccccaccacctgttcctaagccatgatgacctggagcgcctggggcctgggaagggggaggtccggcctgagcttggctcccgccaggatgtggaagccctgtgggagaacatggctgtcatcgactgctttgcctcagaccatgctccccataccttggaggagaagtgtgggtccaggcccccacctgggttcccagggttagagaccatgctgccactactcctgacggctgtaagcgagggccggctcagcctggacgacctgctgcagcgattgcaccacaatcctcggcgcatctttcacctgcccccgcaggaggacacctatgtggaggtggatctggagcatgagtggacaattcccagccacatgcccttctccaaggcccactggacaccttttgaagggcagaaagtgaagggcaccgtccgccgtgtggtcctgcgaggggaggttgcctatatcgatgggcaggttctggtacccccgggctatggacaggatgtacggaagtggccacagggggctgttcctcagctcccaccctcagcccctgccactagtgagatgaccacgacacctgaaagaccccgccgtggcatcccagggcttcctgatggccgcttccatctgccgccccgaatccatcgagcctccgacccaggtttgccagctgaggagccaaaggagaagtcctctcggaaggtagccgagccagagctgatgggaacccctgatggcacctgctaccctccaccaccagtaccgagacaggcatctccccagaacctggggacccctggcttgctgcacccccagacctcacccctgctgcactcattagtgggccaacatatcctgtccgtccagcagttcaccaaggatcagatgtctcacctgttcaatgtggcacacacactgcgtatgatggtgcagaaggagcggagcctcgacatcctgaaggggaaggtcatggcctccatgttctatgaagtgagcacacggaccagcagctcctttgcagcagccatggcccggctgggaggtgctgtgctcagcttctcggaagccacatcgtccgtccagaagggcgaatccctggctgactccgtgcagaccatgagctgctatgccgacgtcgtcgtgctccggcacccccagcctggagcagtggagctggccgccaagcactgccggaggccagtgatcaatgctggggatggggtcggagagcaccccacccaggccctgctggacatcttcaccatccgtgaggagctgggaactgtcaatggcatgacgatcacgatggtgggtgacctgaagcacggacgcacagtacattccctggcctgcctgctcacccagtatcgtgtcagcctgcgctacgtggcacctcccagcctgcgcatgccacccactgtgcgggccttcgtggcctcccgcggcaccaagcaggaggaattcgagagcattgaggaggcgctgcctgacactgatgtgctctacatgactcgaatccagaaggaacgatttggctctacccaggagtacgaagcttgctttggtcagttcatcctcactccccacatcatgacccgggccaagaagaagatggtggtgatgcacccgatgccccgtgtcaacgagataagcgtggaagtggactcggatccccgcgcagcctacttccgccaggctgagaacggcatgtacatccgcatggctctgttagccaccgtgctgggccgtttctaggggcctggcttcctcagcctcttctctttaggcccagctgctgggcaaggaattccagtgcctcctacgggggcagcacacttagatattcctggacatccagattgctcacatgtgctgaccacacttcaggctctggactggagctctctggcatgggggtggggcctcagatgctggggcccagtctgccccatcttcattcctgcaccttaaacctgtacagtcatttttctactgacttaataaacagccgagctgtcccttg

SEQ ID NO: 686 - protein, 2000 aa, Homo sapien
MAALVLEDGSVLRGQPFGAAVSTAGEVVFQTGMVGYPEALTDPSYKAQILVLTYPLIGNYGIPPDEMDEFGLCKWFESSGIHVAALVVGECCPTPSHWSATRTLHEWLQQHGIPGLQGVDTRELTKKLREQGSLLGKLVQNGTEPSSLPFLDPNARPLVPEVSIKTPRVFNTGGAPRILALDCGLKYNQIRCLCQRGAEVTVVPWDHALDSQEYEGLFLSNGPGDPASYPSVVSTLSRVLSEPNPRPVFGICLGHQLLALAIGAKTYKMRYGNRGHNQPCLLVGSGRCFLTSQNHGFAVETDSLPADWAPLFTNANDGSNEGIVHNSLPFFSVQFHPEHQAGPSDMELLFDIFLETVKEATAGNPGGQTVRERLTERLCPPGIPTPGSGLPPPRKVLILGSGGLSIGQAGEFDYSGSQAIKALKEENIQTLLINPNIATVQTSQGLADKVYFLPITPHYVTQVIRNERPDGVLLTFGGQTALNCGVELTKAGVLARYGVRVLGTPVETIELTEDRRAFAARMAEIGEHVAPSEAANSLEQAQAAAERLGYPVLVRAAFALGGLGSGFASNREELSALVAPAFAHTSQVLVDKSLKGWKEIEYEVVRDAYGNCVTVCNMENLDPLGIHTGESIVVAPSQTLNDREYQLLRQTAIKVTQHLGIVGECNVQYALNPESEQYYIIEVNARLSRSSALASKATGYPLAYVAAKLALGIPLPELRNSVTGGTAAFEPSVDYCVVKIPRWDLSKFLRVSTKIGSCMKSVGEVMGIGRSFEEAFQKALRMVDENCVGFDHTVKPVSDMELETPTDKRIFVVAAALWAGYSVDRLYELTRIDRWFLHRMKRIIAHAQLLEQHRGQPLPPDLLQQAKCLGFSDKQIALAVLSTELAVRKLRQELGICPAVKQIDTVAAEWPAQTNYLYLTYWGTTHDLTFRTPHVLVLGSGVYRIGSSVEFDWCAVGCIQQLRKMGYKTIMVNYNPETVSTDYDMCDRLYFDEISFEVVMDIYELENPEGVILSMGGQLPNNMAMALHRQQCRVLGTSPEAIDSAENRFKFSRLLDTIGISQPQWRELSDLESARQFCQTVGYPCVVRPSYVLSGAAMNVAYTDGDLERFLSSAAAVSKEHPVVISKFIQEAKEIDVDAVASDGVVAAIAISEHVENAGVHSGDATLVTPPQDITAKTLERIKAIVHAVGQELQVTGPFNLQLIAKDDQLKVIECNVRVSRSFPFVSKTLGVDLVALATRVIMGEEVEPVGLMTGSGVVGVKVPQFSFSRLAGADVVLGVEMTSTGEVAGFGESRCEAYLKAMLSTGFKIPKKNILLTIGSYKNKSELLPTVRLLESLGYSLYASLGTADFYTEHGVKVTAVDWHFEEAVDGECPPQRSILEQLAEKNFELVINLSMRGAGGRRLSSFVTKGYRTRRLAADFSVPLIIDIKCTKLFVEALGQIGPAPPLKVHVDCMTSQKLVRLPGLIDVHVHLREPGGTHKEDFASGTAAALAGGITMVCAMPNTRPPIIDAPALALAQKLAEAGARCDFALFLGASSENAGTLGTVAGSAAGLKLYLNETFSELRLDSVVQWMEHFETWPSHLPIVAHAEQQTVAAVLMVAQLTQRSVHICHVARKEEILLIKAAKARGLPVTCEVAPHHLFLSHDDLERLGPGKGEVRPELGSRQDVEALWENMAVIDCFASDHAPHTLEEKCGSRPPPGFPGLETMLPLLLTAVSEGRLSLDDLLQRLHHNPRRIFHLPPQEDTYVEVDLEHEWTIPSHMPFSKAHWTPFEGQKVKGTVRRVVLRGEVAYIDGQVLVPPGYGQDVRKWPQGAVPQLPPSAPATSEMTTTPERPRRGIPGLPDGRFHLPPRIHRASDPGLPAEEPKEKSSRKVAEPELMGTPDGTCYPPPPVPRQASPQNLGTPGLLHPQTSPLLHSLVGQHILSVQQFTKDQMSHLFNVAHTLRMMVQKERSLDILKGKVMASMFYEVSTRTSSSFAAAMARLGGAVLSFSEATSS

SEQ ID NO: 687 - DNA, 5723 bp, Homo sapien
gcagccgccacattcaacaggcagcagcgcagcgggcgcgccgctggggagagcaagcggcccgcggcgtccgtccgtccttccgtccgcggccctgtcagctggagcgcggcgcaggctctgccccggcccggcggctctggccggccgtccagtccgtgcggcggaccccgaggagcctcgatgtggatggccccgcgaagttaagttctgggctcgcgcttccactccgccgcgccttcctcccagtttccgtccgctcgccgcaccggcttcgttcccccaaatctcggaccgtcccttcgcgccccctccccgtccgcccccagtgctgcgttctccccctcttggctctcctgcggctgggggaggggcgggggtcaccatggccgaggcgcctcaggtggtggagatcgacccggacttcgagccgctgccccggccgcgctcgtgcacctggccgctgcccaggccggagtttagccagtccaactcggccacctccagcccggcgccgtcgggcagcgcggctgccaaccccgacgccgcggcgggcctgccctcggcctcggctgccgctgtcagcgccgacttcatgagcaacctgagcttgctggaggagagcgaggacttcccgcaggcgcccggctccgtggcggcggcggtggcggcggcggccgccgcggccgccaccggggggctgtgcggggacttccagggcccggaggcgggctgcctgcacccagcgccaccgcagcccccgccgcccgggccgctgtcgcagcacccgccggtgccccccgccgccgctgggccgctcgcggggcagccgcgcaagagcagctcgtcccgccgcaacgcgtggggcaacctgtcctacgccgacctcatcaccaaggccatcgagagctcggcggagaagcggctcacgctgtcgcagatctacgagtggatggtcaagagcgtgccctacttcaaggataagggtgacagcaacagctcggcgggctggaagaattcaattcgtcataatctgtccctacacagcaagttcattcgtgtgcagaatgaaggaactggaaaaagttcttggtggatgctcaatccagagggtggcaagagcgggaaatctcctaggagaagagctgcatccatggacaacaacagtaaatttgctaagagccgaagccgagctgccaagaagaaagcatctctccagtctggccaggagggtgctggggacagccctggatcacagttttccaaatggcctgcaagccctggctctcacagcaatgatgactttgataactggagtacatttcgccctcgaactagctcaaatgctagtactattagtgggagactctcacccattatgaccgaacaggatgatcttggagaaggggatgtgcattctatggtgtacccgccatctgccgcaaagatggcctctactttacccagtctgtctgagataagcaatcccgaaaacatggaaaatcttttggataatctcaaccttctctcatcaccaacatcattaactgtttcgacccagtcctcacctggcaccatgatgcagcagacgccgtgctactcgtttgcgccaccaaacaccagtttgaattcacccagcccaaactaccaaaaatatacatatggccaatccagcatgagccctttgccccagatgcctatacaaacacttcaggacaataagtcgagttatggaggtatgagtcagtataactgtgcgcctggactcttgaaggagttgctgacttctgactctcctccccataatgacattatgacaccagttgatcctggggtagcccagcccaacagccgggttctgggccagaacgtcatgatgggccctaattcggtcatgtcaacctatggcagccaggcatctcataacaaaatgatgaatcccagctcccatacccaccctggacatgctcagcagacatctgcagttaacgggcgtcccctgccccacacggtaagcaccatgccccacacctcgggtatgaaccgcctgacccaagtgaagacacctgtacaagtgcctctgccccaccccatgcagatgagtgccctggggggctactcctccgtgagcagctgcaatggctatggcagaatgggccttctccaccaggagaagctcccaagtgacttggatggcatgttcattgagcgcttagactgtgacatggaatccatcattcggaatgacctcatggatggagatacattggattttaactttgacaatgtgttgcccaaccaaagcttcccacacagtgtcaagacaacgacacatagctgggtgtcaggctgagggttagtgagcaggttacacttaaaagtacttcagattgtctgacagcaggaactgagagaagcagtccaaagatgtctttcaccaactcccttttagttttcttggttaaaaaaaaaaacaaaaaaaaaaaccctcctttttttcctttcgtcagacttggcagcaaagacatttttcctgtacaggatgtttgcccaatgtgtgcaggttatgtgctgctgtagataaggactgtgccattggaaatttcattacaatgaagtgccaaactcactacaccatataattgcagaaaagattttcagatcctggtgtgctttcaagttttgtatataagcagtagatacagattgtatttgtgtgtgtttttggtttttctaaatatccaattggtccaaggaaagtttatactctttttgtaatactgtgatgggcctcatgtcttgataagttaaacttttgtttgtactacctgttttctgcggaactgacggatcacaaagaactgaatctccattctgcatctccattgaacagccttggacctgttcacgttgccacagaattcacatgagaaccaagtagcctgttatcaatctgctaaattaatggacttgttaaacttttggaaaaaaaaagattaaatgccagctttgtacaggtcttttctatttttttttgtttattttgttatttgcaaatttgtacaaacatttaaatggttctaatttccagataaatgatttttgatgttattgttgggacttaagaacatttttggaatagatattgaactgtaataatgttttcttaaaactagagtctactttgttacatagtcagcttgtaaattttgtggaaccacaggtatttggggcagcattcataattttcattttgtattctaactggattagtactaattttatacatgcttaactggtttgtacactttgggatgctacttagtgatgtttctgactaatcttaaatcattgtaattagtacttgcatattcaacgtttcaggccctggttgggcaggaaagtgatgtatagttatggacactttgcgtttcttatttaggataacttaatatgtttttatgtatgtattttaaagaaatttcatctgcttctactgaactatgcgtactgcatagcatcaagtcttctctagagacctctgtagtcctgggaggcctcataatgtttgtagatcagaaaagggagatctgcatctaaagcaatggtcctttgtcaaacgagggattttgatccacttcaccattttgagttgagctttagcaaaagtttcccctcataattctttgctcttgtttcagtccaggtggaggttggttttgtagttctgccttgaggaattatgtcaacactcatacttcatctcattctcccttctgccctgcagattagattacttagcacactgtggaagtttaagtggaaggagggaatttaaaaatgggacttgagtggtttgtagaatttgtgttcataagttcagatgggtagcaaatggaatagaacttacttaaaaattggggagatttatttgaaaaccagctgtaagttgtgcattgagattatgttaaaagccttggcttaagaatttgaaaatttctttagcctgtagcaacctaaactgtaattcctatcattatgttttattactttccaattacctgtaactgacagaccaaattaattggctttgtgtcctatttagtccatcagtattttcaagtcatgtggaaagcccaaagtcatcacaatgaagagaacaggtgcacagcactgttcctcttgtgttcttgagaaggatctaatttttctgtatatagcccacatcacacttgctttgtcttgtatgttaattgcatcttcattggcttggtatttcctaaatgtttaacaagaacacaagtgttcctgataagatttcctacagtaagccagctgtattgtaagcttcccaccgtgatgatcatttttttgaagattcattgaacagccaccactctatcatcctcattttggggcagtccaagacatagctggttttagaaacccaagttcctctaagcacagcctcccgggtatgtaactgaacttggtgccaaagtacttgtgtactaatttctattactacgtactgtcactttcctcccgtgccattactgcatcataatacaaggaacctcagagcccccatttgttcattaaagaggcaactacagccaaaatcactgttaaaatcttactacttcatggagtagctcttaggaaaatatatcttcctcctgagtctgggtaattatacctctcccaagcccccattgtgtgttgaaatcctgtcatgaatccttggtagctctctgagaacagtgaagtccagggaaaggcatctggtctgtctggaaagcaaacattatgtggcctctggtagtttttttcctgtaagaatactgactttctggagtaatgagtatatatcagttattgtacatgattgctttgtgaaatgtgcaaatgatatcacctatgcagccttgtttgatttattttctctggtttgtactgttattaaaagcatattgtattatagagctattcagatattttaaatataaagatgtattgtttccgtaatatagacgtatggaatatatttaggtaatagatgtattacttggaaagttctgctttgacaaactgacaaagtctaaatgagcacatgtatcccagtgagcagtaaatcaatggaacatcccaagaagaggataaggatgcttaaaatggaaatcattctccaacgatatacaaattggacttgttcaactgctggatatatgctaccaataaccccagccccaacttaaaattcttacattcaagctcctaagagttcttaatttataactaattttaaaagagaagtttcttttctggttttagtttgggaataatcattcattaaaaaaaatgtattgtggtttatgcgaacagaccaacctggcattacagttggcctctccttgaggtgggcacagcctggcagtgtggccaggggtggccatgtaagtcccatcaggacgtagtcatgcctcctgcatttcgctacccgagtttagtaacagtgcagattccacgttcttgttccgatactctgagaagtgcctgatgttgatgtacttacagacacaagaacaatctttgctataattgtataaagccataaatgtacataaattatgtttaaatggcttggtgtctttcttttctaattatgcagaataagctctttattaggaattttttgtgaagctattaaatacttgagttaa

SEQ ID NO: 688 - protein, 655 aa, Homo sapien
MAEAPQVVEIDPDFEPLPRPRSCTWPLPRPEFSQSNSATSSPAPSGSAAANPDAAAGLPSASAAAVSADFMSNLSLLEESEDFPQAPGSVAAAVAAAAAAAATGGLCGDFQGPEAGCLHPAPPQPPPPGPLSQHPPVPPAAAGPLAGQPRKSSSSRRNAWGNLSYADLITKAIESSAEKRLTLSQIYEWMVKSVPYFKDKGDSNSSAGWKNSIRHNLSLHSKFIRVQNEGTGKSSWWMLNPEGGKSGKSPRRRAASMDNNSKFAKSRSRAAKKKASLQSGQEGAGDSPGSQFSKWPASPGSHSNDDFDNWSTFRPRTSSNASTISGRLSPIMTEQDDLGEGDVHSMVYPPSAAKMASTLPSLSEISNPENMENLLDNLNLLSSPTSLTVSTQSSPGTMMQQTPCYSFAPPNTSLNSPSPNYQKYTYGQSSMSPLPQMPIQTLQDNKSSYGGMSQYNCAPGLLKELLTSDSPPHNDIMTPVDPGVAQPNSRVLGQNVMMGPNSVMSTYGSQASHNKMMNPSSHTHPGHAQQTSAVNGRPLPHTVSTMPHTSGMNRLTQVKTPVQVPLPHPMQMSALGGYSSVSSCNGYGRMGLLHQEKLPSDLDGMFIERLDCDMESIIRNDLMDGDTLDFNFDNVLPNQSFPHSVKTTTHSWVSG

SEQ ID NO: 689 - DNA, 2319 bp, Homo sapien
cgaccacccggcctcggccaataagcgccgccctctcgcccccgtgttactgggtagaagaaaacaaaaacaaacagagcgagaagggccagagactctccgaggcggcggcagagacagaagagcggggtcggggccggctgaccaggaacctgggcgagcagcggcgggggcccgagggattctgaaggaagatttccattaggtaatttgtttaatcagtgcaagcgaaattaagggaaaatggatgtagaaaatgagcagatactgaatgtaaaccctgcagatcctgataacttaagtgactctctcttttccggtgatgaagaaaatgctgggactgaggaaataaagaatgaaataaatggaaattggatttcagcatcctccattaacgaagctagaattaatgccaaggcaaaaaggcgactaaggaaaaactcatcccgggactctggcagaggcgattcggtcagcgacagtgggagtgacgcccttagaagtggattaactgtgccaaccagtccaaagggaaggttgctggataggcgatccagatctgggaaaggaaggggactaccaaagaaaggtggtgcaggaggcaaaggtgtctggggtacacctggacaggtgtatgatgtggaggaggtggatgtgaaagatcctaactatgatgatgaccaggagaactgtgtttatgaaactgtagttttgcctttggatgaaagggcatttgagaagactttaacaccaatcatacaggaatattttgagcatggagatactaatgaagttgcggaaatgttaagagatttaaatcttggtgaaatgaaaagtggagtaccagtgttggcagtatccttagcattggaggggaaggctagtcatagagagatgacatctaagcttctttctgacctttgtgggacagtaatgagcacaactgatgtggaaaaatcatttgataaattgttgaaagatctacctgaattagcactggatactcctagagcaccacagttggtgggccagtttattgctagagctgttggagatggaattttatgtaatacctatattgatagttacaaaggaactgtagattgtgtgcaggctagagctgctctggataaggctaccgtgcttctgagtatgtctaaaggtggaaagcgtaaagatagtgtgtggggctctggaggtgggcagcaatctgtcaatcaccttgttaaagagattgatatgctgctgaaagaatatttactctctggagacatatctgaagctgaacattgccttaaggaactggaagtacctcattttcaccatgagcttgtatatgaagctattataatggttttagagtcaactggagaaagtacatttaagatgattttggatttattaaagtccctttggaagtcttctaccattactgtagaccaaatgaaaagaggttatgagagaatttacaatgaaattccggacattaatctggatgtcccacattcatactctgtgctggagcggtttgtagaagaatgttttcaggctggaataatttccaaacaactcagagatctttgtccttcaaggggcagaaagcgttttgtaagcgaaggagatggaggtcgtcttaaaccagagagctactgaatataagaactcttgcagtcttagatgttataaaaatatatatctgaattgtaagagttgttagcacaagttttttttttttttttttttaagcacttgttttgggtacaaggcatttctgacattttataaacctacatttaaggggaatttttaaaggaaatgttttttcttttttttttgtttttcgagggggcaaggagggacagaaaagtaacctcttcttaagtggaatattctaataagctaccttttgtaagtgccatgtttattatctaatcattccaagttttgcattgatgtctgactgccactcctttctttcaaggacagtgttttttgtagtaaaatcactggtttatacaaagctttatttagggggtaaagttaagctgctaaaaccccatgttggctgctgctgttgagatactgtgctttgggagtaaaaaaagaaagttatttctttgtcttaaagaatttttaaaaaattagtcatgagacttattcatctttccagggaacatactgattggtcttaaaagactagacagttaagtaaaaggtggctggaacatctatttttctacaaaactggaaaaatgaacctggttctagaagaatgtacaccaaaataaaacatgtgaagcagtaaaaaaaaaaaaaaaa

SEQ ID NO: 690 - protein, 469 aa, Homo sapien
MDVENEQILNVNPADPDNLSDSLFSGDEENAGTEEIKNEINGNWISASSINEARINAKAKRRLRKNSSRDSGRGDSVSDSGSDALRSGLTVPTSPKGRLLDRRSRSGKGRGLPKKGGAGGKGVWGTPGQVYDVEEVDVKDPNYDDDQENCVYETVVLPLDERAFEKTLTPIIQEYFEHGDTNEVAEMLRDLNLGEMKSGVPVLAVSLALEGKASHREMTSKLLSDLCGTVMSTTDVEKSFDKLLKDLPELALDTPRAPQLVGQFIARAVGDGILCNTYIDSYKGTVDCVQARAALDKATVLLSMSKGGKRKDSVWGSGGGQQSVNHLVKEIDMLLKEYLLSGDISEAEHCLKELEVPHFHHELVYEAIIMVLESTGESTFKMILDLLKSLWKSSTITVDQMKRGYERIYNEIPDINLDVPHSYSVLERFVEECFQAGIISKQLRDLCPSRGRKRFVSEGDGGRLKPESY

SEQ ID NO: 691 - DNA, 2403 bp, Homo sapien
cgaccacccggcctcggccaataagcgccgccctctcgcccccgtgttactgggtagaagaaaacaaaaacaaacagagcgagaagggccagagactctccgaggcggcggcagagacagaagagcggggtcggggccggctgaccaggaacctgggcgagcagcggcgggggcccgagggattctgaaggaagatttccattaggtaatttgtttaatcagtgcaagcgaaattaagggaaaatggatgtagaaaatgagcagatactgaatgtaaaccctgcagggtattttccctaattctccatggtgcttcaatagcatgttattatcataaaaatgaacagttttgtggaatagatgaccaaatatcctgataacttaagtgactctctcttttccggtgatgaagaaaatgctgggactgaggaaataaagaatgaaataaatggaaattggatttcagcatcctccattaacgaagctagaattaatgccaaggcaaaaaggcgactaaggaaaaactcatcccgggactctggcagaggcgattcggtcagcgacagtgggagtgacgcccttagaagtggattaactgtgccaaccagtccaaagggaaggttgctggataggcgatccagatctgggaaaggaaggggactaccaaagaaaggtggtgcaggaggcaaaggtgtctggggtacacctggacaggtgtatgatgtggaggaggtggatgtgaaagatcctaactatgatgatgaccaggagaactgtgtttatgaaactgtagttttgcctttggatgaaagggcatttgagaagactttaacaccaatcatacaggaatattttgagcatggagatactaatgaagttgcggaaatgttaagagatttaaatcttggtgaaatgaaaagtggagtaccagtgttggcagtatccttagcattggaggggaaggctagtcatagagagatgacatctaagcttctttctgacctttgtgggacagtaatgagcacaactgatgtggaaaaatcatttgataaattgttgaaagatctacctgaattagcactggatactcctagagcaccacagttggtgggccagtttattgctagagctgttggagatggaattttatgtaatacctatattgatagttacaaaggaactgtagattgtgtgcaggctagagctgctctggataaggctaccgtgcttctgagtatgtctaaaggtggaaagcgtaaagatagtgtgtggggctctggaggtgggcagcaatctgtcaatcaccttgttaaagagattgatatgctgctgaaagaatatttactctctggagacatatctgaagctgaacattgccttaaggaactggaagtacctcattttcaccatgagcttgtatatgaagctattataatggttttagagtcaactggagaaagtacatttaagatgattttggatttattaaagtccctttggaagtcttctaccattactgtagaccaaatgaaaagaggttatgagagaatttacaatgaaattccggacattaatctggatgtcccacattcatactctgtgctggagcggtttgtagaagaatgttttcaggctggaataatttccaaacaactcagagatctttgtccttcaaggggcagaaagcgttttgtaagcgaaggagatggaggtcgtcttaaaccagagagctactgaatataagaactcttgcagtcttagatgttataaaaatatatatctgaattgtaagagttgttagcacaagttttttttttttttttttttaagcacttgttttgggtacaaggcatttctgacattttataaacctacatttaaggggaatttttaaaggaaatgttttttcttttttttttgtttttcgagggggcaaggagggacagaaaagtaacctcttcttaagtggaatattctaataagctaccttttgtaagtgccatgtttattatctaatcattccaagttttgcattgatgtctgactgccactcctttctttcaaggacagtgttttttgtagtaaaatcactggtttatacaaagctttatttagggggtaaagttaagctgctaaaaccccatgttggctgctgctgttgagatactgtgctttgggagtaaaaaaagaaagttatttctttgtcttaaagaatttttaaaaaattagtcatgagacttattcatctttccagggaacatactgattggtcttaaaagactagacagttaagtaaaaggtggctggaacatctatttttctacaaaactggaaaaatgaacctggttctagaagaatgtacaccaaaataaaacatgtgaagcagtaaaaaaaaaaaaaaaa

SEQ ID NO: 692 - protein, 458 aa, Homo sapien
MTKYPDNLSDSLFSGDEENAGTEEIKNEINGNWISASSINEARINAKAKRRLRKNSSRDSGRGDSVSDSGSDALRSGLTVPTSPKGRLLDRRSRSGKGRGLPKKGGAGGKGVWGTPGQVYDVEEVDVKDPNYDDDQENCVYETVVLPLDERAFEKTLTPIIQEYFEHGDTNEVAEMLRDLNLGEMKSGVPVLAVSLALEGKASHREMTSKLLSDLCGTVMSTTDVEKSFDKLLKDLPELALDTPRAPQLVGQFIARAVGDGILCNTYIDSYKGTVDCVQARAALDKATVLLSMSKGGKRKDSVWGSGGGQQSVNHLVKEIDMLLKEYLLSGDISEAEHCLKELEVPHFHHELVYEAIIMVLESTGESTFKMILDLLKSLWKSSTITVDQMKRGYERIYNEIPDINLDVPHSYSVLERFVEECFQAGIISKQLRDLCPSRGRKRFVSEGDGGRLKPESY

SEQ ID NO: 693 - DNA, 4535 bp, Homo sapien
agcgggtctgcccgccgccgccactgctgctgccaccgccgtcgccgccgccgccgccgccgccactgctgctgccggtgctaaggagttcgctggagccctttcctcagacccggcccggtcttcgcgcccggactcctggcgccagcgctaggcgcactcaccgctctgacgggtgcagacgcgggagttgtcccagactgtggagtggcgggcacggccccagctccccttccgttccctgaccccttcttgccatcgccccagacatggggaacgcggcgaccgccaagaaaggcagcgaggtggagagcgtgaaagagtttctagccaaagccaaagaagactttttgaaaaaatgggagaatccaactcagaataatgccggacttgaagattttgaaaggaaaaaaacccttggaacaggttcatttggaagagtcatgttggtaaaacacaaagccactgaacagtattatgccatgaagatcttagataagcagaaggttgttaaactgaagcaaatagagcatactttgaatgagaaaagaatattacaggcagtgaattttcctttccttgttcgactggagtatgcttttaaggataattctaatttatacatggttatggaatatgtccctgggggtgaaatgttttcacatctaagaagaattggaaggttcagtgagccccatgcacggttctatgcagctcagatagtgctaacattcgagtacctcaattcactagacatcatctacagagatctaaaacctgaaaatctcttaattgaccatcaaggctatatccaggtcacagactttgggtttgccaaaagagttaaaggcagaacttggacattatgtggaactccagagtatttggctccagaaataattctcagcaagggctacaataaggcagtggattggtgggcattaggagtgctaatctatgaaatggcagctggctatcccccattctttgcagaccaaccaattcagatttatgaaaagattgtttctggaaaggtccgattcccatccaacttcagttcagatctcaaggaccttctacggaacctgctgcaggtggatttgaccaagagatttggaaatctaaagaatggtgtcagtgatataaaaactcacaagtggtttgccacgacagattggattgctatttaccagaggaaggttgaagctccattcataccaaagtttagaggctctggagataccagcaactttgatgactatgaagaagaagatatccgtgtctctataacagaaaaatgtgcaaaagaatttggtgaattttaaagaggaacaagatgacatctgagctcacactcagtgtttgcactctgttgagagataaggtagagctgagaccgtccttgttgaagcagttacctagttccttcattccaacgactgagtgaggtctttattgccatcatcccgtgtgcgcactctgcatccacctatgtaacaaggcaccgctaagcaagcattgtctgtgccataacacagtactagaccactttcttacttctctttgggttgtctttctcctctcctatatccatttcttccttttccaatttcattggttttctctaaacagtgctccattttattttgttggtgtttcagatgggcagtgttatggctacgtgatatttgaagggaaggataagtgttgctttcagtagttattgccaatattgttgttggtcaatggcttgaagataaactttctaataattattatttctttgagtagctcagacttggttttgccaaaactcttggtaatttttgaagatagactgtcttatcaccaaggaaatttatacaaattaagactaactttcttggaattcactattctggcaataaattttggtagactaatacagtacagctagacccagaaatttggaaggctgtagatcagaggttctagttccctttccctccttttatatcctcctctccttgagtaatgaagtgaccagcctgtgtagtgtgacaaacgtgtctcattcagcaggaaaaactaatgatatggatcatcacccagattctctcacttggtaccagcatttctgtaggtattagagaagagttctaagttttctaaaccttaactgttccttaaggattttagccagtattttaatagaacatgattaatgaaagtgacaaattttaaattttctctaatagtcctcatcataaactttttaaaggaaaataagcaaactaaaaagaacattggtttagataaatacttatactttgcaaagtcaaaaatggcttgatttttggaaacaatatagaggtattcatatttaaatgagggtttacatttgttttgttttgtaaccgttaaaaagaagttgtttccagctaattattgtggtgtactatatttgtgagcctagggtaggggcactgctgcaacttctgctttcatcccatgcctcatcaatgaggaaagggaacaaagtgtataaaactgccacaattgtattttaattttgaggtatgatattttcagatatttcataatttctaacctctgttctctcagtaaacagaatgtctgatcgatcatgcagatacaatgttggtatttgagaggttagtttttttcctacacttttttttgccaactgacttaacaacattgctgtcaggtggaaatttcaagcacttttgcacatttagttcagtgtttgttgagaatccatggcttaacccacttgttttgctatttttttctttgcttttaattttccccatctgattttatctctgcgtttcagtgacctaccttaaaacaacacacgagaagagttaaactgggttcattttaatgatcaatttacctgcatataaaatttatttttaatcaagctgatcttaatgtatataatcattctatttgctttattatcggtgcaggtaggtcattaacaccacttcttttcatctgtaccacaccctggtgaaacctttgaagacataaaaaaaacctgtctgagatgttctttctaccaatctatatgtctttcggttatcaagtgtttctgcatggtaatgtcatgtaaatgctgatattgatttcactggtccatctatatttaaaacgtgcaagaaaaaaataaaatactctgctctagcaagttttgtgtaacaaaggcatatcgtcatgttaataaatttaaaacatcattcgtataaaatattttaattttcttgtatttcatttagacccaagaacatgctgaccaatgtgttctatatgtaaactacaaattctatggtagctttgttgtatattattgtaaaattattttaataagtcatggggatgacaatttgattattacaatttagttttcagtaatcaaaaagatttctatgaattctaaaaaatatttttttctatgaaattactagtgcccagctgtagaatctaccttaggtagatgatccctagacatacgttggttttgagggctattcagccattccattttactctctatttaaaggccgtgagcaagcttgtcatgagcaaatatgtcaagggagtcaatctctgaccaatcaagtacactaaattagaatatttttaaagtatgtaacattcccagtttcagccacaatttagccaagaataagataaaaacttgaataagaagtaagtagcataaatcagtatttaacctaaaattacatatttgaaacagaagatattatgttatgctcagtaaataattaagagatggcattgtgtaagaaggagccctagactgaaagtcaagacatctgaatttcaggctggaaaactatcagtatgatctcagcctcagttctcttgtctgtaagatggaagaactggattaggcagtttgtaagattcctcctaactttcacagtcgatgacaagattgtctttttatctgatattttgaagggtatattgctttgaagtaagtctcaataaggcaatatattttagggcatctttcttcttatctctgacagtgttcttaaaattatttgaatatcataagagccttggtgtctgtcctaattcctttctcactcaccgatgctgaatacccagttgaatcaaactgtcaacctaccaaaaacgatattgtggcttatgggtattgctgtctcattcttggtatattcttgtgttaactgcccattggcctgaaaatactcattgtaagcctgaaaaaaaaaatctttcccactgttttttctgcttgttgtaagaatcaaatgaaataatgtatgtgaaagcaccttgtaaactgtaacctatcaatgtaaaatgttaaggtgtgttgttatttcattaattacttctttgtttagaatggaatttcctatgcactactgtagctaggaaatgctgaaaacaactgtgttttttaattaatcaataactgcaaaattaaagtaccttcaatggataagacaacaaaaaaaaaaaaaaaa

SEQ ID NO: 694 - protein, 351 aa, Homo sapien
MGNAATAKKGSEVESVKEFLAKAKEDFLKKWENPTQNNAGLEDFERKKTLGTGSFGRVMLVKHKATEQYYAMKILDKQKVVKLKQIEHTLNEKRILQAVNFPFLVRLEYAFKDNSNLYMVMEYVPGGEMFSHLRRIGRFSEPHARFYAAQIVLTFEYLNSLDIIYRDLKPENLLIDHQGYIQVTDFGFAKRVKGRTWTLCGTPEYLAPEIILSKGYNKAVDWWALGVLIYEMAAGYPPFFADQPIQIYEKIVSGKVRFPSNFSSDLKDLLRNLLQVDLTKRFGNLKNGVSDIKTHKWFATTDWIAIYQRKVEAPFIPKFRGSGDTSNFDDYEEEDIRVSITEKCAKEFGEF

SEQ ID NO: 695 - DNA, 2945 bp, Homo sapien
ccagccccccttcccttccctgaccccttcttgccatcgccccagacatggggaacgcggcgaccgccaagaaaggcagcgaggtggagagcgtgaaagagtttctagccaaagccaaagaagactttttgaaaaaatgggagaatccaactcagaataatgccggacttgaagattttgaaaggaaaaaaacccttggaacaggttcatttggaagagtcatgttggtaaaacacaaagccactgaacagtattatgccatgaagatcttagataagcagaaggttgttaaactgaagcaaatagagcatactttgaatgagaaaagaatattacaggcagtgaattttcctttccttgttcgactggagtatgcttttaaggataattctaatttatacatggttatggaatatgtccctgggggtgaaatgttttcacatctaagaagaattggaaggttcagtgagccccatgcacggttctatgcagctcagatagtgctaacattcgagtacctccattcactagacctcatctacagagatctaaaacctgaaaatctcttaattgaccatcaaggctatatccaggtcacagactttgggtttgccaaaagagttaaaggcagaacttggacattatgtggaactccagagtatttggctccagaaataattctcagcaagggctacaataaggcagtggattggtgggcattaggagtgctaatctatgaaatggcagctggctatcccccattctttgcagaccaaccaattcagatttatgaaaagattgtttctggaaaggtccgattcccatcccacttcagttcagatctcaaggaccttctacggaacctgctgcaggtggatttgaccaagagatttggaaatctaaagaatggtgtcagtgatataaaaactcacaagtggtttgccacgacagattggattgctatttaccagaggaaggttgaagctccattcataccaaagtttagaggctctggagataccagcaactttgatgactatgaagaagaagatatccgtgtctctataacagaaaaatgtgcaaaagaatttggtgaattttaaagaggaacaagatgacatctgagctcacactcagtgtttgcactctgttgagagataaggtagagctgagaccgtccttgttgaagcagttacctagttccttcattccaacgactgagtgaggtctttattgccatcatccgtgtgcgcactctgcatccacctatgtaacaaggcaccgctaagcaagcattgtctgtgccataacacagtactagaccactttcttacttctctttgggttgtctttctcctctcctacatccatttcttccttttcaatttcattggttttctctaaacagtgctccattttattttgttggtgtttcagatgggcagtgttatggctacgtgatatttgaagggaaggataagtgttgctttcagtagttattgccaatattgttgttggtcaatggcttgaagataaactttctaataattattatttctttgagtagctcagacttggttttgccaaaactcttggtaatttttgaagatagactgtcttatcaccaaggaaatttatacaaattaagactaactttcttggaattcactattctggcaataaattttggtagactaatacagtacagctagacccagaaatttggaaggctgtagatcagaggttctagttccctttccctccttttatatcctcctctccttgagtaatgaagtgaccagcctgtgtagtgtgacaaacgtgtctcattcagcaggaaaaactaatgatatggatcatcacccagattctctcacttggtaccagcatttctgtaggtattagagaagagttctaagttttctaaaccttaactgttccttaaggattttagccagtattttaatagaacatgattaatgaaagtgacaaattttaaattttctctaatagtcctcatcataaactttttaaaggaaaataagcaaactaaaaagaacattggtttagataaatacttatactttgcaaagtcaaaaatggcttgatttttggaaacaatatagaggtattcatatttaaatgagggtttacatttgttttgttttgtaaccgttaaaaagaagttgtttccagctaattattgtggtgtactatatttgtgagcctagggtaggggcactgctgcaacttctgctttcatcccatgcctcatcaatgaggaaagggaacaaagtgtataaaacctgccacaattgtattttaattttgaggtatgatattttcagatatttcataatttctaacctctgttctctcagtaaacagaatgtctgatcgatcatgcagatacaatgttggtatttgagaggttagtttttttcctacacttttttttgccaactgacttaacaacattgctgtcaggtggaaatttcaagcacttttgcacatttagttcagtgtttgttgagaatccatggcttaacccacttgttttgctatttttttctttgcttttaattttccccatctgattttatctctgcgtttcagtgacctaccttaaaacaacacacgagaagagttaaactgggttcattttaatgatcaatttacctgcatataaaatttatttttaatcaagctgatcttaatgtatataatcattctatttgctttattatcggtgcaggtaggtcattaacaccacttcttttcatctgtaccacaccctggtgaaacctttgaagacataaaaaaaacctgtctgagatgttctttctaccaatctatatgtctttcggttatcaagtgtttctgcatggtaatgtcatgtaaatgctgatattgatttcactggtccatctatatttaaaacgtgc

SEQ ID NO: 696 - protein, 351 aa, Homo sapien
MGNAATAKKGSEVESVKEFLAKAKEDFLKKWENPTQNNAGLEDFERKKTLGTGSFGRVMLVKHKATEQYYAMKILDKQKVVKLKQIEHTLNEKRILQAVNFPFLVRLEYAFKDNSNLYMVMEYVPGGEMFSHLRRIGRFSEPHARFYAAQIVLTFEYLHSLDLIYRDLKPENLLIDHQGYIQVTDFGFAKRVKGRTWTLCGTPEYLAPEIILSKGYNKAVDWWALGVLIYEMAAGYPPFFADQPIQIYEKIVSGKVRFPSHFSSDLKDLLRNLLQVDLTKRFGNLKNGVSDIKTHKWFATTDWIAIYQRKVEAPFIPKFRGSGDTSNFDDYEEEDIRVSITEKCAKEFGEF

SEQ ID NO: 697 - DNA, 1633 bp, Homo sapien
gtgctgtttgggctaacaggatctcctcttgcagtctgcagcccaggacgctgattccagcagcgccttaccgcgcagcccgaagattcactatggtgaaaatcgccttcaatacccctaccgccgtgcaaaaggaggaggcgcggcaagacgtggaggccctcctgagccgcacggtcagaactcagatactgaccggcaaggagctccgagttgccacccaggaaaaagagggctcctctgggagatgtatgcttactctcttaggcctttcattcatcttggcaggacttattgttggtggagcctgcatttacaagtacttcatgcccaagagcaccatttaccgtggagagatgtgcttttttgattctgaggatcctgcaaattcccttcgtggaggagagcctaacttcctgcctgtgactgaggaggctgacattcgtgaggatgacaacattgcaatcattgatgtgcctgtccccagtttctctgatagtgaccctgcagcaattattcatgactttgaaaagggaatgactgcttacctggacttgttgctggggaactgctatctgatgcccctcaatacttctattgttatgcctccaaaaaatctggtagagctctttggcaaactggcgagtggcagatatctgcctcaaacttatgtggttcgagaagacctagttgctgtggaggaaattcgtgatgttagtaaccttggcatctttatttaccaactttgcaataacagaaagtccttccgccttcgtcgcagagacctcttgctgggtttcaacaaacgtgccattgataaatgctggaagattagacacttccccaacgaatttattgttgagaccaagatctgtcaagagtaagaggcaacagatagagtgtccttggtaataagaagtcagagatttacaatatgactttaacattaaggtttatgggatactcaagatatttactcatgcatttactctattgcttatgctttaaaaaaaggaaaaaaaaaaaaactactaaccactgcaagctcttgtcaaattttagtttaattggcattgcttgttttttgaaactgaaattacctgagtttcattttttctttgaatttatagggtttagatttctgaaagcagcatgaatatatcacctaacatcctgacaataaattccatccgttgttttttttgtttgtttgttttttcttttcctttaagtaagctctttattcatcttatggtgcagcaattttaaaatttgaaatattttaaattgtttttgaactttttgtgtaaaatatatcagatctcaacattgttggtttcttttgtttttcattttgtacaactttcttgaatttagaaattacatctttgcagttctgttaggtgctctgtaattaacctgacttatatgtgaacaattttcatgagacagtcatttttaactaatgcagtgattctttctcactactatctgtattgtggaatgcacaaaattgtgtaggtgctgaatgctgtaaggagtttaggttgtatgaattctacaaccctataataaattttactctatacaaaaaaaaaaaaaaaaaaaaaaaaaaaaaaaaaaaaaaaaaaaa

SEQ ID NO: 698 - protein, 263 aa, Homo sapien
MVKIAFNTPTAVQKEEARQDVEALLSRTVRTQILTGKELRVATQEKEGSSGRCMLTLLGLSFILAGLIVGGACIYKYFMPKSTIYRGEMCFFDSEDPANSLRGGEPNFLPVTEEADIREDDNIAIIDVPVPSFSDSDPAAIIHDFEKGMTAYLDLLLGNCYLMPLNTSIVMPPKNLVELFGKLASGRYLPQTYVVREDLVAVEEIRDVSNLGIFIYQLCNNRKSFRLRRRDLLLGFNKRAIDKCWKIRHFPNEFIVETKICQE

SEQ ID NO: 699 - DNA, 1082 bp, Homo sapien
gatcccagacctcggcttgcagtagtgttagactgaagataaagtaagtgctgtttgggctaacaggatctcctcttgcagtctgcagcccaggacgctgattccagcagcgccttaccgcgcagcccgaagattcactatggtgaaaatcgccttcaatacccctaccgccgtgcaaaaggaggaggcgcggcaagacgtggaggccctcctgagccgcacggtcagaactcagatactgaccggcaaggagctccgagttgccacccaggaaaaagagggctcctctgggagatgtatgcttactctcttaggcctttcattcatcttggcaggacttattgttggtggagcctgcatttacaagtacttcatgcccaagagcaccatttaccgtggagagatgtgcttttttgattctgaggatcctgcaaattcccttcgtggaggagagcctaacttcctgcctgtgactgaggaggctgacattcgtgaggatgacaacattgcaatcattgatgtgcctgtccccagtttctctgatagtgaccctgcagcaattattcatgactttgaaaagggaatgactgcttacctggacttgttgctggggaactgctatctgatgcccctcaatacttctattgttatgcctccaaaaaatctggtagagctctttggcaaactggcgagtggcagatatctgcctcaaacttatgtggttcgagaagacctagttgctgtggaggaaattcgtgatgttagtaaccttggcatctttatttaccaactttgcaataacagaaagtccttccgccttcgtcgcagagacctcttgctgggtttcaacaaacgtgccattgataaatgctggaagattagacacttccccaacgaatttattgttgagaccaagatctgtcaagagtaagaggcaacagatagagtgtccttggtaataagaagtcagagatttacaatatgactttaacattaaggtttatgggatactcaagatatttactcatgcatttactctattgcttatgccgtaaaaaaaaaaaaaaaaaaaaaaaaaaaaa

SEQ ID NO: 700 - protein, 263 aa, Homo sapien; identical to SEQ ID NO: 698

SEQ ID NO: 701 - DNA, 1358 bp, Homo sapien
  Unsure 852: Unknown base
tgagctgccgtagcggacccagcacagccaggagcgtccgggatgagctcagccgcggccgaccactgggcgtggttgctggtgctcagcttcgtgtttggatgcaatgttcttaggatcctcctcccgtccatctcatccttcatgtccagggtgctgcagaaggacgcggagcaggagtcacagatgagagcggagatccaggacatgaagcaggagctctccacagtcaacatgatggacgagtttgccagatatgccaggctggaaagaaagatcaacaagatgacggataagctcaaaacccatgtgaaagctcggacagctcaattagccaagataaaatgggtgataagtgtcgctttctacgtattgcaggctgccctgatgatctcactcatttggaagtattattctgtccctgtggctgtcgtgccgagtaaatggataacccctctagaccgcctggtagcctttcctactagagtagcaggtggtgttggaattacctgttggattttagtctgtaacaaagttgtcgctattgtgcttcatccgttcagctgaacaggaggatggatacagccgcgaggctaaaaaacggatttcctcttcctagcttaaaatctgatttacactgttttgttttttaagaaacaaaagtgcatagtttagattttttttttgttgaatatgtttgttcttggactttatgagatagtcttataagaatcacgattttctacacctgtcattgagccaagaaagtccagtttatgacacgtatgtactagtgaacaccgtcctcgatctgtcgaaatgtgaaatgtttagggacatctccatgctgtnacttgtgatttgccctcttatgtattttggtcatattgccaactggaaagtcaaaattttaacaactttaagtaagttctttgaagacttagtgctgtttttaatccagttagaaagtaacttaattttaataccgctactaaaaattcgaaaatttcttctttaatcacattcaatatggttaaaagaacaacactaattgacattgcgtgggctttttctccctttgtttaaaatgtcatttgttgagcaagagttgtatagtattatctacttacttgaaggctgttaatttttcattacagtgttttgtaaatgtatccacgagaccatgatgtcattgttttgtgctcaacttgtgttttgtatttaaagcattttgaatgaagtgtattttataagcatttaatatttatgctctttagaatggaacacagaaaacaaaccttataagcctgattaaattaatctgaaccaaaaaaaaaaaaaaaaaaaaaaaaaaaaaa

SEQ ID NO: 702 - protein, 174 aa, Homo sapien [sequence omitted]

SEQ ID NO: 703 - DNA, 7522 bp, Homo sapien
cccgggcgagcccgccgtgcgcacagctctgcccgccgcccctggagcggatccccagccgtccctgggcgttctcccgggttctagcaaagccccccggggtgcccatcagtttccttgggtgactacagcgtgtgttttttctttcctctttcccctgcctgtgtgcccttctccaggatggcagaggcggaattgcacaaggaaaggctgcaagccatagcagaaaaaagaaagaggcagactgaaatagaaggcaagcgacaacagcttgacgagcagatacttctgctgcagcattccaagtccaaagtgcttcgggagaaatggctgctgcagggcatacccgctggaactgccgaagaggaggaagccaggaggcggcagtctgaagaggatgagttcagagtcaagcaacttgaagataacattcagaggctggagcaagaaatacaaacgctagaaagtgaagagtcccagatatctgccaaagagcaaatcatcctagagaaactgaaggaaacagaaaaatccttcaaggactttcagaagggtttctccagtacggatggagatgcagtaaattacatttcctcccagcttcccgacctgccaatcctctgttcacgaacagcagaaccatcacctgggcaggacgggaccagcagagcggctggagtcgggtgggagaatgtgctgctaaaggaaggtgagtcagcctcgaacgccacagaaacatccggcccagacatgactatcaagaagcctccccagctttctgaggatgatatctggctaaaaagcgagggagacaactatagtgccaccctcctggagcctgctgccagctctctttccccagatcacaaaaacatggaaattgaggtgtctgttgcagaatgtaaaagtgttcctggaatcacctctaccccacatcccatggaccatccctccgctttctattcacccccgcataatggcctccttactgatcaccacgaatccctggataatgatgttgccagagagatccgctatctagatgaggtgctagaggccaactgctgtgattctgctgtggatggaacgtacaatggaacatcctccccagagcctggtgcagtggttctggtgggcggcctaagcccccctgtccacgaggcgacccagccagaacccactgaaagaacagctagccggcaggcacctcctcacatcgagctcagtaatagcagccctgaccccatggcagaggcagaaagaacaaatggccattcccccagccagcctagagatgcgctgggggacagcctgcaggtgcctgtcagccccagctccacaaccagctcacggtgttcttcccgagatggagagttcactctcaccacactgaaaaaggaggccaagtttgagctgcgtgccttccatgaggacaagaagccctccaagctctttgaggatgacgagcatgagaaagaacaatactgcattagaaaagtgaggccttcagaggagatgctggagctggaaaaggagaggagagagctcatccgcagccaggccgtcaagaagaatcctggcattgcagcaaaatggtggaatcccccgcaggaaaaaaccatcgaggagcagctggacgaggaacatctggagtcgcacaaaaagtacaaggagcgcaaagagagaagggcacagcaggaacagttgctgctgcagaagcagttacagcagcagcagcagcagcccccatcgcagctctgcacagcccctgcctcttctcatgaacgcgcaagcatgattgacaaagcaaaggaggacattgtcacagagcagatagatttctctgctgctcgcaaacaatttcagctgatggagaattccaggcaagcggtggccaagggccagagtacacccaggctgttctccatcaagcctttctacaggcctctggggtcagtcaactcagacaagccactgactaatccgagaccaccttctgtcgggggacctccagaagacagtggtgcctcagccgccaagggacagaaatcccccggtgccctggagaccccatcggcagcaggaagccagggcaacacagcctctcaggggaaggaagggccctacagcgagccttctaaacgtgggcccttatctaaactgtgggctgaggatggagaatttacgagcgcccgggctgtcctcactgtggtcaaggatgatgaccatgggattttggatcagttctcaagatctgtcaatgtctccttgacccaagaggagcttgactctggtctggacgaattgtcggtgaggtctcaggataccacagtcctggagaccctatccaatgatttcagcatggacaacatcagtgacagcggggcatccaatgagacaaccaatgccctccaggaaaattcactggctgatttttctctgccccagacaccacaaactgacaacccctcagagggccgaggagaaggcgtctccaagtcatttagtgatcatggtttctattccccttcctccacgctgggggactctccgttggttgatgaccccttggagtatcaggctggcctcctggtgcagaatgccattcaacaagccatagccgagcaggtggataaagctgtgtccaaaaccagcagggatggagcagagcaacagggacctgaagcgactgtagaggaagctgaagctgcggctttcggctcagaaaagcctcagagcatgtttgagccacctcaggtgtcttctcctgttcaagagaaaagggatgtattaccaaagattctgcctgctgaagacagggcgctcagggaaagggggcccccccagccactgccagctgtgcagcccagtggcccgattaacatggaggagaccaggcccgaaggaagctatttcagcaagtactcggaggcagctgagctgagaagcacagcctccctcctggccactcaagaatctgacgtgatggttgggcctttcaagctgaggtccaggaaacagcggactttgtccatgattgaggaagagatccgagcagctcaggaaagggaagaggagctgaagaggcagagacaagtcttgcagagtacgcagagccccaggacaaagaatgccccatcactgccctccagaacatgctacaaaactgctccagggaaaatagagaaagtcaaacctcctccatcccccaccactgaaggccccagcttgcagcctgacttagcccctgaagaggctgccggaacccagcggcccaagaatctgatgcagaccctcatggaagactatgagacacacaaatctaaaaggcgcgagagaatggatgatagtagttacacttctaagttactgtcttgcaaggtgacttccgaggtcctcgaggccacacgggttaatcgaagaaagagcgcactggctttgcgctgggaagcagggatctatgccaaccaggaggaagaagacaacgaataaacttccttcaacccaggaagcgtctttggtgcttgggagaccaagaaaccaagaaattaacaactgaaagcattttaatggactatttattaaagtgcaaacaaactcagcaatccttatgtagaccagaagctgcaatatacaatgatgaaaatgaaacgaaaaggaagtccccccatcagactctggacacccaggaatcaaaagagaaaggacttttttggtgactcaatcccagtgtctggtttggggccaatctacaatggatccaaaaggacaaaacatgttacaagcaaatcaacatagttgctgcaggcggaactgagaccagcctctctgggcgatgaaggacaatggtggtagggccacttagagagcagtagggcccaggctggtgcagcctacatggcacaggatatttccctgcaccagtttcccacctgtcacttgcagcatcagagggtgttgcattaactccattttctccagcagccataaaatgaatggcgtttctctccatatttgcccagaagaggcagttatgattccacttctcctacatttaattatttttaattgagaacaactcatgatcacaattcataaaatccatattttaagacaatagttcttcatgtcacaaacacaatctattctacatgaggaggctgagaaaggggaagagaaaaacaaaccaaatggatgatgttagctttaggatcgtgtctgcttataatattcactgatctgcagtttatgagaacacattttcacagttatgtttcttcataggaaaactatatttagtgggcaacaactatttttatgatgggatgggggagtatatacacgtatagaatctgtacgcgttgaacaacttggttcaagatggtgggggcatttttagagcggcaataattgaaaaaaaaggcgaactctgccttggagaggtagatgataagaaataaaaaggtgtttataactattttgtattataaagtgggccttagagataggaagaagaatgatggattccttttggatcaatcagaaaggaaacacgaaagaaaagtcaggaaggtagagagagaaaaagggagggaaggagaaagaatgggaataaaataaggaggtaagagatactatttttgctgagcaaccagtgtgtttcaggatgatacaaagaaaaatatagaatagaaataagtgcaggcttggaatcagctacaaatcctaaagatggggtgtgtgtggatgtgtgtgtgtgtgtgtgtacaccattgtgtgtttgtaaaatgtgtatgttcatgagtaagggtgtgtgtgtgtgtgtattaaaattccagagtgaccgtggcacttgggtgtacaggtaattcctccagagctgtttgctggcttcaggagtggagtgagaatttcttttttatgaaaagggatataaaggcaccgagctgatgcagtatttgtaatattaagttgacctaacaaggtatttgcatgagtcacaattacaaagttttgagcggttttgtaatttgacatttaggagagtctcctatttattctcatactttacattcatgcttagtatactatagaggatgccagctttaatctttctgtcatttaaagcaatatgataagggtattcaataattgggtgccctaaatttctggatgagaaaattttcaattctggccatgagaaagaaaaaaaaataaacagccttctttttttttcctttgttttaaaactgtggttttttaaaaaagcaataattaactcagacctcactaaaaatcatttttgtttttatattgttatgtcataagctctattatgttattctaacaagtagcaatttcacaaaatttgtatgtagatgttaacgcacatttcctttgcttcttttattagactagtgttgactttggggggggacatttattcacaaatgagaagtaggcacaaagtaaaaaatggaaccatctactaacaaggatcctttaaaactgccaagggagctctaacttgaagccacatcctacagatggcagcccaaatagcacatgggcaattggcaccatctttatatggttgagtctcctgaatattttgaatgaattctcaacaaaatgtgctagccactggggacgcaaaacaagtaagatccctgttgcaagaaattcattttatagtgagggaggttggcatggagactaaaattctcaggaaaatgagatccgtgttagattagaagtcctgatgtgaaatgggaggactcaggaaggaggatcgtctttacctgaggatttctagccagaggtcccagatgcctgggctgagaacccagcgataagggggcgttcccaaagcagacacagggataagaacagaggaggcagcagcattgcacagccccaggcacagtggcagttaggatggctggagagtaggatagttctatgggttgcccaaaaaatgtgatgcgcttcatgttttctctgactcatggatctggtagagaccatagacatgatatagactaacttccccatttttcacaagaggaaaccatccttatgacttaccttaaagttttttgttctgttttgaaggaaaccatgtgcttcatgaaacctacagttgacaagagaatgtacagctaagagaaaagcttaagaggccacactattcgcggaatggctttagaggcagatgaagtggtctttgaccacagttgattgaaccagagcacttattgcttaaagaataacagagttctagagctgggggttcttgggccatgctccgtgtgtggataaggaaagaaatactgtttctgggactctcccacagtcacaaagctgttttcactgtggcccctacatctcttaacttttgctattactcctatgctgccttccggattactgctgtctatcttcttgctccactcactgaagatcctattataatcccatgaaaatgtaaattacagtttacttgggagagccagattttctctgtgctcttgagttttttattcattcaagaaaccttgggccaccgctttgtacatagcaccgtgctaggctctgggatcccaaatggacccttttaactttctgaagatgggaccgtcccctggaggaaagtcattcctgcctaatccatcgagagaaagaggcttacgaaaaactttgcctctgatgctcagccccacccccaaatagcacacaagcttgttaaccccacctcttacaaaatgtttagattctgtaggtgttaaaagcctttctggaagtattgcattctgccgtgtttataggtgttcactttcctccagagctgattaactactgacatgacttggctttctcatccagaaattatggaaacagggtctgtcagtggcaggaggccgtgctgtgttttacttggatgacacaatgcagtttacttgcctcttcatacccatgcatgctgctcaccctagacaatgacatataagccgtatatagatcaatgtccacatatatatacacacacacatatatatatataaagtgtaacaaggaacactaaaacagtgttgattcttgtctctgaagacaaataattaaaccttttttttcccaactaaagaatggatttaattaaactatgtattgaaaaaaaagtagcctaagtgttagagatggtgaatatattccattttagttaaagaacaaatttcctgaattttaagcattcagtgagctgccaattttgattttgtgttgctctttacccaaattattttttctttgtttttctttttttgggggaggaggggaaaaaagcagcaatactgtgtttggaaattatactctgtatctggttttcctgtgtatgttaaccacttaaatgttattatcctgctttggttttagagtgattgtgaggcattcaatgcaagtatacagttattttctcattaaaatccaatgtgtgttgagtttttataaaaaaaaaaaaaaaaaa

SEQ ID NO: 704 - protein, 1103 aa, Homo sapien
MAEAELHKERLQAIAEKRKRQTEIEGKRQQLDEQILLLQHSKSKVLREKWLLQGIPAGTAEEEEARRRQSEEDEFRVKQLEDNIQRLEQEIQTLESEESQISAKEQIILEKLKETEKSFKDFQKGFSSTDGDAVNYISSQLPDLPILCSRTAEPSPGQDGTSRAAGVGWENVLLKEGESASNATETSGPDMTIKKPPQLSEDDIWLKSEGDNYSATLLEPAASSLSPDHKNMEIEVSVAECKSVPGITSTPHPMDHPSAFYSPPHNGLLTDHHESLDNDVAREIRYLDEVLEANCCDSAVDGTYNGTSSPEPGAVVLVGGLSPPVHEATQPEPTERTASRQAPPHIELSNSSPDPMAEAERTNGHSPSQPRDALGDSLQVPVSPSSTTSSRCSSRDGEFTLTTLKKEAKFELRAFHEDKKPSKLFEDDEHEKEQYCIRKVRPSEEMLELEKERRELIRSQAVKKNPGIAAKWWNPPQEKTIEEQLDEEHLESHKKYKERKERRAQQEQLLLQKQLQQQQQQPPSQLCTAPASSHERASMIDKAKEDIVTEQIDFSAARKQFQLMENSRQAVAKGQSTPRLFSIKPFYRPLGSVNSDKPLTNPRPPSVGGPPEDSGASAAKGQKSPGALETPSAAGSQGNTASQGKEGPYSEPSKRGPLSKLWAEDGEFTSARAVLTVVKDDDHGILDQFSRSVNVSLTQEELDSGLDELSVRSQDTTVLETLSNDFSMDNISDSGASNETTNALQENSLADFSLPQTPQTDNPSEGRGEGVSKSFSDHGFYSPSSTLGDSPLVDDPLEYQAGLLVQNAIQQAIAEQVDKAVSKTSRDGAEQQGPEATVEEAEAAAFGSEKPQSMFEPPQVSSPVQEKRDVLPKILPAEDRALRERGPPQPLPAVQPSGPINMEETRPEGSYFSKYSEAAELRSTASLLATQESDVMVGPFKLRSRKQRTLSMIEEEIRAAQEREEELKRQRQVLQSTQSPRTKNAPSLPSRTCYKTAPGKIEKVKPPPSPTTEGPSLQPDLAPEEAAGTQRPKNLMQTLMEDYETHKSKRRERMDDSSYTSKLLSCKVTSEVLEATRVNRRKSALALRWEAGIYANQEEEDNE

SEQ ID NO: 705 - DNA, 5180 bp, Homo sapien
cccgggcgagcccgccgtgcgcacagctctgcccgccgcccctggagcggatccccagccgtccctgggcgttctcccgggttctagcaaagccccccggggtgcccatcagtttccttgggtgactacagcgtgtgttttttctttcctctttcccctgcctgtgtgcccttctccaggatggcagaggcggaattgcacaaggaaaggctgcaagccatagcagaaaaaagaaagaggcagactgaaatagaaggcaagcgacaacagcttgacgagcagatacttctgctgcagcattccaagtccaaagtgcttcgggagaaatggctgctgcagggcatacccgctggaactgccgaagaggaggaagccaggaggcggcagtctgaagaggatgagttcagagtcaagcaacttgaagataacattcagaggctggagcaagaaatacaaacgctagaaagtgaagagtcccagatatctgccaaagagcaaatcatcctagagaaactgaaggaaacagaaaaatccttcaaggactttcagaagggtttctccagtacggatggagatgcagtaaattacatttcctcccagcttcccgacctgccaatcctctgttcacgaacagcagaaccatcacctgggcaggacgggaccagcagagcggctggagtcgggtgggagaatgtgctgctaaaggaaggtgagtcagcctcgaacgccacagaaacatccggcccagacatgactatcaagaagcctccccagctttctgaggatgatatctggctaaaaagcgagggagacaactatagtgccaccctcctggagcctgctgccagctctctttccccagatcacaaaaacatggaaattgaggtgtctgttgcagaatgtaaaagtgttcctggaatcacctctaccccacatcccatggaccatccctccgctttctattcacccccgcataatggcctccttactgatcaccacgaatccctggataatgatgttgccagagagatccgctatctagatgaggtgctagaggccaactgctgtgattctgctgtggatggaacgtacaatggaacatcctccccagagcctggtgcagtggttctggtgggcggcctaagcccccctgtccacgaggcgacccagccagaacccactgaaagaacagctagccggcaggcacctcctcacatcgagctcagtaatagcagccctgaccccatggcagaggcagaaagaacaaatggccattcccccagccagcctagagatgcgctgggggacagcctgcaggtgcctgtcagccccagctccacaaccagctcacggtgttcttcccgagatggagagttcactctcaccacactgaaaaaggaggccaagtttgagctgcgtgccttccatgaggacaagaagccctccaagctctttgaggatgacgagcatgagaaagaacaatactgcattagaaaagtgaggccttcagaggagatgctggagctggaaaaggagaggagagagctcatccgcagccaggccgtcaagaagaatcctggcattgcagcaaaatggtggaatcccccgcaggaaaaaaccatcgaggagcagctggacgaggaacatctggagtcgcacaaaaagtacaaggagcgcaaagagagaagggcacagcaggaacagttgctgctgcagaagcagttacagcagcagcagcagcagcccccatcgcagctctgcacagcccctgcctcttctcatgaacgcgcaagcatgattgacaaagcaaaggaggacattgtcacagagcagatagatttctctgctgctcgcaaacaatttcagctgatggagaattccaggcaagcggtggccaagggccagagtacacccaggctgttctccatcaagcctttctacaggcctctggggtcagtcaactcagacaagccactgactaatccgagaccaccttctgtcgggggacctccagaagacagtggtgcctcagccgccaagggacagaaatcccccggtgccctggagaccccatcggcagcaggaagccagggcaacacagcctctcaggggaaggaagggccctacagcgagccttctaaacgtgggcccttatctaaactgtgggctgaggatggagaatttacgagcgcccgggctgtcctcactgtggtcaaggatgatgaccatgggattttggatcagttctcaagatctgtcaatgtctccttgacccaagaggagcttgactctggtctggacgaattgtcggtgaggtctcaggataccacagtcctggagaccctatccaatgatttcagcatggacaacatcagtgacagcggggcatccaatgagacaaccaatgccctccaggaaaattcactggctgatttttctctgccccagacaccacaaactgacaacccctcagagggccgaggagaaggcgtctccaagtcatttagtgatcatggtttctattccccttcctccacgctgggggactctccgttggttgatgaccccttggagtatcaggctggcctcctggtgcagaatgccattcaacaagccatagccgagcaggtggataaagctgtgtccaaaaccagcagggatggagcagagcaacagggacctgaagcgactgtagaggaagctgaagctgcggctttcggctcagaaaagcctcagagcatgtttgagccacctcaggtgtcttctcctgttcaagagaaaagggatgtattaccaaagattctgcctgctgaagacagggcgctcagggaaagggggcccccccagccactgccagctgtgcagcccagtggcccgattaacatggaggagaccaggcccgaaggaagctatttcagcaagtactcggaggcagctgagctgagaagcacagcctccctcctggccactcaagaatctgacgtgatggttgggcctttcaagctgaggtccaggaaacagcggactttgtccatgattgaggaagagatccgagcagctcaggaaagggaagaggagctgaagaggcagagacaagtcttgcagagtacgcagagccccaggacaaagaatgccccatcactgccctccagaacatgctacaaaactgctccagggaaaatagagaaagtcaaacctcctccatcccccaccactgaaggccccagcttgcagcctgacttagcccctgaagaggctgccggaacccagcggcccaagaatctgatgcagaccctcatggaagactatgagacacacaaatctaaaaggcgcgagagaatggatgatagtagtgtcctcgaggccacacgggttaatcgaagaaagagcgcactggctttgcgctgggaagcagggatctatgccaaccaggaggaagaagacaacgaataaacttccttcaacccaggaagcgtctttggtgcttgggagaccaagaaaccaagaaattaacaactgaaagcattttaatggactatttattaaagtgcaaacaaactcagcaatccttatgtagaccagaagctgcaatatacaatgatgaaaatgaaacgaaaaggaagtccccccatcagactctggacacccaggaatcaaaagagaaaggacttttttggtgactcaatcccagtgtctggtttggggccaatctacaatggatccaaaaggacaaaacatgttacaagcaaatcaacatagttgctgcaggcggaactgagaccagcctctctgggcgatgaaggacaatggtggtagggccacttagagagcagtagggcccaggctggtgcagcctacatggcacaggatatttccctgcaccagtttcccacctgtcacttgcagcatcagagggtgttgcattaactccattttctccagcagccataaaatgaatggcgtttctctccatatttgcccagaagaggcagttatgattccacttctcctacatttaattatttttaattgagaacaactcatgatcacaattcataaaatccatattttaagacaatagttcttcatgtcacaaacacaatctattctacatgaggaggctgagaaaggggaagagaaaaacaaaccaaatggatgatgttagctttaggatcgtgtctgcttataatattcactgatctgcagtttatgagaacacattttcacagttatgtttcttcataggaaaactatatttagtgggcaacaactatttttatgatgggatgggggagtatatacacgtatagaatctgtacgcgttgaacaacttggttcaagatggtgggggcatttttagagcggcaataattgaaaaaaaaggcgaactctgccttggagaggtagatgataagaaataaaaaggtgtttataactattttgtattataaagtgggccttagagataggaagaagaatgatggattccttttggatcaatcagaaaggaaacacgaaagaaaagtcaggaaggtagagagagaaaaagggagggaaggagaaagaatgggaataaaataaggaggtaagagatactatttttgctgagcaaccagtgtgtttcaggatgatacaaagaaaaatatagaatagaaataagtgcaggcttggaatcagctacaaatcctaaagatggggtgtgtgtggatgtgtgtgtgtgtgtgtgtacaccattgtgtgtttgtaaaatgtgtatgttcatgagtaagggtgtgtgtgtgtgtgtattaaaattccagagtgaccgtggcacttgggtgtacaggtaattcctccagagctgtttgctggcttcaggagtggagtgagaatttcttttttatgaaaagggatataaaggcaccgagctgatgcagtatttgtaatattaagttgacctaacaaggtatttgcatgagtcacaattacaaagttttgagcggttttgtaatttgacatttaggagagtctcctatttattctcatactttacattcatgcttagtatactatagaggatgccagctttaatctttctgtcatttaaagcaatatgataagggtattcaataattgggtgccctaaatttctggatgagaaaattttcaattctggccatgagaaaaaaaaaaaaaaaaaa

SEQ ID NO: 706 - protein, 1090 aa, Homo sapien
MAEAELHKERLQAIAEKRKRQTEIEGKRQQLDEQILLLQHSKSKVLREKWLLQGIPAGTAEEEEARRRQSEEDEFRVKQLEDNIQRLEQEIQTLESEESQISAKEQIILEKLKETEKSFKDFQKGFSSTDGDAVNYISSQLPDLPILCSRTAEPSPGQDGTSRAAGVGWENVLLKEGESASNATETSGPDMTIKKPPQLSEDDIWLKSEGDNYSATLLEPAASSLSPDHKNMEIEVSVAECKSVPGITSTPHPMDHPSAFYSPPHNGLLTDHHESLDNDVAREIRYLDEVLEANCCDSAVDGTYNGTSSPEPGAVVLVGGLSPPVHEATQPEPTERTASRQAPPHIELSNSSPDPMAEAERTNGHSPSQPRDALGDSLQVPVSPSSTTSSRCSSRDGEFTLTTLKKEAKFELRAFHEDKKPSKLFEDDEHEKEQYCIRKVRPSEEMLELEKERRELIRSQAVKKNPGIAAKWWNPPQEKTIEEQLDEEHLESHKKYKERKERRAQQEQLLLQKQLQQQQQQPPSQLCTAPASSHERASMIDKAKEDIVTEQIDFSAARKQFQLMENSRQAVAKGQSTPRLFSIKPFYRPLGSVNSDKPLTNPRPPSVGGPPEDSGASAAKGQKSPGALETPSAAGSQGNTASQGKEGPYSEPSKRGPLSKLWAEDGEFTSARAVLTVVKDDDHGILDQFSRSVNVSLTQEELDSGLDELSVRSQDTTVLETLSNDFSMDNISDSGASNETTNALQENSLADFSLPQTPQTDNPSEGRGEGVSKSFSDHGFYSPSSTLGDSPLVDDPLEYQAGLLVQNAIQQAIAEQVDKAVSKTSRDGAEQQGPEATVEEAEAAAFGSEKPQSMFEPPQVSSPVQEKRDVLPKILPAEDRALRERGPPQPLPAVQPSGPINMEETRPEGSYFSKYSEAAELRSTASLLATQESDVMVGPFKLRSRKQRTLSMIEEEIRAAQEREEELKRQRQVLQSTQSPRTKNAPSLPSRTCYKTAPGKIEKVKPPPSPTTEGPSLQPDLAPEEAAGTQRPKNLMQTLMEDYETHKSKRRERMDDSSVLEATRVNRRKSALALRWEAGIYANQEEEDNE

SEQ ID NO: 707 - DNA, 4325 bp, Homo sapien
ggaggcgaactacctgtgccctaaccttggaagctggagaaaagttactgctcacaactgacctgaaaactaaagagtctgtgggtaggagaatcagtcaacttcaggacagctggaaagacatggagccccagctggcagagatgattaagcagttccagagcactgtagagacctgggaccagtgtgaaaagaaaatcaaggagttgaaaagcaggctgcaagttttaaaggcacaaagtgaagatcctcttccagagcttcacgaggacctccataacgaaaaagagctgattaaggaactagaacagtctttggctagctggactcagaacttgaaagaacttcaaactatgaaggcggacttaacccggcacgttctcgtggaagatgtgatggttttgaaggagcaaatagagcatttgcacagacaatgggaggacctctgcttaagggtggccatacgtaaacaggagattgaagacagactcaatacatgggttgtattcaatgaaaaaaataaagagttgtgtgcctggctggtgcagatggaaaacaaagttctacagacagcggacattagtattgaagaaatgattgaaaagttacagaaggactgcatggaagaaataaacttgtttagtgaaaacaagttacagttaaagcagatgggtgaccagttgatcaaggccagcaacaaatcaagagcagctgagatcgatgacaagctcaacaaaattaacgatcgttggcaacatctttttgatgtcatcggatcaagggtgaagaagctgaaggagacctttgcttttattcagcagttggacaaaaacatgagcaaccttcgcacctggttggctcgaattgagtctgagctttccaagcctgttgtttatgatgtctgcgatgatcaagagatccagaagaggctcgctgagcagcaggatctacagcgagatattgaacaacacagcgcaggggtggagtccgtgtttaacatctgtgacgtcctactgcacgactccgatgcctgtgcaaatgagaccgagtgtgactcgatccagcagaccaccaggagcctggacagacgctggaggaacatttgtgccatgtccatggagcggcgcatgaaaatcgaggagacgtggcgcctgtggcagaagtttttagacgactattctcgctttgaggactggctcaagtcagctgagaggacggcagcctgcccaaattcctcagaggtgttgtacacgagtgccaaagaggaactgaagaggtttgaggcctttcagcggcagattcatgagcggctcactcagctggagctcatcaacaagcagtaccggcggctggcccgggagaaccgcacagacacggccagcaggctgaagcagatggtccacgagggcaaccagcgctgggacaaccttcagaggcgggtcacagccgtcctgcggagactcaggcatttcaccaaccagagggaagaatttgagggcaccagggagagcattctggtgtggctcacagagatggacctgcagctgaccaacgtggagcacttctcagagagtgacgccgatgacaagatgcgccaactgaatggcttccaacaggaaattacattaaataccaacaagattgatcagctcattgtgtttggggagcagctgattcagaagagcgagcccctggatgctgtgctgattgaggatgagctggaggaactccaccgctactgccaggaggtgtttggaagggtctcccggttccaccggcggctcacctcctgcactccgggcttggaagatgaaaaggaggcctctgagaatgaaacagacatggaagaccccagagaaatccagactgattcttggcgtaaacggggagagagcgaggaaccgtcatctcctcagtccctgtgtcatctagtggccccagggcacgagcggtctggctgcgagacccctgtcagcgtggactccatccccctggagtgggaccacacaggcgacgtggggggctcctcctctcacgaagaggacgaggagggcccatactacagcgcactgtcaggtaaatccatttcggatggccactcgtggcatgttcccgacagcccttcctgtcccgagcatcactacaagcaaatggaaggtgacaggaatgttccacctgttccccctgcgtccagcaccccttataaaccaccctatggaaagctactattacctccaggcacggatggtggcaaagaaggcccgcgagtcctgaatggcaacccacagcaggaagacgggggactggccggtatcacagagcagcagtcaggtgccttcgacagatgggagatgattcaagcacaggagcttcacaataagctcaaaataaaacaaaatttgcaacagctgaactctgatatcagcgccatcactacttggctgaaaaaaactgaagcagagctggaaatgttaaagatggcaaagcctccctctgatatccaggaaatagaactgagagtgaagagactgcaggagatactgaaagcctttgacacttacaaggcattagtggtctctgtcaacgtgagcagcaaggaatttctgcaaaccgagagccccgaatccacagagctccaaagtagactccgccagctgagcctgctctgggaagcagcacagggcgcagtggacagctggagagggggcttacgacagtcgctcatgcagtgccaggacttccaccagttgagtcaaaatctgctgctgtggttagcgagtgccaagaaccggaggcagaaggctcatgtcaccgatccaaaggcagacccccgggctctcctagagtgtcggagggaactaatgcaactggaaaaggagctggtagaacgtcaacctcaagtggacatgttacaggagatttcaaacagccttctcattaagggacatggagaagactgtattgaagctgaagaaaaggtgcatgttattgagaagaaactcaaacagttacgggagcaagtgtcccaagatttaatggccttgcagggaacccagaacccagcctcacccctgcccagcttcgacgaggtagactcgggggaccagcctcctgcaacatccgtgccagctccccgagcaaagcagttcagagcagtgagaactacagaaggcgaggaggagacagagagcagggtccccggcagcacacggccacagcgctccttcctctcaagggtggtccgggcagccctacccctgcagctgctcctcctgctgctgctgctcctggcctgcctgctgccctcctccgaagaagactacagctgcactcaggccaacaactttgcccggtccttttaccccatgctgaggtacaccaatgggccaccccccacatagagggcatagctggccacagtgctacaccacctgcctgattgccaagggtgcccagcacgtggccccagaccaatctgagtgacttagtgttggcaaggtcccgggacctgtgcagacttcttctgggcttacacagcacgggctccctggagcccagggcagctttcagattgtgttcctccccaggagcagggaacctgtgtggcaggtgccccgggtactttggcagaactagttgattagtttagggatctctggaaatgtcagtttcctgaagagccaagcactttgtgaattctggtttgtttgtaaaacagcattattataatgtaggtatggtcaatgagcagtggtgtccatcacatatattatagaagcaagcgagcacattccaccctagaaatggttcagaaactcataggcacccttagctgatggaaacaatcaatcatatttaatacgcttagaatcagttttactccaatcagctggcaattttgagctgccggttatacaccaaaatgttctgttcagtacctagctctgctcttttatattgctttaaatttttaaagaaattatattgcatggatgtggttatttgtgcatattttttaacaatgcccaatctgtatgaataatgtaaacttcgatttttttttaaaaaaattagattttagctggagcttttgactaatgtaaagtaaatgccaaactaccgacttgatagggatgtttttgtaagttaattttctaagactttttcacatccaaagtgatgctttgctttgggttttaactgtttggccacggcgggggtgggggcggggggttggtacagaaacttgaagctgtttgtgatatgtacaactcagatgtttctcattaaaaaacaaaattagccagaaaaaaaaaaaaaaaaaa

SEQ ID NO: 708 - protein, 1092 aa, Homo sapien
MEPQLAEMIKQFQSTVETWDQCEKKIKELKSRLQVLKAQSEDPLPELHEDLHNEKELIKELEQSLASWTQNLKELQTMKADLTRHVLVEDVMVLKEQIEHLHRQWEDLCLRVAIRKQEIEDRLNTWVVFNEKNKELCAWLVQMENKVLQTADISIEEMIEKLQKDCMEEINLFSENKLQLKQMGDQLIKASNKSRAAEIDDKLNKINDRWQHLFDVIGSRVKKLKETFAFIQQLDKNMSNLRTWLARIESELSKPVVYDVCDDQEIQKRLAEQQDLQRDIEQHSAGVESVFNICDVLLHDSDACANETECDSIQQTTRSLDRRWRNICAMSMERRMKIEETWRLWQKFLDDYSRFEDWLKSAERTAACPNSSEVLYTSAKEELKRFEAFQRQIHERLTQLELINKQYRRLARENRTDTASRLKQMVHEGNQRWDNLQRRVTAVLRRLRHFTNQREEFEGTRESILVWLTEMDLQLTNVEHFSESDADDKMRQLNGFQQEITLNTNKIDQLIVFGEQLIQKSEPLDAVLIEDELEELHRYCQEVFGRVSRFHRRLTSCTPGLEDEKEASENETDMEDPREIQTDSWRKRGESEEPSSPQSLCHLVAPGHERSGCETPVSVDSIPLEWDHTGDVGGSSSHEEDEEGPYYSALSGKSISDGHSWHVPDSPSCPEHHYKQMEGDRNVPPVPPASSTPYKPPYGKLLLPPGTDGGKEGPRVLNGNPQQEDGGLAGITEQQSGAFDRWEMIQAQELHNKLKIKQNLQQLNSDISAITTWLKKTEAELEMLKMAKPPSDIQEIELRVKRLQEILKAFDTYKALVVSVNVSSKEFLQTESPESTELQSRLRQLSLLWEAAQGAVDSWRGGLRQSLMQCQDFHQLSQNLLLWLASAKNRRQKAHVTDPKADPRALLECRRELMQLEKELVERQPQVDMLQEISNSLLIKGHGEDCIEAEEKVHVIEKKLKQLREQVSQDLMALQGTQNPASPLPSFDEVDSGDQPPATSVPAPRAKQFRAVRTTEGEEETESRVPGSTRPQRSFLSRVVRAALPLQLLLLLLLLLACLLPSSEEDYSCTQANNFARSFYPMLRYTNGPPPT

SEQ ID NO: 709 - DNA, 5398 bp, Homo sapien
cgtgcggcggtgggctggtcttccgcggccggcgttgcgccgcggcggagggtgggcgcgcggggagcgggatggagctggggcgacccttgctggaggtactggcctcagccctttctcccgcttccccacccctcttacccccagattacattctctgtgtggtgtctttactgcagatgaaggatttgggggcagagcacttggcaggtcatgaaggggtccaacttctcgggttgttgaacgtctacctggaacaagaagagagattccaacctcgagaaaaagggctgagtttgattgaggctaccccggagaatgataacactttgtgtccaggattgagaaatgccaaagttgaagatttaaggagtttagccaacttttttggatcttgcactgaaacttttgtcctggctgtcaatattttggacaggttcttggctcttatgaaggtgaaacctaaacatttgtcttgcattggagtctgttcttttttgctggctgctagaatagttgaagaagactgcaatattccatccactcatgatgtgatccggattagtcagtgtaaatgtactgcttctgacataaaacggatggaaaaaataatttcagaaaaattgcactatgaattggaagctactactgccttaaactttttgcacttataccatactattatactttgtcatacttcagaaaggaaagaaatactgagccttgataaactagaagctcagctgaaagcttgcaactgccgactcatcttttcaaaagcaaaaccatctgtattagccttgtgccttctcaatttggaagtggaaactttgaaatctgttgaattactggaaattctcttgctagttaaaaaacattccaagattaatgacactgagttcttctactggagagagttggtttctaaatgcctagccgagtattcttctcctgaatgttgcaaaccagatcttaagaagttggtttggatcgtttcaaggcgcacagcccagaacctccacaacagctactatagtgttcctgagctgccaacgatacctgaggggggttgttttgatgaaagtgaaagtgaggactcttgtgaagatatgagttgtggagaggagagtctcagcagctctcctcccagtgatcaagagtgcaccttctttttcaacttcaaagtggcacaaacactgtgctttccatcttagaaatctgattgttctgtcagaatttatatttacaggtttcaaagcaataaatgggggaataggtagtttcctggtttagcccccatctagtcaggaattaatatactggaatacctaccttctatttgttattcagatcagatctggcctattttcatatttatcctaagccatcaaatggggtagtgcctcttaaaccattaacagtactttagacattggcactttatttttctcgtagatctttagctactttggggaggagggaaggtgctgataccttcaatttgttacttttcaagatttttaaaaataactagtgtagcttatcttaaacattttataaaaccttcagatgtctttaagcagattggaagtatgcaagtgcttccttagcagggacagtggataatccttaatggtttatcatagatttcaccctccccccttctcagaagagtgagtatgctcttaaatgtcaaacacatttttgttgttttgttttttaaatgatcagtgtctatttgatgtgatgcagatcttataaatttgggaattataatattgacatttctgtgatttttatatatgtaatgtcttaattgagatttctgttaaggcagaaataattaggctagggctcttagttttcattcctattgcccaagtattgtcaaactatggtattattttaatgttactttaaaaatccataatctgctagttttgcatgtacttatatgaaaacagtgcagtaagttgaaaactcagtatctatggaattgataaatgttgatctggtgtagtatattttatcgcattttcttatattaaaaaatgtctgcatgattacattttatttcctttgtaatttacatttcagaatagtgtattgctatatgggtgccaagattgaatatgaagaacccgagtgtttgtagtattatagttttaagcaaatctgtgtggtgatacagccataagaatggggcttatataaactctgtacatgtaagattttgtacagagaatttttaactttataaattgtatatgaacatgtaaatcttttaaaatgtacataaaatactgtatttttttaccttgtgtgtgatagtctagtcattgcatgtaaatataatttattatgtattctgtagtataaatcatacattgatgacttacatttttactggtaagtcaacatccgttggatgttttctgaagtggctctttttgaagtgataatagattgtaattcaaaataaaattattaatgaattctccttgtttgggatcacatcttaatttttaatctgttaaaagttcttgatgtattttaatgagaagactttaggtgaggctacagtgattccagagtgagccttctaactggctagcagaagttctctaggtttggcatctgtgccttggagatactgaaagagaatctgtcatttgacaattgacctctttgtgggatggactcattaagtatgctctcagagactggtatattaccagaatgcctattaattttcagtgagaggcaacaggtattaagtagaacagaatgctcaggttggcagattagaacgatctttcaggagacaaagcaagttttaatcagttgtttggttaataagtatggggtgttcgctgtgatagggccccgccagcttctggctcttgtggacctcaaaagtatcaggtggttttgcaagtggtggtcctttcccctgccccaccccaataggttccccatctgtctagtttgatttttgtagacctttgttttctctagttagaaaatcaggtacactgaatatggttttcatgtaacacctcttctctggagataggggtatgttttcctacccttctagtggagaatcctacttgaggatgacctttcctctcttactaaataatattagtaaatagtgggcaatatattctgctttcagattttgatttgttgagatgtaaaagttgtttggggcttaccaaatctcaagactctctttagctcctgcaggattgtattgcttttcttactggatatttttcctgggtaagcatctttgtggcttcatctcttccccctgtggttttcagtgtatttagtcgagacctctctgctgagcttgcaacctgtttattcacatggcctgccatgccacttggaggtttctgattactcccaaacctgctggttctttatgtctttctcagcgaataattccatctgttcatgttggaaacttaggtgatatgctcatctccttttgcctgtttatggaggtcaccagcctctatcatttgtatgatttcgtttacactgtttatatctctctgtcccccctttttctgccattggcatggtttagacctgtactctttatcagcagaggtactgtaatatatttgtgatccctcagcttccaggcttactcctggtctctgccttcctatctacatatccttttaaaataaaattttaactatctcctgaaaaattgttgagtaggtcacgcacaatcaggagaaaaatctattcatgacatacaagtctctgtctaatctgaacactgcacctgtctctggcctttttttcttgtcatttcctagaccttaaaaaatgtgtattgagaaagaactctgttagctatacagaagatgaactgggcaatatagagtagcagcatggagaccagtctgactgaactaaggcagtggaagtgtggatgaggaagagaggtgaaaattgagaagcgctatcctttctctttgggcattattaggaggctcacagacaagtccaggagtctggttataccctcctgtgccattcaaccaggtggctttcccatgactgtgatgaataaaattgagaagcccctgcccttttcagagcagagggtgaggagaaagctaccattttgtcctcatccttacccccgttgacttggcgagagatttgacctttcaggttttgatcctgtcattttctaggatgtggtgcacgcactttgctgttgcgcatggtgaagtattgtgcctaggtcctgggtcttcatctgtttggctctgctactgtttcctcctcccaggaagtgtggttagacaaataatgtgttttaattacctgtcacactcaggattaatacatactcaggttaactgtagagaggcattggcttcagaacactcctcgtgacaattttaaccattttctttgtctagagtctgcctttttcttttttacaatttcttttatttcaacactaggtttcaatatggtgttcctgctacctcccacctccctcctccctcatcacacatgcaaattgtcagcttattgagacaacccacttagattcatatatggacaaggacaaggtattttgcatttgttactggaattcagttttcctaactatttactaccagaaatggtcaataacttactttgtggttagcaaatcaaattgtgtgatagatagtttcccagtatgatggccagtcagtctttccatccctgtgcctacatgctgctcttcccgtccacaagtggagtctgtttctcttgagttttggctggccttatgaatggctttgcttactgaagtgcagcagaagaaatttagtatatgtccaagcctaggctttaagagactggcagctttccttttatcctttttggaagctagccaccatgctgcaaagaagctcagctggattactgaaagatgagaggccatgtggagagagactcttgaggatgagagattatcttggatgttccagccttaagctcccagctgaatgtgggtgtatcctcagctacaccacagaaaacagaggaactactcagtcgatcccaatcaacccacagactcactagaaataacaaattattgttttaagccacgaggttttgggggagggttgttaaacagtaatagataagtgagacagattgcttgttatttatggtcaaatggtgattatctctggtgagattacaggtgatgttttttttaagttatgcctatctgtagtttcctttttttcctaaaattgatttgaattattagtgtattaacagaataaagaatgaactttaaaacacacacgctggttatatgcttcctctaattaaaattcatggctctcaccac

SEQ ID NO: 710 - protein, 403 aa, Homo sapien
CGGGLVFRGRRCAAAEGGRAGSGMELGRPLLEVLASALSPASPPLLPPDYILCVVSLLQMKDLGAEHLAGHEGVQLLGLLNVYLEQEERFQPREKGLSLIEATPENDNTLCPGLRNAKVEDLRSLANFFGSCTETFVLAVNILDRFLALMKVKPKHLSCIGVCSFLLAARIVEEDCNIPSTHDVIRISQCKCTASDIKRMEKIISEKLHYELEATTALNFLHLYHTIILCHTSERKEILSLDKLEAQLKACNCRLIFSKAKPSVLALCLLNLEVETLKSVELLEILLLVKKHSKINDTEFFYWRELVSKCLAEYSSPECCKPDLKKLVWIVSRRTAQNLHNSYYSVPELPTIPEGGCFDESESEDSCEDMSCGEESLSSSPPSDQECTFFFNFKVAQTLCFPS

SEQ ID NO: 711 - DNA, 2044 bp, Homo sapien
ccggtcggatgccggaccgggggcaccgctgaggcggtgggtccccgacctgcgagacaggtttggaagcccccgctgcgcccagtccgtgcggaccgcgaggccgcgggcgggtggaggcgcgtctccggcacgatgaaggatttgggggcagagcacttggcaggtcatgaaggggtccaacttctcgggttgttgaacgtctacctggaacaagaagagagattccaacctcgagaaaaagggctgagtttgattgaggctaccccggagaatgataacactttgtgtccaggattgagaaatgccaaagttgaagatttaaggagtttagccaacttttttggatcttgcactgaaacttttgtcctggctgtcaatattttggacaggttcttggctcttatgaaggtgaaacctaaacatttgtcttgcattggagtctgttcttttttgctggctgctagaatagttgaagaagactgcaatattccatccactcatgatgtgatccggattagtcagtgtaaatgtactgcttctgacataaaacggatggaaaaaataatttcagaaaaattgcactatgaattggaagctactactgccttaaactttttgcacttataccatactattatactttgtcatacttcagaaaggaaagaaatactgagccttgataaactagaagctcagctgaaagcttgcaactgccgactcatcttttcaaaagcaaaaccatctgtattagccttgtgccttctcaatttggaagtggaaactttgaaatctgttgaattactggaaattctcttgctagttaaaaaacattccaagattaatgacactgagttcttctactggagagagttggtttctaaatgcctagccgagtattcttctcctgaatgttgcaaaccagatcttaagaagttggtttggatcgtttcaaggcgcacagcccagaacctccacaacagctactatagtgttcctgagctgccaacgatacctgaggggggttgttttgatgaaagtgaaagtgaggactcttgtgaagatatgagttgtggagaggagagtctcagcagctctcctcccagtgatcaagagtgcaccttctttttcaacttcaaagtggcacaaacactgtgctttccatcttagaaatctgattgttctgtcagaatttatatttacagggtttcaaagcaataaatgggggaataggtagtttcctggtttagcccccatctagtcaggaattaatatactggaatacctaccttctatttgttattcagatcagatctggcctattttcatatttatcctaagccatcaaatggggtagtgcctcttaaaccattaacagtactttagacattggcactttatttttctcgtagatctttagctactttggggaggagggaaggtgctgataccttcaatttgttacttttcaagatttttaaaaataactagtgtagcttatcttaaacattttataaaaccttcagatgtctttaagcagattggaagtatgcaagtgcttccttagcagggacagtggataatccttaatggtttatcatagatttcaccctccccccttctcagaagagtgagtatgctcttaaatgtcaaacacatttttgttgttttgttttttaaatgatcagtgtctatttgatgtgatgcagatcttataaatttgggaattataatattgacatttctgtgatttttatatatgtaatgtcttaattgagatttgtgttaaggcagaaataattaggctagggctcttagttttcattcctattgccccaagtattgtcaaactatggtattattttaatgttactttaaaaatccataatctgctagttttgcatgtacttatatgaaaacagtgcagtaagttgaaaactcagtatctatggaattgataaatgttgatctggtgtagtatattttatccgcattttcttatattaaaaaatgttctgcatgattacattttatttgcctttgt

SEQ ID NO: 712 - protein, 344 aa, Homo sapien
MKDLGAEHLAGHEGVQLLGLLNVYLEQEERFQPREKGLSLIEATPENDNTLCPGLRNAKVEDLRSLANFFGSCTETFVLAVNILDRFLALMKVKPKHLSCIGVCSFLLAARIVEEDCNIPSTHDVIRISQCKCTASDIKRMEKIISEKLHYELEATTALNFLHLYHTIILCHTSERKEILSLDKLEAQLKACNCRLIFSKAKPSVLALCLLNLEVETLKSVELLEILLLVKKHSKINDTEFFYWRELVSKCLAEYSSPECCKPDLKKLVWIVSRRTAQNLHNSYYSVPELPTIPEGGCFDESESEDSCEDMSCGEESLSSSPPSDQECTFFFNFKVAQTLCFPS

SEQ ID NO: 713 - DNA, 890 bp, Homo sapien
ggcggaccgaagaacgcaggaagggggccggggggacccgcccccggccggccgcagccatgaactccaacgtggagaacctacccccgcacatcatccgcctggtgtacaaggaggtgacgacactgaccgcagacccacccgatggcatcaaggtctttcccaacgaggaggacctcaccgacctccaggtcaccatcgagggccctgaggggaccccatatgctggaggtctgttccgcatgaaactcctgctggggaaggacttccctgcctccccacccaagggctacttcctgaccaagatcttccacccgaacgtgggcgccaatggcgagatctgcgtcaacgtgctcaagagggactggacggctgagctgggcatccgacacgtactgctgaccatcaagtgcctgctgatccaccctaaccccgagtctgcactcaacgaggaggcgggccgcctgctcttggagaactacgaggagtatgcggctcgggcccgtctgctcacagagatccacgggggcgccggcgggcccagcggcagggccgaagccggtcgggccctggccagtggcactgaagcttcctccaccgaccctggggccccagggggcccgggaggggctgagggtcccatggccaagaagcatgctggcgagcgcgataagaagctggcggccaagaaaaagacggacaagaagcgggcgctgcgggcgctgcggcggctgtagtgggctctcttcctccttccaccgtgaccccaacctctcctgtcccctccctccaactctgtctctaagttatttaaattatggctggggtcggggagggtacagggggcactgggacctggatttgtttttctaaataaagttggaaaagca

SEQ ID NO: 714 - protein, 225 aa, Homo sapien
MNSNVENLPPHIIRLVYKEVTTLTADPPDGIKVFPNEEDLTDLQVTIEGPEGTPYAGGLFRMKLLLGKDFPASPPKGYFLTKIFHPNVGANGEICVNVLKRDWTAELGIRHVLLTIKCLLIHPNPESALNEEAGRLLLENYEEYAARARLLTEIHGGAGGPSGRAEAGRALASGTEASSTDPGAPGGPGGAEGPMAKKHAGERDKKLAAKKKTDKKRALRALRRL

SEQ ID NO: 715 - DNA, 3293 bp, Homo sapien
cgctccctcccctcctagctggcttcggcggggacggcggcggcggcggcggcggcggcggcgggcggggagggcgtgcgccggccgagaggtgtcggcggcgaggcaaaggaagtttcaagtggaaggtcgtccgtcggccggcgcgtcctcctgctctcctccgcagcatcatggcggagccgagcggctcgcccgtgcacgtccagcttccccagcaggcggccccggtgacagcggcggcggcggcggccccggcggccgcgacagcagcgccggccccggcagctcccgcggccccggccccggccccggccccggccccggcggcacaggctgtcggctggcccatctgcagggacgcgtacgagctgcaggaggttatcggcagtggagctactgctgtggttcaggcagccctatgcaaacccaggcaagaacgtgtagcaataaaacggatcaacttggaaaaatgccagaccagtatggatgaactattaaaagaaattcaagccatgagtcagtgcagccatcccaacgtagtgacctattacacctcttttgtggtcaaagatgaactttggctggtcatgaaattactaagtggaggttcaatgttggatatcataaaatacattgtcaaccgaggagaacacaagaatggagttctggaagaggcaataatagcaacaattcttaaagaggttttggaaggcttagactatctacacagaaacggtcagattcacagggatttgaaagctggtaatattcttctgggtgaggatggttcagtacaaatagcagattttggggtaagtgcgttcctagcaacagggggtgatgttacccgaaataaagtaagaaaaacattcgttggcaccccatgttggatggctcctgaagtcatggaacaggtgagaggctatgacttcaaggctgacatgtggagttttggaataactgccattgaattagcaacaggagcagcgccttatcacaaatatcctcccatgaaagtgttaatgttgactttgcaaaatgatccacccactttggaaacaggggtagaggataaagaaatgatgaaaaagtacggcaagtcctttagaaaattactttcactgtgtcttcagaaagatccttccaaaaggcccacagcagcagaacttttaaaatgcaaattcttccagaaagccaagaacagagagtacctgattgagaagctgcttacaagaacaccagacatagcccaaagagccaaaaaggtaagaagagttcctgggtcaagtggtcaccttcataaaaccgaagacggggactgggagtggagtgacgacgagatggatgagaagagcgaagaagggaaagcagctttttctcaggaaaagtcacgaagagtaaaagaagaaaatccagagattgcagtgagtgccagcaccatccccgaacaaatacagtccctctctgtgcacgactctcagggcccacccaatgctaatgaagactacagagaagcttcttcttgtgccgtgaacctcgttttgagattaagaaactccagaaaggaacttaatgacatacgatttgagtttactccaggaagagatacagcagatggtgtatctcaggagctcttctctgctggcttggtggatggtcacgatgtagttatagtggctgctaatttacagaagattgtagatgatcccaaagctttaaaaacattgacatttaagttggcttctggctgtgatgggtcggagattcctgatgaagtgaagctgattgggtttgctcagttgagtgtcagctgatgtatgtcccttgatgtcaccctgatctgtcatgccccaccgccacccctactcccttcaaccctccctctttctgcccatttcctcccaccccctcactcccatttcctagcaaaatcagaagattgtgaagaggccggcttcaacaaaatgggataaaaaaataattttttaaaacttacaacactccgagttctgctttattctctagcaatccacagtacaagaacaagcaaatgccacagctgcacgactgttgctcatttttccaaaagctatttaatattcttagcaatcaatttggatatcccttaagtgaaaagaatctgaaatacactcaggtggtcttatttattggcaacaaaaggaattttctatccagaagcctatttctcctttcattgttgttatttctgttataatactttaaattgtacatctgacaatactgcctcttttatgttgtatttagaaattaatatacttataaaattaagatttattagccaaacttgaattctagttttaaaactgactgtgaattttatttttcatatatttatgcattacacaccttagctataagaaaaaaagggttttgattatatgcttcttgcagttaatctcgttatttaaacaaaaagttttgggtctgtctttggagtatttgtaacttctaaattttgaaatgactgaattaggaatttggatgcttattcttttagtctgtttgcctaaaaaccaatttacaatctgactgtctcttgggagagggaggtgccttgcaaactttcacattaagaatgtgcctgaggctgctttactctggaatagtctcagatctaaaatttcctctatataaggtggcatatgttaagttttgcttcattggaccgtttagaatgctatgtaaaatgttgccattctgttagattgctaactatatacccatctctgatttggctctccttaagtgataggatttgttattctaaaggtgataaacttgaaaatatcagaatctgagttttacttgaaattttgcagaatacccaggtggagtgaaaattggaagggttttgtgcaatgactaaaaggtaaaacgctgttaaggttcaagaatcaatactttcaacccaagtagccccctgcttgactgtatattatggaactagtaaaccttaggattttgaaaattggagtctaatctttcaaggaggtgggctcccaggatggtaccattgctctttcctagctaaccctagatatggcagctctttaatgtacttcaaaaagcaaatatatattactaaggaaaaaaagttatttataattgccttgtcataattgttaaggtgttctagagccatttgcatacaatttaatgtaatttcattccattctattgtttacacaacgattactcgaagatgactgcaaaggtaaaaggaaaataaaagtgtattgcacaatgag

SEQ ID NO: 716 - protein, 547 aa, Homo sapien
MAEPSGSPVHVQLPQQAAPVTAAAAAAPAAATAAPAPAAPAAPAPAPAPAPAAQAVGWPICRDAYELQEVIGSGATAVVQAALCKPRQERVAIKRINLEKCQTSMDELLKEIQAMSQCSHPNVVTYYTSFVVKDELWLVMKLLSGGSMLDIIKYIVNRGEHKNGVLEEAIIATILKEVLEGLDYLHRNGQIHRDLKAGNILLGEDGSVQIADFGVSAFLATGGDVTRNKVRKTFVGTPCWMAPEVMEQVRGYDFKADMWSFGITAIELATGAAPYHKYPPMKVLMLTLQNDPPTLETGVEDKEMMKKYGKSFRKLLSLCLQKDPSKRPTAAELLKCKFFQKAKNREYLIEKLLTRTPDIAQRAKKVRRVPGSSGHLHKTEDGDWEWSDDEMDEKSEEGKAAFSQEKSRRVKEENPEIAVSASTIPEQIQSLSVHDSQGPPNANEDYREASSCAVNLVLRLRNSRKELNDIRFEFTPGRDTADGVSQELFSAGLVDGHDVVIVAANLQKIVDDPKALKTLTFKLASGCDGSEIPDEVKLIGFAQLSVS

SEQ ID NO: 717 - DNA, 848 bp, Homo sapien
ctggccagcgaacaaagttacatgtcctgtagcttaaaaccacagctggcagggtgagaagctagatgcccctgcagttttggccctgggagccagggcagaggaatgtagggcctgcatggagaagggttctgccctgcctgaggaggaggacacagcacaagggcacattgcccatggctgggaacatgacccagcctgaaagatacaggggatcatgttaaaaatagcagtattatttttcgtctcaatggtattgtaactaagttatttactcctcctgctcctcacccctgtagggaaaccttggagaggagagtggcaggtgggctgcctgctgtgttaagaggacttagtttgtgatgtaaggcactgtcaggaatggggggcgggccagggtgggaagagaagaaatagcagagcctattttggtgaggttttttgtttttaagtcaaagaagactcagtatgctttccctgaggaatgaaaaagggattgaggagttgcctgactcctgggtgggtggggtacaggcagttaggtgctgaatgaagctgccatccttgctgcagcttctaactggtaaaaagatccagggatggagatgggaaggttagaaaggcagccctcacctctgaggacagaggccggggtccaggcccgtgggcgcaaaggtgcctcatagcatagccagcattcagcacacacaaacctactgcccacatttgggctcagggttggccatttgctagttctgctgccctcttaagatctgactgccaaataaatcatcctcatgtccctaaaaaaaatctatgtcgggtgcggagaaagaggtaatgaaatg

SEQ ID NO: 718 - protein, 16 aa, Homo sapien
MSLKKIYVGCGERGNE

SEQ ID NO: 719 - DNA, 2107 bp, Homo sapien
ggaagggtcccgggaacgtggtggggcagggcctccgagcgtggttggactttgaaggggatcggcgccatgctgcatcccctttttggaattgctcaaccaggtggtaaccggcgccgcttcctggccttgggaggtggttcctttcttaacccacaagaacctctcccaagagaacttggtcctgatgtctgaccatggagatgtgagcctcccgcccgaagaccgggtgagggctctctcccagctgggtagtgcggtagaggtgaatgaagacattccaccccgtcggtacttccgctctggagttgagattatccgaatggcatccatttactctgaggaaggcaacattgaacatgccttcatcctctataacaagtatatcacgctctttattgagaaactaccaaaacatcgagattacaaatctgctgtcattcctgaaaagaaagacacagtaaagaaattaaaggagattgcatttcccaaagcagaagagctgaaggcagagctgttaaaacgatataccaaagaatatacagaatataatgaagaaaagaagaaggaagcagaggaattggcccggaacatggccatccagcaagagctggaaaaggaaaaacagagggtagcacaacagaagcagcagcaattggaacaggaacagttccatgccttcgaggagatgatccggaaccaggagctagaaaaagagcgactgaaaattgtacaggagtttgggaaggtagaccctggcctaggtggcccgctagtgcctgacttggagaagccctccttagatgtgttccccaccttaacagtctcatccatacagccttcagactgtcacacaactgtaaggccagctaagccacctgtggtggacaggtccttgaaacctggagcactgagcaactcagaaagtattcccacaatcgatggattgcgccatgtggtggtgcctgggcggctgtgcccacagtttctccagttagccagtgccaacactgcccggggagtggagacatgtggaattctctgtggaaaactgatgaggaatgaatttaccattacccatgttctcatccccaagcaaagtgctgggtctgattactgcaacacagagaacgaagaagaacttttcctcatacaggatcagcagggcctcatcacactgggctggattcatactcaccccacacagaccgcgtttctctccagtgtcgacctacacactcactgctcttaccagatgatgttgccagagtcagtagccattgtttgctcccccaagttccaggaaactggattctttaaactaactgaccatggactagaggagatttcttcctgtcgccagaaaggatttcatccacacagcaaggatccacctctgttctgtagctgcagccacgtgactgttgtggacagagcagtgaccatcacagaccttcgatgagcgtttgagtccaacaccttccaagaacaacaaaaccatatcagtgtactgtagccccttaatttaagctttctagaaagctttggaagtttttgtagatagtagaaaggggggcatcacctgagaaagagctgattttgtatttcaggtttgaaaagaaataactgaacatattttttaggcaagtcagaaagagaacatggtcacccaaaagcaactgtaactcagaaattaagttactcagaaattaagtagctcagaaattaagaaagaatggtataatgaacccccatatacccttccttctggattcaccaattgttaacatttttttcctctcagctatccttctaatttctctctaatttcaatttgtttatatttacctctgggctcaataagggcatctgtgcagaaatttggaagccatttagaaaatcttttggattttcctgtggtttatggcaatatgaatggagcttattactggggtgagggacagcttactccatttgaccagattgtttggctaacacatcccgaagaatgattttgtcaggaattattgttatttaataaatatttcaggatatttttcctctacaataaagtaacaattaacttaaaaaaaaaaaaaaaaaaaaa

SEQ ID NO: 720 - protein, 424 aa, Homo sapien
MSDHGDVSLPPEDRVRALSQLGSAVEVNEDIPPRRYFRSGVEIIRMASIYSEEGNIEHAFILYNKYITLFIEKLPKHRDYKSAVIPEKKDTVKKLKEIAFPKAEELKAELLKRYTKEYTEYNEEKKKEAEELARNMAIQQELEKEKQRVAQQKQQQLEQEQFHAFEEMIRNQELEKERLKIVQEFGKVDPGLGGPLVPDLEKPSLDVFPTLTVSSIQPSDCHTTVRPAKPPVVDRSLKPGALSNSESIPTIDGLRHVVVPGRLCPQFLQLASANTARGVETCGILCGKLMRNEFTITHVLIPKQSAGSDYCNTENEEELFLIQDQQGLITLGWIHTHPTQTAFLSSVDLHTHCSYQMMLPESVAIVCSPKFQETGFFKLTDHGLEEISSCRQKGFHPHSKDPPLFCSCSHVTVVDRAVTITDLR

SEQ ID NO: 721 - DNA, 668 bp, Homo sapien
cggggacccggctgcggtggctgcgggactgacgagaaactactaaagttcctggggaagcaaagtagaatttcataagaacaaaatggatggagaggagaaaacctatggtggctgtgaaggacctgatgccatgtatgtcaaattgatatcatctgatggccatgaatttattgtaaaaagagaacatgcattaacatcaggcacgataaaagccatgttgagtggcccaggtcagtttgctgagaacgaaaccaatgaggtcaattttagagagataccttcacatgtgctatcgaaagtatgcatgtattttacgtacaaggttcgctacactaacagctccaccgagattcctgaattcccaattgcacctgaaattgcactggaactgctgatggctgcgaacttcttagattgttaaataaaataaattataataaactgttaactcttttcagtatttaatacctgtagttcagttagtaactttttcatatatagcatgttgcctgtatgcagttgaactatataaagttcattgcaaagcagattatcttgtttttttgcatagcaatcaaagttgaaatttgtttgctacatcaacaaattaaggacattttcacaaactgagaaataaacaaatatgccaattaaaaaaaaaaaaa

SEQ ID NO: 722 - protein, 112 aa, Homo sapien
MDGEEKTYGGCEGPDAMYVKLISSDGHEFIVKREHALTSGTIKAMLSGPGQFAENETNEVNFREIPSHVLSKVCMYFTYKVRYTNSSTEIPEFPIAPEIALELLMAANFLDC

SEQ ID NO: 723 - DNA, 2618 bp, Homo sapien
tgcagctagtgtgtcaactcagcgtttctcctctcgtccctggaagagctaaagatggctgaatttctagatgaccaggaaactcgactgtgtgacaactgcaaaaaagaaattcctgtgtttaactttaccatccatgagatccactgtcaaaggaacattggtatgtgtcctacctgtaaggaaccatttcccaaatctgacatggagactcacatggctgcagaacactgtcaggtgacctgcaaatgtaacaagaagttggagaagaggctgttaaagaagcatgaggagactgagtgccctttgcggcttgctgtctgccagcactgtgatttagaactttccattctcaaactgaaggaacatgaagattattgtggtgcccggacggaactatgtggcaactgtggtcgcaatgtccttgtgaaagatctgaagactcaccctgaagtttgtgggagagagggggaggaaaagagaaatgaggttgccatacctcctaatgcatatgatgaatcttggggtcaggatggaatctggattgcatcccaactcctcagacaaattgaggctctggacccacccatgaggctgccgcgaaggcccctgagagcctttgaatcagatgttttccacaatagaactaccaaccaaaggaacattacagcccaggtttcaattcagaataatctgtttgaagaacaagagaggcaggaaaggaatagaggccaacagccccccaaagagggtggtgaagagagtgcaaacttggacttcatgttggccctaagtctgcaaaatgaaggccaagcctccagtgtggcagagcaggacttctggagggccgtatgtgaggccgaccagtctcatggcggtcccaggtctctcagtgacataaagggtgcagctgacgagatcatgttgccttgtgaattttgtgaggagctctacccagaggaactgctgattgaccatcagacaagctgtaacccttcacgtgccttaccttcactcaatactggcagctcttcccccagaggggtggaggaacctgatgtcatcttccagaacttcttgcaacaggctgcaagtaaccagttagactctttgatgggcctgagcaattcacaccctgtggaggagagcatcattatcccatgtgaattctgtggggtacagctggaagaggaggtgctgttccatcaccaggaccagtgtgaccaacgcccagccactgcaaccaaccatgtgacagaggggattcctagactggattcccagcctcaagagacctcaccagagctgcccaggaggcgtgtcagacaccagggagacctgtcttctggttacctggatgatactaagcaggaaacagctaatgggcccacctcctgtctgcctcccagccgacccattaacaatatgacagctacctataaccagctatcgagatcaacatcaggccccagacctgggtgccagcccagctctccttgtgtgccgaagctcagcaactcagacagccaggacatccaggggcggaatcgagacagccagaatggggccatagcccctgggcacgtttcagtgattcgccctcctcaaaatctctacccagaaaacattgtgccctctttctcccctgggccttcagggagatacggagctagtggtaggagtgaaggtggcaggaattcccgggtcacccctgcagctgccaactaccgcagcagaactgcaaaggcaaagccttccaagcaacagggagctggggatgcagaagaggaagaggaggagtaatggtgtctccagagactttacatcggttcctgtcttctgtgcacagcagcacttgccgctgtgcaggcccacctctttggctctttgggtgggagagtttttccagattttagatttttctaggttatggccattttgtgtcttttgaggttgtgctgtgggggtttgggtttgagggaagggagcagggtggcggttgaggaacgcttcagccttagctgctacctttcggcagcagtgaaatacaagctgcagcctcggctgccagggctcccttttgacttattgtcgccactgccccttggtgctgtgtggtcccagtggaaggaggggaagattttggaaacctggtagccaccagtaaggtgattctctgccctgttggggcctaaatttgggggcttttgggcaacctctccgtgtactgcgtctgtccacactcgattgggccccaggtgtgtatgaggcgctctggtaaggtgctcaggccagttgcaatgtctgtcagtaacgaggcttttgatgtgttgagctggaggtgagtggaccgggggctgtgttttaagctgcttccttggcatttgcatcactgccttctgttcccgggggagcatggatcttttgtcctcactgctttctaatggggagggctgagggctccctgtccccacagcaggtatgtttgctctgccccagccccacacttgctctgaaaaccaagtgtcagagccccttccccttgtttttattttactgttataataattattaacttccttgtaatagaaataaagtttgtacttggagttcagctc

SEQ ID NO: 724 - protein, 582 aa, Homo sapien
MAEFLDDQETRLCDNCKKEIPVFNFTIHEIHCQRNIGMCPTCKEPFPKSDMETHMAAEHCQVTCKCNKKLEKRLLKKHEETECPLRLAVCQHCDLELSILKLKEHEDYCGARTELCGNCGRNVLVKDLKTHPEVCGREGEEKRNEVAIPPNAYDESWGQDGIWIASQLLRQIEALDPPMRLPRRPLRAFESDVFHNRTTNQRNITAQVSIQNNLFEEQERQERNRGQQPPKEGGEESANLDFMLALSLQNEGQASSVAEQDFWRAVCEADQSHGGPRSLSDIKGAADEIMLPCEFCEELYPEELLIDHQTSCNPSRALPSLNTGSSSPRGVEEPDVIFQNFLQQAASNQLDSLMGLSNSHPVEESIIIPCEFCGVQLEEEVLFHHQDQCDQRPATATNHVTEGIPRLDSQPQETSPELPRRRVRHQGDLSSGYLDDTKQETANGPTSCLPPSRPINNMTATYNQLSRSTSGPRPGCQPSSPCVPKLSNSDSQDIQGRNRDSQNGAIAPGHVSVIRPPQNLYPENIVPSFSPGPSGRYGASGRSEGGRNSRVTPAAANYRSRTAKAKPSKQQGAGDAEEEEEE

SEQ ID NO: 725 - DNA, 2371 bp, Homo sapien
agctggctgagaggggactgggcgccggcggggaaggaggagcgctaggtcggtgtacgaccgagattagggtgcgtgccagctccgggaggccgcggtgaggggccgggcccaagctgccgacccgagccgatcgtcagggtcgccagcgcctcagctctgtggaggagcagcagtagtcggagggtgcaggatattagaaatggctactccccagtcaattttcatctttgcaatctgcattttaatgataacagaattaattctggcctcaaaaagctactatgatatcttaggtgtgccaaaatcggcatcagagcgccaaatcaagaaggcctttcacaagttggccatgaagtaccaccctgacaaaaataagagcccggatgctgaagcaaaattcagagagattgcagaagcatatgaaacactctcagatgctaatagacgaaaagagtatgatacacttggacacagtgcttttactagtggtaaaggacaaagaggtagtggaagttcttttgagcagtcatttaacttcaattttgatgacttatttaaagactttggcttttttggtcaaaaccaaaacactggatccaagaagcgttttgaaaatcatttccagacacgccaggatggtggttccagtagacaaaggcatcatttccaagaattttcttttggaggtggattatttgatgacatgtttgaagatatggagaaaatgttttcttttagtggttttgactctaccaatcagcatacagtacagactgaaaatagatttcatggatctagcaagcactgcaggactgtcactcaacgaagaggaaatatggttactacatacactgactgttcaggacagtagttcttattctattctcactaaatccaactggttgactcttcctcattatctttgatgctaaacaattttctgtgaactattttgacaagtgcatgatttcactttaaacaatttgatatagctattaaatatatttaagggttttttttttttgacaaattcaacattcaacgagtagacaaaatgctaattatttccctgattaggaaagtttctttaaaaaacacgtaattttgcctagtgctttttctctacctgcccttgggctcactaatatcaccagtattattaccaagaaaatattgagtttacctgattaaactttaaaagttaattgtagatttaaattgtgtgaacctaatgatttttgcagtgaaacctttactaattcaaagttgcatgttctatgacatctgtgacttgcgttgcagagtgtacatgaaactgtataattgagtcattcagtaaaggagaacagtatcttggttaattgctactgaaaggttgagaaaggaatggtttgatatttaccacagcgctgtgcctttctacagtagaactggggtaaaggaaatggttttattgcccatagtcatttaggctggaaaaaagttgaaaacttaacgaaatattgccaagagattgttatgtgtttggttccagcctaaaaatgattttgtagtgttgaaatcatagctacttacatagctttttcatatttctttcttagttgttggcactcttaggtcttagtatggatttatgtgtttgtgtgtgtgtagtttatcctctctctcatctttatctagagattgactgatacctcattctgtttgtaaaaccagccagtaatttctgtgcaaccttactatgtgcaatatttttaaatcctgagaaatgtgtgcttttgttttcggatagacttatttctttagttctgcacttttccacattatactccatatgagtattaatcctatggatacatattaaaacaagtgtctcatacaacattgtatgtgagagaaatataaatatttacaacctgatattcgttgttgttttattgttaaaagtttattatgcaactctggaggtatagagggcatataagctatgggacatatgctgatcacaggctatattcatgaagttacttttgaccaacctgaaaactgataggattttgtttgtcatttggtaatttctactgcattcttaccatccttctctcacaaattttgatagcttgaagatctttttaattataattttgttgtatttgtttcctaggagcaagtgttcctgctgccagttctttcctctttaggcgtggttgagaaaaagcagaaactttacataaagctgtatttcttaatcatctttaatttgaaacttaagaaaatgaatttattctgttatatttatgtaacttatttcctggaagttatatctactagttttgtttgataataataaaattagctataccttgaa

SEQ ID NO: 726 - protein, 223 aa, Homo sapien
MATPQSIFIFAICILMITELILASKSYYDILGVPKSASERQIKKAFHKLAMKYHPDKNKSPDAEAKFREIAEAYETLSDANRRKEYDTLGHSAFTSGKGQRGSGSSFEQSFNFNFDDLFKDFGFFGQNQNTGSKKRFENHFQTRQDGGSSRQRHHFQEFSFGGGLFDDMFEDMEKMFSFSGFDSTNQHTVQTENRFHGSSKHCRTVTQRRGNMVTTYTDCSGQ

SEQ ID NO: 727 - DNA, 2371 bp, Homo sapien; identical to SEQ ID NO: 725

SEQ ID NO: 728 - protein, 223 aa, Homo sapien; identical to SEQ ID NO: 726

SEQ ID NO: 729 - DNA, 2165 bp, Homo sapien
cccgccttccatacctccccggctccgctcggttcctggccaccccgcagcccctgcccaggtgccatggccgcattgtaccgccctggcctgcggcttaactggcatgggctgagccccttgggctggccatcatgccgtagcatccagaccctgcgagtgcttagtggagatctgggccagcttcccactggcattcgagattttgtagagcacagtgcccgcctgtgccaaccagagggcatccacatctgtgatggaactgaggctgagaatactgccacactgaccctgctggagcagcagggcctcatccgaaagctccccaagtacaataactgctggctggcccgcacagaccccaaggatgtggcacgagtagagagcaagacggtgattgtaactccttctcagcgggacacggtaccactcccgcctggtggggcctgtgggcagctgggcaactggatgtccccagctgatttccagcgagctgtggatgagaggtttccaggctgcatgcagggccgcaccatgtatgtgcttccattcagcatgggtcctgtgggctccccgctgtcccgcatcggggtgcagctcactgactcagcctatgtggtggcaagcatgcgtattatgacccgactggggacacctgtgcttcaggccctgggagatggtgactttgtcaagtgtctgcactccgtgggccagcccctgacaggacaaggggagccagtgagccagtggccgtgcaacccagagaaaaccctgattggccacgtgcccgaccagcgggagatcatctccttcggcagcggctatggtggcaactccctgctgggcaagaagtgctttgccctacgcatcgcctctcggctggcccgggatgagggctggctggcagagcacatgctgatcctgggcatcaccagccctgcagggaagaaggcgctatgtgcagccgccttccctagtgcctgtggcaagaccaacctggctatgatgcggcctgcactgccaggctggaaagtggagtgtgtgggggatgatattgcttggatgaggtttgacagtgaaggtcgactccgggccatcaaccctgagaacggcttctttggggttgcccctggtacctctgccaccaccaatcccaacgccatggctacaatccagagtaacactatttttaccaatgtggctgagaccagtgatggtggcgtgtactgggagggcattgaccagcctcttccacctggtgttactgtgacctcctggctgggcaaaccctggaaacctggtgacaaggagccctgtgcacatcccaactctcgattttgtgccccggctcgccagtgccccatcatggacccagcctgggaggccccagagggtgtccccattgacgccatcatctttggtggccgcagacccaaaggggtacccctggtatacgaggccttcaactggcgtcatggggtgtttgtgggcagagccatgcgctctgagtccactgctgcagcagaacacaaagggaagatcatcatgcacgacccatttgccatgcggcccttttttggctacaacttcgggcactacctggaacactggctgagcatggaagggcgcaagggggcccagctgccccgtatcttccatgtcaactggttccggcgtgacgaggcagggcacttcctgtggccaggctttggggagaatgctcgggtgctagactggatctgccggcggttagagggggaggacagtgcccgagagacacccattgggctggtgccaaaggaaggagccttggatctcagcggcctcagagctatagacaccactcagctgttctccctccccaaggacttctgggaacaggaggttcgtgacattcggagctacctgacagagcaggtcaaccaggatctgcccaaagaggtgttggctgagcttgaggccctggagagacgtgtgcacaaaatgtgacctgaggcctagtctagcaagaggacatagcaccctcatctgggaatagggaaggcaccttgcagaaaatatgagcaattgatattaactaacatcttcaatgtgccatagaccttcccacaaagactgtccaataataagagatgcttatctattttaaaaaaaaaaaaaaaaaa

SEQ ID NO: 730 - protein, 640 aa, Homo sapien
MAALYRPGLRLNWHGLSPLGWPSCRSIQTLRVLSGDLGQLPTGIRDFVEHSARLCQPEGIHICDGTEAENTATLTLLEQQGLIRKLPKYNNCWLARTDPKDVARVESKTVIVTPSQRDTVPLPPGGACGQLGNWMSPADFQRAVDERFPGCMQGRTMYVLPFSMGPVGSPLSRIGVQLTDSAYVVASMRIMTRLGTPVLQALGDGDFVKCLHSVGQPLTGQGEPVSQWPCNPEKTLIGHVPDQREIISFGSGYGGNSLLGKKCFALRIASRLARDEGWLAEHMLILGITSPAGKKALCAAAFPSACGKTNLAMMRPALPGWKVECVGDDIAWMRFDSEGRLRAINPENGFFGVAPGTSATTNPNAMATIQSNTIFTNVAETSDGGVYWEGIDQPLPPGVTVTSWLGKPWKPGDKEPCAHPNSRFCAPARQCPIMDPAWEAPEGVPIDAIIFGGRRPKGVPLVYEAFNWRHGVFVGRAMRSESTAAAEHKGKIIMHDPFAMRPFFGYNFGHYLEHWLSMEGRKGAQLPRIFHVNWFRRDEAGHFLWPGFGENARVLDWICRRLEGEDSARETPIGLVPKEGALDLSGLRAIDTTQLFSLPKDFWEQEVRDIRSYLTEQVNQDLPKEVLAELEALERRVHKM

SEQ ID NO: 731 - DNA, 3423 bp, Homo sapien
cggctcgctggtaccggcagtgccatggcggccttcagcaagtacttgacggcgcggaactcctcgctggctggtgccgcgttcctgctgctctgcctgctccacaagcggcgccgcgccctcggcctgcacggtaagaaaagtggaaaaccaccattacagaacaatgagaaagaggggaaaaaagagcgagctgtggtggacaaggtgtttttctcaaggctcatacagattctgaaaatcatggtccctagaacattttgtaaagagacaggttacttggtacttattgctgttatgctggtgtctcgaacatattgtgatgtttggatgattcaaaatgggacactaattgaaagtggtatcattggtcgtagcaggaaagatttcaagagatacttactcaacttcatcgctgccatgcctcttatctctctggttaataacttcttgaagtatgggttaaatgagcttaaactgtgcttccgagtaaggctcactaaatacctctatgaggagtatcttcaagctttcacatattataaaatggggaatctggacaacagaatagctaatccagaccagctgcttacacaagatgtagaaaaattttgtaacagtgtagtcgatctgtattcaaatcttagtaagccatttttagacatagttttgtatatctttaagttaacgagtgcaattggagctcagggcccagcgagcatgatggcctacttggttgtttctgggctattcctaactcgacttcgaagacccattggtaagatgacaataactgagcaaaagtatgaaggagaatatagatatgttaattctcggctcatcacaaacagtgaagaaattgccttttacaatgggaataaaagagaaaagcagacagtccactcagtcttccgaaaactggtggaacacctacataatttcattttgtttcggttttcaatgggcttcattgatagtattattgccaaataccttgccactgttgttggttacctagttgtcagtcgccctttcttagatttgtctcatcctcgacatctcaagagtacacattcggaacttctagaggattactaccaaagtggaagaatgcttttgcgaatgtctcaagctctgggtcgaatagttttggctgggcgtgaaatgactagattggccggttttactgctcggattacagaattaatgcaagtactgaaggatttaaatcatggcaaatatgagcgcacaatggtctcacaacaggaaaagggtattgaaggagtacaagtcattcccttgatacctggtgctggagaaatcattattgcagataacattataaagtttgatcatgttcctttagcaacgccaaatggagatgttttgatccgagaccttaattttgaagttcgatctggggctaatgttctaatttgtggtccaaatggctgcggaaagagttcacttttccgtgttcttggtgaattatggcctctttttggaggacgtctaactaaacctgaaagaggaaaattattttatgttcctcagagaccttacatgacccttggaacacttcgagatcaagtgatatatccagatggacgagaagatcagaaaaggaagggaatttctgacctagtactgaaggaatacttagacaatgtccagttgggtcatatccttgaacgtgaaggaggctgggacagtgttcaggattggatggacgtactcagtggtggagaaaagcaaagaatggcgatggcaagattattttatcataaaccccagtttgccattttggatgaatgcacaagtgcagttagtgtcgacgtggaaggctacatttatagtcattgtcgaaaggttggcatcactctcttcactgtgtctcataggaaatctctttggaaacatcatgagtactacctgcatatggatggcagaggcaactatgaattcaaacagataacagaagatacagttgagtttggctcttagagaaatctggagaactatacctgcttcagtgaaataattacagaatatacttagaaaggcaaagtacattgtaaaataaagttgagcttagttttttttaaaaaaaaaaaacaaagcaacaaattaactagatacagaataatggagaacaagttgttaaaacatttaatattatataggatattgctaattgtgtatatgttggtttaattaataatatgtactaagaatgtccttattcttgtggttaaaaacctgcctaaattaaattgggcttcaatcactgtaacctgattcatcctgggatgtaaaccattcgaagtcagctaattggacttttatggctctatcttttccttcagtgaagaaccctatttaaaactgggtcatcatttgtcctgttctagcaagatagtcttcagtttcattttcctgtgccctgtggtagttggaaacaaatcataatgtattatttaaatgtttaacatcattgcataacagcgtttattatacagtggcagatttctttagctgccacagtaatactcattccttgtgtgtgtcttggagtgcatttgactccaggaaaagccattttggttttccttaactaaatgataaatgtacccctctcagtctgcagtattgagttgtttaaagtatatgtgcagtcttgcttacaaggaggggttaccatgtatcacacctaatcttcccaatgtttgggatattaaaacacaaagtccttaacatgccaggctcaaggtcttataagagttctagatttttaagagaattagacaaatttgtgtgtgttagaagcccattcattagaagtgtggtggttatttggtattaaactccaaatgagccataggaaggcactacatgaaataatgcactgagtatgcaatgctatcactgtctttgactgtgattttatgtttaaaaagtatgttctaaaattattatatatacatgggtgaattatgtttccgaggcactgttttatctctgtgaatcttgaataacttttttatatttgggttatgatgtcaaacgatcctaagcgaagatgatttcagttcatcaaatcatcattaatgactttatgtattatttgcacagggagaattgaaactgagtataatcaataagctagatacgaaatcagtttctcaaactgagcttcagaaaggggcattttgtactcttgtttttgcataactggttttgtttttttgcagaattaactataacaatcactggctaccgaagtaaactgatgtactgaattccataatacataacattcaatttttaccacttctgtttagcgaacttgtatacttattttctgttcagattaaaaaaaaaaaaaaaaaaaactcagatatcctataaaaaaaaaaggaattc

SEQ ID NO: 732 - protein, 659 aa, Homo sapien
MAAFSKYLTARNSSLAGAAFLLLCLLHKRRRALGLHGKKSGKPPLQNNEKEGKKERAVVDKVFFSRLIQILKIMVPRTFCKETGYLVLIAVMLVSRTYCDVWMIQNGTLIESGIIGRSRKDFKRYLLNFIAAMPLISLVNNFLKYGLNELKLCFRVRLTKYLYEEYLQAFTYYKMGNLDNRIANPDQLLTQDVEKFCNSVVDLYSNLSKPFLDIVLYIFKLTSAIGAQGPASMMAYLVVSGLFLTRLRRPIGKMTITEQKYEGEYRYVNSRLITNSEEIAFYNGNKREKQTVHSVFRKLVEHLHNFILFRFSMGFIDSIIAKYLATVVGYLVVSRPFLDLSHPRHLKSTHSELLEDYYQSGRMLLRMSQALGRIVLAGREMTRLAGFTARITELMQVLKDLNHGKYERTMVSQQEKGIEGVQVIPLIPGAGEIIIADNIIKFDHVPLATPNGDVLIRDLNFEVRSGANVLICGPNGCGKSSLFRVLGELWPLFGGRLTKPERGKLFYVPQRPYMTLGTLRDQVIYPDGREDQKRKGISDLVLKEYLDNVQLGHILEREGGWDSVQDWMDVLSGGEKQRMAMARLFYHKPQFAILDECTSAVSVDVEGYIYSHCRKVGITLFTVSHRKSLWKHHEYYLHMDGRGNYEFKQITEDTVEFGS

SEQ ID NO: 733 - DNA, 1982 bp, Homo sapien
ggcgagaggcgggctgaggcggcccagcggcggcaggtgaggcggaaccaaccctcctggccatgggaggggccgtggtggacgagggccccacaggcgtcaaggcccctgacggcggctggggctgggccgtgctcttcggctgtttcgtcatcactggcttctcctacgccttccccaaggccgtcagtgtcttcttcaaggagctcatacaggagtttgggatcggctacagcgacacagcctggatctcctccatcctgctggccatgctctacgggacaggtccgctctgcagtgtgtgcgtgaaccgctttggctgccggcccgtcatgcttgtggggggtctctttgcgtcgctgggcatggtggctgcgtccttttgccggagcatcatccaggtctacctcaccactggggtcatcacggggttgggtttggcactcaacttccagccctcgctcatcatgctgaaccgctacttcagcaagcggcgccccatggccaacgggctggcggcagcaggtagccctgtcttcctgtgtgccctgagcccgctggggcagctgctgcaggaccgctacggctggcggggcggcttcctcatcctgggcggcctgctgctcaactgctgcgtgtgtgccgcactcatgaggcccctggtggtcacggcccagccgggctcggggccgccgcgaccctcccggcgcctgctagacctgagcgtcttccgggaccgcggctttgtgctttacgccgtggccgcctcggtcatggtgctggggctcttcgtcccgcccgtgttcgtggtgagctacgccaaggacctgggcgtgcccgacaccaaggccgccttcctgctcaccatcctgggcttcattgacatcttcgcgcggccggccgcgggcttcgtggcggggcttgggaaggtgcggccctactccgtctacctcttcagcttctccatgttcttcaacggcctcgcggacctggcgggctctacggcgggcgactacggcggcctcgtggtcttctgcatcttctttggcatctcctacggcatggtgggggccctgcagttcgaggtgctcatggccatcgtgggcacccacaagttctccagtgccattggcctggtgctgctgatggaggcggtggccgtgctcgtcgggcccccttcgggaggcaaactcctggatgcgacccacgtctacatgtacgtgttcatcctggcgggggccgaggtgctcacctcctccctgattttgctgctgggcaacttcttctgcattaggaagaagcccaaagagccacagcctgaggtggcggccgcggaggaggagaagctccacaagcctcctgcagactcgggggtggacttgcgggaggtggagcatttcctgaaggctgagcctgagaaaaacggggaggtggttcacaccccggaaacaagtgtctgagtggctgggcggggccggcaggcacagggaggaggtacagaagccggcaacgcttgctatttattttacaaactggactggctcaggcagggccacggctgggctccagctgccggcccagcggatcgtcgcccgatcagtgttttgagggggaaggtggcggggtgggaaccgtgtcattccagagtggatctgcggtgaagccaagccgcaaggttacaaggcatcctcaccaggggccccgcctgctgctcccaggtggcctgcggccactgctatgctcaaggacctggaaacccatgcttcgagacaacgtgactttaatgggagggtgggtgggccgcagacaggctggcagggcaggtgctgcgtggggccctctccagcccgtcctaccctgggctcacatggggcctgtgcccacccctcttgagtgtcttggggacagctctttccacccctggaagatggaaataaacctgcgtgtgggtggagtgttctcgtgccgaattcaaaaagctt

SEQ ID NO: 734 - protein, 465 aa, Homo sapien
MGGAVVDEGPTGVKAPDGGWGWAVLFGCFVITGFSYAFPKAVSVFFKELIQEFGIGYSDTAWISSILLAMLYGTGPLCSVCVNRFGCRPVMLVGGLFASLGMVAASFCRSIIQVYLTTGVITGLGLALNFQPSLIMLNRYFSKRRPMANGLAAAGSPVFLCALSPLGQLLQDRYGWRGGFLILGGLLLNCCVCAALMRPLVVTAQPGSGPPRPSRRLLDLSVFRDRGFVLYAVAASVMVLGLFVPPVFVVSYAKDLGVPDTKAAFLLTILGFIDIFARPAAGFVAGLGKVRPYSVYLFSFSMFFNGLADLAGSTAGDYGGLVVFCIFFGISYGMVGALQFEVLMAIVGTHKFSSAIGLVLLMEAVAVLVGPPSGGKLLDATHVYMYVFILAGAEVLTSSLILLLGNFFCIRKKPKEPQPEVAAAEEEKLHKPPADSGVDLREVEHFLKAEPEKNGEVVHTPETSV

SEQ ID NO: 735 - DNA, 1982 bp, Homo sapien; identical to SEQ ID NO: 733

SEQ ID NO: 736 - protein, 465 aa, Homo sapien; identical to SEQ ID NO: 734

SEQ ID NO: 737 - DNA, 1666 bp, Homo sapien
ctccataaggcacaaactttcagagacagcagagcacacaagcttctaggacaagagccaggaagaaaccaccggaaggaaccatctcactgtgtgtaaacatgacttccaagctggccgtggctctcttggcagccttcctgatttctgcagctctgtgtgaaggtgcagttttgccaaggagtgctaaagaacttagatgtcagtgcataaagacatactccaaacctttccaccccaaatttatcaaagaactgagagtgattgagagtggaccacactgcgccaacacagaaattattgtaaagctttctgatggaagagagctctgtctggaccccaaggaaaactgggtgcagagggttgtggagaagtttttgaagagggctgagaattcataaaaaaattcattctctgtggtatccaagaatcagtgaagatgccagtgaaacttcaagcaaatctacttcaacacttcatgtattgtgtgggtctgttgtagggttgccagatgcaatacaagattcctggttaaatttgaatttcagtaaacaatgaatagtttttcattgtaccatgaaatatccagaacatacttatatgtaaagtattatttatttgaatctacaaaaaacaacaaataatttttaaatataaggattttcctagatattgcacgggagaatatacaaatagcaaaattgaggccaagggccaagagaatatccgaactttaatttcaggaattgaatgggtttgctagaatgtgatatttgaagcatcacataaaaatgatgggacaataaattttgccataaagtcaaatttagctggaaatcctggatttttttctgttaaatctggcaaccctagtctgctagccaggatccacaagtccttgttccactgtgccttggtttctcctttatttctaagtggaaaaagtattagccaccatcttacctcacagtgatgttgtgaggacatgtggaagcactttaagttttttcatcataacataaattattttcaagtgtaacttattaacctatttattatttatgtatttatttaagcatcaaatatttgtgcaagaatttggaaaaatagaagatgaatcattgattgaatagttataaagatgttatagtaaatttattttattttagatattaaatgatgttttattagataaatttcaatcagggtttttagattaaacaaacaaacaattgggtacccagttaaattttcatttcagataaacaacaaataattttttagtataagtacattattgtttatctgaaattttaattgaactaacaatcctagtttgatactcccagtcttgtcattgccagctgtgttggtagtgctgtgttgaattacggaataatgagttagaactattaaaacagccaaaactccacagtcaatattagtaatttcttgctggttgaaacttgtttattatgtacaaatagattcttataatattatttaaatgactgcatttttaaatacaaggctttatatttttaactttaagatgtttttatgtgctctccaaattttttttactgtttctgattgtatggaaatataaaagtaaatatgaaacatttaaaatataatttgttgtcaaagtaaaaaaaaaaaaaaa

SEQ ID NO: 738 - protein, 99 aa, Homo sapien
MTSKLAVALLAAFLISAALCEGAVLPRSAKELRCQCIKTYSKPFHPKFIKELRVIESGPHCANTEIIVKLSDGRELCLDPKENWVQRVVEKFLKRAENS

SEQ ID NO: 739 - DNA, 1447 bp, Homo sapien
agtcctgctctccgcacgccaccttaggcccgcagccgtgccgggtgctcttcagcatgtccttcatcccggtggccgaggattccgacttccccatccacaacctgccctacggcgtcttctcgaccagaggcgacccaagaccgaggataggtgtggccattggcgaccagatcctggacctcagcatcatcaagcacctctttactggtcctgtcctctccaaacaccaggatgtcttcaatcagcctacactcaacagcttcatgggcctgggtcaggctgcctggaaggaggcgagagtgttcttgcagaacttgctgtctgtgagccaagccaggctcagagatgacaccgaacttcggaagtgtgcattcatctcccaggcttctgccacgatgcaccttccagccaccataggagactacacagacttctattcctctcggcagcatgctaccaacgtcggaatcatgttcagggacaaggagaatgcgttgatgccaaattggctgcacttaccagtgggctaccatggccgtgcctcctctgtcgtggtgtctggcaccccaatccgaaggcccatgggacagatgaaacctgatgactctaagcctcccgtatatggtgcctgcaagctcttggacatggagctggaaatggctttttttgtaggccctggaaacagattgggagagccgatccccatttccaaggcccatgagcacatttttggaatggtccttatgaacgactggagtgcacgagacattcagaagtgggagtatgtccctctcgggccattccttgggaagagttttgggaccactgtctctccgtgggtggtgcccatggatgctctcatgccctttgctgtgcccaacccgaagcaggaccccaggcccctgccgtatctgtgccatgacgagccctacacatttgacatcaacctctctgttaacctgaaaggagaaggaatgagccaggcggctaccatatgcaagtccaattttaagtacatgtactggacgatgctgcagcagctcactcaccactctgtcaacggctgcaacctgcggccgggggacctcctggcttctgggaccatcagcgggccggagccagaaaacttcggctccatgttggaactgtcgtggaagggaacgaagcccatagacctggggaatggtcagaccaggaagtttctgctggacggggatgaagtcatcataacagggtactgccagggggatggttaccgcatcggctttggccagtgtgctggaaaagtgctgcctgctctcctgccatcatgagattttctctgctcttctggaaacaaagggctcaagcacccctttcaaccctgtgactggggtcctccctcgggctgtaggcctggtccgccattcagtgacaaataaagccattgtgctctgaggcctgc

SEQ ID NO: 740 - protein, 419 aa, Homo sapien
MSFIPVAEDSDFPIHNLPYGVFSTRGDPRPRIGVAIGDQILDLSIIKHLFTGPVLSKHQDVFNQPTLNSFMGLGQAAWKEARVFLQNLLSVSQARLRDDTELRKCAFISQASATMHLPATIGDYTDFYSSRQHATNVGIMFRDKENALMPNWLHLPVGYHGRASSVVVSGTPIRRPMGQMKPDDSKPPVYGACKLLDMELEMAFFVGPGNRLGEPIPISKAHEHIFGMVLMNDWSARDIQKWEYVPLGPFLGKSFGTTVSPWVVPMDALMPFAVPNPKQDPRPLPYLCHDEPYTFDINLSVNLKGEGMSQAATICKSNFKYMYWTMLQQLTHHSVNGCNLRPGDLLASGTISGPEPENFGSMLELSWKGTKPIDLGNGQTRKFLLDGDEVIITGYCQGDGYRIGFGQCAGKVLPALLPS

SEQ ID NO: 741 - DNA, 3579 bp, Homo sapien
ctgaggcccacgcagggcctagggtgggaagatggcaggtgggggcggcgacctgagcaccaggaggctgaatgaatgtatttcaccagtagcaaatgagatgaaccatcttcctgcacacagccacgatttgcaaaggatgttcacggaagaccagggtgtagatgacaggctgctctatgacattgtattcaagcacttcaaaagaaataaggtggagatttcaaatgcaataaaaaagacatttccattcctcgagggcctccgtgatcgtgatctcatcacaaataaaatgtttgaagattctcaagattcttgtagaaacctggtccctgtacagagagtggtgtacaatgttcttagtgaactggagaagacatttaacctgccagttctggaagcactgttcagcgatgtcaacatgcaggaataccccgatttaattcacatttataaaggctttgaaaatgtaatccatgacaaattgcctctccaagaaagtgaagaagaagagagggaggagaggtctggcctccaactaagtcttgaacaaggaactggtgaaaactcttttcgaagcctgacttggccaccttcgggttccccatctcatgctggtacaaccccacctgaaaatggactctcagagcacccctgtgaaacagaacagataaatgcaaagagaaaagatacaaccagtgacaaagatgattcgctaggaagccaacaaacaaatgaacaatgtgctcaaaaggctgagccaacagagtcctgcgaacaaattgctgtccaagtgaataatggggatgctggaagggagatgccctgcccgttgccctgtgatgaagaaagcccagaggcagagctacacaaccatggaatccaaattaattcctgttctgtgcgactggtggatataaaaaaggaaaagccattttctaattcaaaagttgagtgccaagcccaagcaagaactcatcataaccaggcatctgacataatagtcatcagcagtgaggactctgaaggatccactgacgttgatgagcccttagaagtcttcatctcagcaccgagaagtgagcctgtgatcaataatgacaaccctttagaatcaaatgatgaaaaggagggccaagaagccacttgctcacgaccccagattgtaccagagcccatggatttcagaaaattatctacattcagagaaagttttaagaaaagagtgataggacaagaccacgacttttcagaatccagtgaggaggaggcgcccgcagaagcctcaagcggggcactgagaagcaagcatggtgagaaggctcctatgacttctagaagtacatctacttggagaatacccagcaggaagagacgtttcagcagtagtgacttttcagacctgagtaatggagaagagcttcaggaaacctgcagctcatccctaagaagagggtcaggatcacagccacaagaacctgaaaataagaagtgctcctgtgtcatgtgttttccaaaaggtgtgccaagaagccaagaagcaaggactgaaagtagtcaagcatctgacatgatggataccatggatgttgaaaacaattctactttggaaaaacacagtgggaaaagaagaaaaaagagaaggcatagatctaaagtaaatggtctccaaagagggagaaagaaagacagacctagaaaacatttaactctgaataacaaagtccaaaagaaaagatggcaacaaagaggaagaaaagccaacactagacctttgaaaagaagaagaaaaagaggtccaagaattcccaaagatgaaaatattaattttaaacaatctgaacttcctgtgacctgtggtgaggtgaagggcactctatataaggagcgattcaaacaaggaacctcaaagaagtgtatacagagtgaggataaaaagtggttcactcccagggaatttgaaattgaaggagaccgcggagcatccaagaactggaagctaagtatacgctgcggtggatataccctgaaagtcctgatggagaacaaatttctgccagaaccaccaagcacaagaaaaaagagaatactggaatctcacaacaataccttagttgacccttgtgaggagcataagaagaagaacccagatgcttcagtcaagttctcagagtttttaaagaagtgctcagagacatggaagaccatttttgctaaagagaaaggaaaatttgaagatatggcaaaggcggacaaggcccattatgaaagagaaatgaaaacctatatccctcctaaaggggagaaaaaaaagaagttcaaggatcccaatgcacccaagaggcctcctttggcctttttcctgttctgctctgagtatcgcccaaaaatcaaaggagaacatcctggcctgtccattgatgatgttgtgaagaaactggcagggatgtggaataacaccgctgcagctgacaagcagttttatgaaaagaaggctgcaaagctgaaggaaaaatacaaaaaggatattgctgcatatcgagctaaaggaaagcctaattcagcaaaaaagagagttgtcaaggctgaaaaaagcaagaaaaagaaggaagaggaagaagatgaagaggatgaacaagaggaggaaaatgaagaagatgatgataaataagttgcttctagtgcagtttttttcttgtctataaagcatttaagctgcctgtacacaactcactccttttaaagaaaaaaacttcaacgtaagactgtgtaagatttgtttttaaaccgtacactgtgtttttttgtatagttaaccactaccgaatgtgtcttcagatagccctgtcctggtggtatttagccactaacctttgcctggtacagtatgggggttgtaaattggcatggaaatttaaagcaggttcttgttagtgcacagcacaaattagttgtataggaggatggtagttttttcaccttcagttgtctctgatgtagcttatacaaaacatttgttgttctgttaactgaatgccactctgtaattgcaaaaaaaaaaaacagttgcagctgttttgttgacattctgaatgcttctaagtaaatacaatttttaaaaaaccgtatgagggaactgtgtagacaaggtaccaggtcagtcttcttccatgttctattagctccacaaagccaatctcaatccctcaaaacaatcttgtcatacttgaaaatatgacactctagtcaaagccttggtaaaataatcagtgtttccaatctgtcctgttacaaaagaaacagattattattgaacttatgcaaataaccattgtcataagaatgtttatgaatagtttccaaattatggcaaattcatgtagagagagaaaagtaactgttttggttttgctcacaaaagtctactttacctaagggctgtcagatataagtaacttaaaagaaagagaagttttcttgacttttgaaaacaaaatatgaaaagaatcggcaatgtttcaaacaaaaagtcataaaagtcactttattcctccatcaaaaaaaaaaaaaaaaaaaaaa

SEQ ID NO: 742 - protein, 879 aa, Homo sapien
MAGGGGDLSTRRLNECISPVANEMNHLPAHSHDLQRMFTEDQGVDDRLLYDIVFKHFKRNKVEISNAIKKTFPFLEGLRDRDLITNKMFEDSQDSCRNLVPVQRVVYNVLSELEKTFNLPVLEALFSDVNMQEYPDLIHIYKGFENVIHDKLPLQESEEEEREERSGLQLSLEQGTGENSFRSLTWPPSGSPSHAGTTPPENGLSEHPCETEQINAKRKDTTSDKDDSLGSQQTNEQCAQKAEPTESCEQIAVQVNNGDAGREMPCPLPCDEESPEAELHNHGIQINSCSVRLVDIKKEKPFSNSKVECQAQARTHHNQASDIIVISSEDSEGSTDVDEPLEVFISAPRSEPVINNDNPLESNDEKEGQEATCSRPQIVPEPMDFRKLSTFRESFKKRVIGQDHDFSESSEEEAPAEASSGALRSKHGEKAPMTSRSTSTWRIPSRKRRFSSSDFSDLSNGEELQETCSSSLRRGSGSQPQEPENKKCSCVMCFPKGVPRSQEARTESSQASDMMDTMDVENNSTLEKHSGKRRKKRRHRSKVNGLQRGRKKDRPRKHLTLNNKVQKKRWQQRGRKANTRPLKRRRKRGPRIPKDENINFKQSELPVTCGEVKGTLYKERFKQGTSKKCIQSEDKKWFTPREFEIEGDRGASKNWKLSIRCGGYTLKVLMENKFLPEPPSTRKKRILESHNNTLVDPCEEHKKKNPDASVKFSEFLKKCSETWKTIFAKEKGKFEDMAKADKAHYEREMKTYIPPKGEKKKKFKDPNAPKRPPLAFFLFCSEYRPKIKGEHPGLSIDDVVKKLAGMWNNTAAADKQFYEKKAAKLKEKYKKDIAAYRAKGKPNSAKKRVVKAEKSKKKKEEEEDEEDEQEEENEEDDDK

SEQ ID NO: 743 - DNA, 1590 bp, Homo sapien
gaggcagttctgttgccactctctctcctgtcaatgatggatctcagaaataccccagccaaatctctggacaagttcattgaagactatctcttgccagacacgtgtttccgcatgcaaatcgaccatgccattgacatcatctgtgggttcctgaaggaaaggtgcttccgaggtagctcctaccctgtgtgtgtgtccaaggtggtaaagggtggctcctcaggcaagggcaccaccctcagaggccgatctgacgctgacctggttgtcttcctcagtcctctcaccacttttcaggatcagttaaatcgccggggagagttcatccaggaaattaggagacagctggaagcctgtcaaagagagagagcactttccgtgaagtttgaggtccaggctccacgctggggcaacccccgtgcgctcagcttcgtactgagttcgctccagctcggggagggggtggagttcgatgtgctgcctgcctttgatgccctgggtcagttgactggcagctataaacctaacccccaaatctatgtcaagctcatcgaggagtgcaccgacctgcagaaagagggcgagttctccacctgcttcacagaactacagagagacttcctgaagcagcgccccaccaagctcaagagcctcatccgcctagtcaagcactggtaccaaaattgtaagaagaagcttgggaagctgccacctcagtatgccctggagctcctgacggtctatgcttgggagcgagggagcatgaaaacacatttcaacacagcccaaggatttcggacggtcttggaattagtcataaactaccagcaactctgcatctactggacaaagtattatgactttaaaaaccccattattgaaaagtacctgagaaggcagctcacgaaacccaggcctgtgatcctggacccggcggaccctacaggaaacttgggtggtggagacccaaagggttggaggcagctggcacaagaggctgaggcctggctgaattacccatgctttaagaattgggatgggtccccagtgagctcctggattctgctggctgaaagcaacagtacagacgatgagaccgacgatcccaggacgtatcagaaatatggttacattggaacacatgagtaccctcatttctctcatagacccagcacgctccaggcagcatccaccccacaggcagaagaggactggacctgcaccatcctctgaatgccagtgcatcttgggggaaagggctccagtgttatctggaccagttccttcattttcaggtgggactcttgatccagagaagacaaagctcctcagtgagctggtgtataatccaagacagaacccaagtctcctgactcctggccttctatgccctctatcctatcatagataacattctccacagcctcacttcattccacctattctctgaaaatattccctgagagagaacagagagatttagataagagaatgaaattccagccttgactttcttctgtgcacctgatgggagggtaatgtctaatgtattatcaataacaataaaaataaagcaaataccaaaaa

SEQ ID NO: 744 - protein, 400 aa, Homo sapien
MMDLRNTPAKSLDKFIEDYLLPDTCFRMQIDHAIDIICGFLKERCFRGSSYPVCVSKVVKGGSSGKGTTLRGRSDADLVVFLSPLTTFQDQLNRRGEFIQEIRRQLEACQRERALSVKFEVQAPRWGNPRALSFVLSSLQLGEGVEFDVLPAFDALGQLTGSYKPNPQIYVKLIEECTDLQKEGEFSTCFTELQRDFLKQRPTKLKSLIRLVKHWYQNCKKKLGKLPPQYALELLTVYAWERGSMKTHFNTAQGFRTVLELVINYQQLCIYWTKYYDFKNPIIEKYLRRQLTKPRPVILDPADPTGNLGGGDPKGWRQLAQEAEAWLNYPCFKNWDGSPVSSWILLAESNSTDDETDDPRTYQKYGYIGTHEYPHFSHRPSTLQAASTPQAEEDWTCTIL

SEQ ID NO: 745 - DNA, 1686 bp, Homo sapien
ccacgcgtccgggcgtaagccaggcgtgttaaagccggtcggaactgctccggagggcacgggctccgtaggcaccaactgcaaggacccctccccctgcgggcgctcccatggcacagttcgcgttcgagagtgacctgcactcgctgcttcagctggatgcacccatccccaatgcaccccctgcgcgctggcagcgcaaagccaaggaagccgcaggcccggccccctcacccatgcgggccgccaaccgatcccacagcgccggcaggactccgggccgaactcctggcaaatccagttccaaggttcagaccactcctagcaaacctggcggtgaccgctatatcccccatcgcagtgctgcccagatggaggtggccagcttcctcctgagcaaggagaaccagtctgaaaacagccagacgcccaccaagaaggaacatcagaaagcctgggctttgaacctgaacggttttgatgtagaggaagccaagatccttcggctcagtggaaaaccacaaaatgcgccagagggttatcagaacagactgaaagtactctacagccaaaaggccactcctggctccagccggaagacctgccgttacattccttccctgccagaccgtatcctggatgcgcctgaaatccgaaatgactattacctgaaccttgtggattggagttctgggaatgtactggccgtggcactggacaacagtgtgtacctgtggagtgcaagctctggtgacatcctgcagcttttgcaaatggagcagcctggggaatatatatcctctgtggcctggatcaaagagggcaactacttggctgtgggcaccagcagtgctgaggtgcagctatgggatgtgcagcagcagaaacggcttcgaaatatgaccagtcactctgcccgagtgggctccctaagctggaacagctatatcctgtccagtggttcacgttctggccacatccaccaccatgatgttcgggtagcagaacaccatgtggccacactgagtggccacagccaggaagtgtgtgggctgcgctgggccccagatggacgacatttggccagtggtggtaatgataacttggtcaatgtgtggcctagtgctcctggagagggtggctgggttcctctgcagacattcacccagcatcaaggggctgtcaaggccgtagcatggtgtccctggcagtccaatgtcctggcaacaggagggggcaccagtgatcgacacattcgcatctggaatgtgtgctctggggcctgtctgagtgccgtggatgcccattcccaggtgtgctccatcctctggtctccccattacaaggagctcatctcaggccatggctttgcacagaaccagctagttatttggaagtacccaaccatggccaaggtggctgaactcaaaggtcacacatcccgggtcctgagtctgaccatgagcccagatggggccacagtggcatccgcagcagcagatgagaccctgaggctatggcgctgttttgagttggaccctgcgcggcggcgggagcgggagaaggccagtgcagccaaaagcagcctcatccaccaaggcatccgctgaagaccaacccatcacctcagttgttttttatttttctaataaagtcatgtctcccttcatgtttttttttttaaaa

SEQ ID NO: 746 - protein, 499 aa, Homo sapien
MAQFAFESDLHSLLQLDAPIPNAPPARWQRKAKEAAGPAPSPMRAANRSHSAGRTPGRTPGKSSSKVQTTPSKPGGDRYIPHRSAAQMEVASFLLSKENQSENSQTPTKKEHQKAWALNLNGFDVEEAKILRLSGKPQNAPEGYQNRLKVLYSQKATPGSSRKTCRYIPSLPDRILDAPEIRNDYYLNLVDWSSGNVLAVALDNSVYLWSASSGDILQLLQMEQPGEYISSVAWIKEGNYLAVGTSSAEVQLWDVQQQKRLRNMTSHSARVGSLSWNSYILSSGSRSGHIHHHDVRVAEHHVATLSGHSQEVCGLRWAPDGRHLASGGNDNLVNVWPSAPGEGGWVPLQTFTQHQGAVKAVAWCPWQSNVLATGGGTSDRHIRIWNVCSGACLSAVDAHSQVCSILWSPHYKELISGHGFAQNQLVIWKYPTMAKVAELKGHTSRVLSLTMSPDGATVASAAADETLRLWRCFELDPARRREREKASAAKSSLIHQGIR

SEQ ID NO: 747 - DNA, 1760 bp, Homo sapien
gcagcaggccaagggggaggtgcgagcgtggacctgggacgggtctgggcggctctcggtggttggcacgggttcgcacacccattcaagcggcaggacgcacttgtcttagcagttctcgctgaccgcgctagctgcggcttctacgctccggcactctgagttcatcagcaaacgccctggcgtctgtcctcaccatgcctagcctttgggaccgcttctcgtcgtcgtccacctcctcttcgccctcgtccttgccccgaactcccaccccagatcggccgccgcgctcagcctgggggtcggcgacccgggaggaggggtttgaccgctccacgagcctggagagctcggactgcgagtccctggacagcagcaacagtggcttcgggccggaggaagacacggcttacctggatggggtgtcgttgcccgacttcgagctgctcagtgaccctgaggatgaacacttgtgtgccaacctgatgcagctgctgcaggagagcctggcccaggcgcggctgggctctcgacgccctgcgcgcctgctgatgcctagccagttggtaagccaggtgggcaaagaactactgcgcctggcctacagcgagccgtgcggcctgcggggggcgctgctggacgtctgcgtggagcagggcaagagctgccacagcgtgggccagctggcactcgaccccagcctggtgcccaccttccagctgaccctcgtgctgcgcctggactcacgactctggcccaagatccaggggctgtttagctccgccaactctcccttcctccctggcttcagccagtccctgacgctgagcactggcttccgagtcatcaagaagaagctgtacagctcggaacagctgctcattgaggagtgttgaacttcaacctgagggggccgacagtgccctccaagacagagacgactgaacttttggggtggagactagaggcaggagctgagggactgattccagtggttggaaaactgaggcagccacctaaggtggaggtgggggaatagtgtttcccaggaagctcattgagttgtgtgcgggtggctgtgcattggggacacatacccctcagtactgtagcatggaacaaaggcttaggggccaacaaggcttccagctggatgtgtgtgtagcatgtaccttattatttttgttactgacagttaacagtggtgtgacatccagagagcagctgggctgctcccgccccagcctggcccagggtgaaggaagaggcacgtgctcctcagagcagccggagggaggggggaggtcggaggtcgtggaggtggtttgtgtatcttactggtctgaagggaccaagtgtgtttgttgtttgttttgtatcttgtttttctgatcggagcatcactactgacctgttgtaggcagctatcttacagacgcatgaatgtaagagtaggaaggggtgggtgtcagggatcacttgggatctttgacacttgaaaaattacacctggcagctgcgtttaagccttcccccatcgtgtactgcagagttgagctggcaggggaggggctgagagggtgggggctggaacccctccccgggaggagtgccatctgggtcttccatctagaactgtttacatgaagataagatactcactgttcatgaatacacttgatgttcaagtattaagacctatgcaatattttttacttttctaataaacatgtttgttaaaacaaaaaaaaaaaaaaaaa

SEQ ID NO: 748 - protein, 232 aa, Homo sapien
MPSLWDRFSSSSTSSSPSSLPRTPTPDRPPRSAWGSATREEGFDRSTSLESSDCESLDSSNSGFGPEEDTAYLDGVSLPDFELLSDPEDEHLCANLMQLLQESLAQARLGSRRPARLLMPSQLVSQVGKELLRLAYSEPCGLRGALLDVCVEQGKSCHSVGQLALDPSLVPTFQLTLVLRLDSRLWPKIQGLFSSANSPFLPGFSQSLTLSTGFRVIKKKLYSSEQLLIEEC

SEQ ID NO: 749 - DNA, 4100 bp, Homo sapien
gtacctcatgtgacaagttccaatttcttttcaagtcaattgaactgaaatctccttgttgctttgaaatcttagaagagagcccactaattcaaggactcttactgtgggagcaactgctggttctatcacaatgaaacggctggtttgtgtgctcttggtgtgctcctctgcagtggcacagttgcataaagatcctaccctggatcaccactggcatctctggaagaaaacctatggcaaacaatacaaggaaaagaatgaagaagcagtacgacgtctcatctgggaaaagaatctaaagtttgtgatgcttcacaacctggagcattcaatgggaatgcactcatacgatctgggcatgaaccacctgggagacatgaccagtgaagaagtgatgtctttgatgagttccctgagagttcccagccagtggcagagaaatatcacatataagtcaaaccctaatcggatattgcctgattctgtggactggagagagaaagggtgtgttactgaagtgaaatatcaaggttcttgtggtgcttgctgggctttcagtgctgtgggggccctggaagcacagctgaagctgaaaacaggaaagctggtgtctctcagtgcccagaacctggtggattgctcaactgaaaaatatggaaacaaaggctgcaatggtggcttcatgacaacggctttccagtacatcattgataacaagggcatcgactcagacgcttcctatccctacaaagccatggatcagaaatgtcaatatgactcaaaatatcgtgctgccacatgttcaaagtacactgaacttccttatggcagagaagatgtcctgaaagaagctgtggccaataaaggcccagtgtctgttggtgtagatgcgcgtcatccttctttcttcctctacagaagtggtgtctactatgaaccatcctgtactcagaatgtgaatcatggtgtacttgtggttggctatggtgatcttaatgggaaagaatactggcttgtgaaaaacagctggggccacaactttggtgaagaaggatatattcggatggcaagaaataaaggaaatcattgtgggattgctagctttccctcttacccagaaatctagaggatctctcctttttataacaaatcaagaaatatgaagcactttctcttaacttaatttttcctgctgtatccagaagaaataattgtgtcatgattaatgtgtatttactgtactaattagaaaatatagtttgaggccgggcacggtggctcacgcctgtaatcccagtacttgggaggccaaggcaggcatatcaacttgaggccaggagttaaagagcagcctggctaacatggtgaaaccccatctctactaaaaatacaaaaaattagccgagcacggtggtgcatgcctgtaatcccagctacttgggaggctgaggcacgagattccttgaacccaagaggttgaggctatgttgagctgagatcacaccactgtactccagcctggatgacagagtggagactctgtttcaaaaaaacagaaaagaaaatatagtttgattcttcatttttttaaatttgcaaatctcaggataaagtttgctaagtaaattagtaatgtactatagatataactgtacaaaaattgttcaacctaaaacaatctgtaattgcttattgttttattgtatactctttgtctttttaagacccctaatagccttttgtaacttgatggcttaaaaatacttaataaatctgccatttcaaatttctatcattgccacataccattcttattcctaggcaactattaataatctatcctgagaatattaattgtggtattctggtgatggggtttagcaactttgatggaagaaaatattaggctataaatgtcctaaggactcagattgtatctttgtacagaagaggattcaaaacgccacgtgtagtggctcatgcctgtaatcccaacactttgggaggctgaagtaggaggatcgtcttgagcccaggagttcaagaccagcctggacaacatagtgagaccttgtctccacaaaaataaaaaagaaactatccaggagtggtggtgtgtgcctgtggtccctgctatgcagatgtctaagacaggaggatcacaagagcccaggaggttgagaatgcagtgagcttgtaattgcaccactgcactccagcctgggtgacagagcaagaccctgtcttaaaaaaagaggattcaacacatatttttatattatgttaaagtaaagaaatgcataaaagacaagcactttggaagaattattttaatgatcaacaatttaatgtattagtccaaattatttttacgtagtcatcaacaatttgaccagggcctttatttggcaaataactgagccaaccagaataaaataaccaatactccactgctcatatttttatctaattcagatggatcttccttacaactgctctagattagtagatgcatctaagcaggcagcaggaactttaaattttttaagttcatgtctatgacatgaacaatgtgtgggataatgtcattaatatatcctaaattaacctaaacgtatttcactaactctggctccttctccataaagcacattttaaggaacaagaattgctaaatataaaaacataaataataccataatacatggctatcatcaaaagtgtatagaatattatagtttaaaagtatttagttgattacttttcagttttgttttgttttttgagacggagtctcactctgttgcccaggctggagtgcagtggcaccatctcagttcactgcaacttctgcctcccgagttcaagcgattctcctgcctcagcctcccgagtagctggaattataggcgtgcaccaccacgcccagctaatttttgtatttttagtaaagacagggttttgccacattagccaggctggtctcaaactcctgacctcaggtgatccacccaccccagcctcccaaagtgctaagattacaggcgtgagccactgagcccagcctacttttcagtttttaacataatttttgttttatccacaacttttcaagtattgaaagtagaataaaaacatgggttcttagtctttagctatctgttaaagcctatgaatgccttcttaaaatcatgtttttaaatgcataaaatatataggattacaaaggaatctaattatatcgaaatacagttattaaaatgttaaaagataagtttgttatatattaatatgcatgcttctttataaatgcattaaataagagttaatagctatcctaaatttgaaatagtgataagcataatgaaaatagatgcaaaaaactaatgtgatatgaaaatatctgggtttttcttttgatgatgaagtattgctaatattaccgtggtttatgaactatgttcagaattgaagaaaatcctaactttcagttagaggttagtgacggggttcaggacaccctacacaaaatacagcactttgacatattgaatattttaagctgaaggcatttgaggaaattgcagaagcaggaaggtgactctgaccttctgcctgctgttctccccagaagcagccataaaacctgggaaggattttctgaccttcccctgaagtagatcataagactgtcatgtaagaggtgctctcctggcacccagagaaaaggagcatccttacctccaaaagcacagggacacaaagaggaatctaaacaaacaggcctctcagtttcccccagtttattacatttagcttgttcacactttgccctatgacatttctacatcactggctgctcttcatcaaacctactataaaaaacattcaagttcaactgtttctttgggcctttatttccttatggagcccctcgtgtcgtgtaaaacttatattaaataaatgtgcatgcttttctcttgctaatctctcttttgttatagagatctcagccctaaacctaggatggatagaaggaaacatatgttctcccctacattagtaaaaataaaaatggaattttttacccatacaaa

SEQ ID NO: 750 - protein, 331 aa, Homo sapien
MKRLVCVLLVCSSAVAQLHKDPTLDHHWHLWKKTYGKQYKEKNEEAVRRLIWEKNLKFVMLHNLEHSMGMHSYDLGMNHLGDMTSEEVMSLMSSLRVPSQWQRNITYKSNPNRILPDSVDWREKGCVTEVKYQGSCGACWAFSAVGALEAQLKLKTGKLVSLSAQNLVDCSTEKYGNKGCNGGFMTTAFQYIIDNKGIDSDASYPYKAMDQKCQYDSKYRAATCSKYTELPYGREDVLKEAVANKGPVSVGVDARHPSFFLYRSGVYYEPSCTQNVNHGVLVVGYGDLNGKEYWLVKNSWGHNFGEEGYIRMARNKGNHCGIASFPSYPEI

SEQ ID NO: 751 - DNA, 4100 bp, Homo sapien; identical to SEQ ID NO: 749

SEQ ID NO: 752 - protein, 331 aa, Homo sapien; identical to SEQ ID NO: 750

SEQ ID NO: 753 - DNA, 3178 bp, Homo sapien
agcctgtggagacgggacagccctgtcccactcactctttcccctgccgctcctgccggcagctccaaccatgggaggccgcgtctttctcgcattctgtgtctggctgactctgccgggagctgaaacccaggactccaggggctgtgcccggtggtgccctcagaactcctcgtgtgtcaatgccaccgcctgtcgctgcaatccagggttcagctctttttctgagatcatcaccaccccgacggagacttgtgacgacatcaacgagtgtgcaacaccgtcgaaagtgtcatgcggaaaattctcggactgctggaacacagaggggagctacgactgcgtgtgcagcccgggatatgagcctgtttctggggcaaaaacattcaagaatgagagcgagaacacctgtcaagatgtggacgaatgtcagcagaacccaaggctctgtaaaagctacggcacctgcgtcaacacccttggcagctatacctgccagtgcctgcctggcttcaagttcatacctgaggatccgaaggtctgcacagatgtgaatgaatgcacctccggacaaaacccgtgccacagctccacccactgcctcaacaacgtgggcagctatcagtgccgctgccgcccgggctggcaaccgattccggggtcccccaatggcccaaacaataccgtctgtgaagatgtggacgagtgcagctccgggcagcatcagtgtgacagctccaccgtctgcttcaacaccgtgggttcatacagctgccgctgccgcccaggctggaagcccagacacggaatcccgaataaccaaaaggacactgtctgtgaagatatgactttctccacctggaccccgccccctggagtccacagccagacgctttcccgattcttcgacaaagtccaggacctgggcagagactccaagacaagctcagccgaggtcaccatccagaatgtcatcaaattggtggatgaactgatggaagctcctggagacgtagaggccctggcgccacctgtccggcacctcatagccacccagctgctctcaaaccttgaagatatcatgaggatcctggccaagagcctgcctaaaggccccttcacctacatttccccttcgaacacagagctgaccctgatgatccaggagcggggggacaagaacgtcactatgggtcagagcagcgcacgcatgaagctgaattgggctgtggcagctggagccgaggatccaggccccgccgtggcgggcatcctctccatccagaacatgacgacattgctggccaatgcctccttgaacctgcattccaagaagcaagccgaactggaggagatatatgaaagcagcatccgtggtgtccaactcagacgcctctctgccgtcaactccatctttctgagccacaacaacaccaaggaactcaactcccccatccttttcgccttctcccaccttgagtcctccgatggggaggcgggaagagaccctcctgccaaggacgtgatgcctgggccacggcaggagctgctctgtgccttctggaagagtgacagcgacaggggagggcactgggccaccgagggctgccaggtgctgggcagcaagaacggcagcaccacctgccaatgcagccacctgagcagctttgcgatccttatggctcattatgacgtggaggactggaagctgaccctgatcaccagggtgggactggcgctgtcactcttctgcctgctgctgtgcatcctcactttcctgctggtgcggcccatccagggctcgcgcaccaccatacacctgcacctctgcatctgcctcttcgtgggctccaccatcttcctggccggcatcgagaacgaaggcggccaggtggggctgcgctgccgcctggtggccgggctgctgcactactgtttcctggccgccttctgctggatgagcctcgaaggcctggagctctactttcttgtggtgcgcgtgttccaaggccagggcctgagtacgcgctggctctgcctgatcggctatggcgtgcccctgctcatcgtgggcgtctcggctgccatctacagcaagggctacggccgccccagatactgctggttggactttgagcagggcttcctctggagcttcttgggacctgtgaccttcatcattttgtgcaatgctgtcattttcgtgactaccgtctggaagctcactcagaagttttctgaaatcaatccagacatgaagaaattaaagaaggcgagggcgctgaccatcacggccatcgcgcagctcttcctgttgggctgcacctgggtctttggcctgttcatcttcgacgatcggagcttggtgctgacctatgtgtttaccatcctcaactgcctgcagggcgccttcctctacctgctgcactgcctgctcaacaagaaggttcgggaagaataccggaagtgggcctgcctagttgctggggggagcaagtactcagaattcacctccaccacgtctggcactggccacaatcagacccgggccctcagggcatcagagtccggcatatgaaggcgcatggttctggacggcccagcagctcctgtggccacagcagctttgtacacgaagaccatccatcctcccttcgtccaccactctactccctccaccctccctccctgatcccgtgtgccaccaggagggagtggcagctatagtctggcaccaaagtccaggacacccagtggggtggagtcggagccactggtcctgctgctggctgcctctctgctccaccttgtgacccagggtggggacaggggctggcccagggctgcaatgcagcatgttgccctggcacctgtggccagtactcgggacagactaagggcgcttgtcccatcctggacttttcctctcatgtctttgctgcagaactgaagagactaggcgctggggctcagcttccctcttaagctaagactgatgtcagaggccccatggcgaggccccttggggccactgcctgaggctcacggtacagaggcctgccctgcctggccgggcaggaggttctcactgttgtgaaggttgtagacgttgtgtaatgtgtttttatctgttaaaatttttcagtgttgacacttaaaattaaacacatgcatacag

SEQ ID NO: 754 - protein, 835 aa, Homo sapien
MGGRVFLAFCVWLTLPGAETQDSRGCARWCPQNSSCVNATACRCNPGFSSFSEIITTPTETCDDINECATPSKVSCGKFSDCWNTEGSYDCVCSPGYEPVSGAKTFKNESENTCQDVDECQQNPRLCKSYGTCVNTLGSYTCQCLPGFKFIPEDPKVCTDVNECTSGQNPCHSSTHCLNNVGSYQCRCRPGWQPIPGSPNGPNNTVCEDVDECSSGQHQCDSSTVCFNTVGSYSCRCRPGWKPRHGIPNNQKDTVCEDMTFSTWTPPPGVHSQTLSRFFDKVQDLGRDSKTSSAEVTIQNVIKLVDELMEAPGDVEALAPPVRHLIATQLLSNLEDIMRILAKSLPKGPFTYISPSNTELTLMIQERGDKNVTMGQSSARMKLNWAVAAGAEDPGPAVAGILSIQNMTTLLANASLNLHSKKQAELEEIYESSIRGVQLRRLSAVNSIFLSHNNTKELNSPILFAFSHLESSDGEAGRDPPAKDVMPGPRQELLCAFWKSDSDRGGHWATEGCQVLGSKNGSTTCQCSHLSSFAILMAHYDVEDWKLTLITRVGLALSLFCLLLCILTFLLVRPIQGSRTTIHLHLCICLFVGSTIFLAGIENEGGQVGLRCRLVAGLLHYCFLAAFCWMSLEGLELYFLVVRVFQGQGLSTRWLCLIGYGVPLLIVGVSAAIYSKGYGRPRYCWLDFEQGFLWSFLGPVTFIILCNAVIFVTTVWKLTQKFSEINPDMKKLKKARALTITAIAQLFLLGCTWVFGLFIFDDRSLVLTYVFTILNCLQGAFLYLLHCLLNKKVREEYRKWACLVAGGSKYSEFTSTTSGTGHNQTRALRASESGI

SEQ ID NO: 755 - DNA, 4264 bp, Homo sapien
atttcccgccagcaggagccgcgcggtagatgcggtgcttttaggagctccgtccgacagaacggttgggccttgccggctgtcggtatgtcgcgacagagcaccctgtacagcttcttccccaagtctccggcgctgagtgatgccaacaaggcctcggccagggcctcacgcgaaggcggccgtgccgccgctgcccccggggcctctccttccccaggcggggatgcggcctggagcgaggctgggcctgggcccaggcccttggcgcgatccgcgtcaccgcccaaggcgaagaacctcaacggagggctgcggagatcggtagcgcctgctgcccccaccagttgtgacttctcaccaggagatttggtttgggccaagatggagggttacccctggtggccttgtctggtttacaaccacccctttgatggaacattcatccgcgagaaagggaaatcagtccgtgttcatgtacagttttttgatgacagcccaacaaggggctgggttagcaaaaggcttttaaagccatatacaggttcaaaatcaaaggaagcccagaagggaggtcatttttacagtgcaaagcctgaaatactgagagcaatgcaacgtgcagatgaagccttaaataaagacaagattaagaggcttgaattggcagtttgtgatgagccctcagagccagaagaggaagaagagatggaggtaggcacaacttacgtaacagataagagtgaagaagataatgaaattgagagtgaagaggaagtacagcctaagacacaaggatctaggcgaagtagccgccaaataaaaaaacgaagggtcatatcagattctgagagtgacattggtggctctgatgtggaatttaagccagacactaaggaggaaggaagcagtgatgaaataagcagtggagtgggggatagtgagagtgaaggcctgaacagccctgtcaaagttgctcgaaagcggaagagaatggtgactggaaatggctctcttaaaaggaaaagctctaggaaggaaacgccctcagccaccaaacaagcaactagcatttcatcagaaaccaagaatactttgagagctttctctgcccctcaaaattctgaatcccaagcccacgttagtggaggtggtgatgacagtagtcgccctactgtttggtatcatgaaactttagaatggcttaaggaggaaaagagaagagatgagcacaggaggaggcctgatcaccccgattttgatgcatctacactctatgtgcctgaggatttcctcaattcttgtactcctgggatgaggaagtggtggcagattaagtctcagaactttgatcttgtcatctgttacaaggtggggaaattttatgagctgtaccacatggatgctcttattggagtcagtgaactggggctggtattcatgaaaggcaactgggcccattctggctttcctgaaattgcatttggccgttattcagattccctggtgcagaagggctataaagtagcacgagtggaacagactgagactccagaaatgatggaggcacgatgtagaaagatggcacatatatccaagtatgatagagtggtgaggagggagatctgtaggatcattaccaagggtacacagacttacagtgtgctggaaggtgatccctctgagaactacagtaagtatcttcttagcctcaaagaaaaagaggaagattcttctggccatactcgtgcatatggtgtgtgctttgttgatacttcactgggaaagtttttcataggtcagttttcagatgatcgccattgttcgagatttaggactctagtggcacactatcccccagtacaagttttatttgaaaaaggaaatctctcaaaggaaactaaaacaattctaaagagttcattgtcctgttctcttcaggaaggtctgatacccggctcccagttttgggatgcatccaaaactttgagaactctccttgaggaagaatattttagggaaaagctaagtgatggcattggggtgatgttaccccaggtgcttaaaggtatgacttcagagtctgattccattgggttgacaccaggagagaaaagtgaattggccctctctgctctaggtggttgtgtcttctacctcaaaaaatgccttattgatcaggagcttttatcaatggctaattttgaagaatatattcccttggattctgacacagtcagcactacaagatctggtgctatcttcaccaaagcctatcaacgaatggtgctagatgcagtgacattaaacaacttggagatttttctgaatggaacaaatggttctactgaaggaaccctactagagagggttgatacttgccatactccttttggtaagcggctcctaaagcaatggctttgtgccccactctgtaaccattatgctattaatgatcgtctagatgccatagaagacctcatggttgtgcctgacaaaatctccgaagttgtagagcttctaaagaagcttccagatcttgagaggctactcagtaaaattcataatgttgggtctcccctgaagagtcagaaccacccagacagcagggctataatgtatgaagaaactacatacagcaagaagaagattattgattttctttctgctctggaaggattcaaagtaatgtgtaaaattatagggatcatggaagaagttgctgatggttttaagtctaaaatccttaagcaggtcatctctctgcagacaaaaaatcctgaaggtcgttttcctgatttgactgtagaattgaaccgatgggatacagcctttgaccatgaaaaggctcgaaagactggacttattactcccaaagcaggctttgactctgattatgaccaagctcttgctgacataagagaaaatgaacagagcctcctggaatacctagagaaacagcgcaacagaattggctgtaggaccatagtctattgggggattggtaggaaccgttaccagctggaaattcctgagaatttcaccactcgcaatttgccagaagaatacgagttgaaatctaccaagaagggctgtaaacgatactggaccaaaactattgaaaagaagttggctaatctcataaatgctgaagaacggagggatgtatcattgaaggactgcatgcggcgactgttctataactttgataaaaattacaaggactggcagtctgctgtagagtgtatcgcagtgttggatgttttactgtgcctggctaactatagtcgagggggtgatggtcctatgtgtcgcccagtaattctgttgccggaagataccccccccttcttagagcttaaaggatcacgccatccttgcattacgaagactttttttggagatgattttattcctaatgacattctaataggctgtgaggaagaggagcaggaaaatggcaaagcctattgtgtgcttgttactggaccaaatatggggggcaagtctacgcttatgagacaggctggcttattagctgtaatggcccagatgggttgttacgtccctgctgaagtgtgcaggctcacaccaattgatagagtgtttactagacttggtgcctcagacagaataatgtcaggtgaaagtacattttttgttgaattaagtgaaactgccagcatactcatgcatgcaacagcacattctctggtgcttgtggatgaattaggaagaggtactgcaacatttgatgggacggcaatagcaaatgcagttgttaaagaacttgctgagactataaaatgtcgtacattattttcaactcactaccattcattagtagaagattattctcaaaatgttgctgtgcgcctaggacatatggcatgcatggtagaaaatgaatgtgaagaccccagccaggagactattacgttcctctataaattcattaagggagcttgtcctaaaagctatggctttaatgcagcaaggcttgctaatctcccagaggaagttattcaaaagggacatagaaaagcaagagaatttgagaagatgaatcagtcactacgattatttcgggaagtttgcctggctagtgaaaggtcaactgtagatgctgaagctgtccataaattgctgactttgattaaggaattatagactgactacattggaagctttgagttgacttctgaccaaaggtggtaaattcagacaacattatgatctaataaactttattttttaaaaatga

SEQ ID NO: 756 - protein, 1360 aa, Homo sapien
MSRQSTLYSFFPKSPALSDANKASARASREGGRAAAAPGASPSPGGDAAWSEAGPGPRPLARSASPPKAKNLNGGLRRSVAPAAPTSCDFSPGDLVWAKMEGYPWWPCLVYNHPFDGTFIREKGKSVRVHVQFFDDSPTRGWVSKRLLKPYTGSKSKEAQKGGHFYSAKPEILRAMQRADEALNKDKIKRLELAVCDEPSEPEEEEEMEVGTTYVTDKSEEDNEIESEEEVQPKTQGSRRSSRQIKKRRVISDSESDIGGSDVEFKPDTKEEGSSDEISSGVGDSESEGLNSPVKVARKRKRMVTGNGSLKRKSSRKETPSATKQATSISSETKNTLRAFSAPQNSESQAHVSGGGDDSSRPTVWYHETLEWLKEEKRRDEHRRRPDHPDFDASTLYVPEDFLNSCTPGMRKWWQIKSQNFDLVICYKVGKFYELYHMDALIGVSELGLVFMKGNWAHSGFPEIAFGRYSDSLVQKGYKVARVEQTETPEMMEARCRKMAHISKYDRVVRREICRIITKGTQTYSVLEGDPSENYSKYLLSLKEKEEDSSGHTRAYGVCFVDTSLGKFFIGQFSDDRHCSRFRTLVAHYPPVQVLFEKGNLSKETKTILKSSLSCSLQEGLIPGSQFWDASKTLRTLLEEEYFREKLSDGIGVMLPQVLKGMTSESDSIGLTPGEKSELALSALGGCVFYLKKCLIDQELLSMANFEEYIPLDSDTVSTTRSGAIFTKAYQRMVLDAVTLNNLEIFLNGTNGSTEGTLLERVDTCHTPFGKRLLKQWLCAPLCNHYAINDRLDAIEDLMVVPDKISEVVELLKKLPDLERLLSKIHNVGSPLKSQNHPDSRAIMYEETTYSKKKIIDFLSALEGFKVMCKIIGIMEEVADGFKSKILKQVISLQTKNPEGRFPDLTVELNRWDTAFDHEKARKTGLITPKAGFDSDYDQALADIRENEQSLLEYLEKQRNRIGCRTIVYWGIGRNRYQLEIPENFTTRNLPEEYELKSTKKGCKRYWTKTIEKKLANLINAEERRDVSLKDCMRRLFYNFDKNYKDWQSAVECIAVLDVLLCLANYSRGGDGPMCRPVILLPEDTPPFLELKGSRHPCITKTFFGDDFIPNDILIGCEEEEQENGKAYCVLVTGPNMGGKSTLMRQAGLLAVMAQMGCYVPAEVCRLTPIDRVFTRLGASDRIMSGESTFFVELSETASILMHATAHSLVLVDELGRGTATFDGTAIANAVVKELAETIKCRTLFSTHYHSLVEDYSQNVAVRLGHMACMVENECEDPSQETITFLYKFIKGACPKSYGFNAARLANLPEEVIQKGHRKAREFEKMNQSLRLFREVCLASERSTVDAEAVHKLLTLIKEL

SEQ ID NO: 757 - DNA, 1449 bp, Homo sapien
ctggatagaacagctcaagccttgccacttcgggcttctcactgcagctgggcttggacttcggagttttgccattgccagtgggacgtctgagactttctccttcaagtacttggcagatcactctcttagcagggtctgcgcttcgcagccgggatgaagctggtttccgtcgccctgatgtacctgggttcgctcgccttcctaggcgctgacaccgctcggttggatgtcgcgtcggagtttcgaaagaagtggaataagtgggctctgagtcgtgggaagagggaactgcggatgtccagcagctaccccaccgggctcgctgacgtgaaggccgggcctgcccagacccttattcggccccaggacatgaagggtgcctctcgaagccccgaagacagcagtccggatgccgcccgcatccgagtcaagcgctaccgccagagcatgaacaacttccagggcctccggagctttggctgccgcttcgggacgtgcacggtgcagaagctggcacaccagatctaccagttcacagataaggacaaggacaacgtcgcccccaggagcaagatcagcccccagggctacggccgccggcgccggcgctccctgcccgaggccggcccgggtcggactctggtgtcttctaagccacaagcacacggggctccagcccccccgagtggaagtgctccccactttctttaggatttaggcgcccatggtacaaggaatagtcgcgcaagcatcccgctggtgcctcccgggacgaaggacttcccgagcggtgtggggaccgggctctgacagccctgcggagaccctgagtccgggaggcaccgtccggcggcgagctctggctttgcaagggcccctccttctgggggcttcgcttccttagccttgctcaggtgcaagtgccccagggggcggggtgcagaagaatccgagtgtttgccaggcttaaggagaggagaaactgagaaatgaatgctgagacccccggagcaggggtctgagccacagccgtgctcgcccacaaactgatttctcacggcgtgtcaccccaccagggcgcaagcctcactattacttgaactttccaaaacctaaagaggaaaagtgcaatgcgtgttgtacatacagaggtaactatcaatatttaagtttgttgctgtcaagattttttttgtaacttcaaatatagagatatttttgtacgttatatattgtattaagggcattttaaaagcaattatattgtcctcccctattttaagacgtgaatgtctcagcgaggtgtaaagttgttcgccgcgtggaatgtgagtgtgtttgtgtgcatgaaagagaaagactgattacctcctgtgtggaagaaggaaacaccgagtctctgtataatctatttacataaaatgggtgatatgcgaacagcaaacc

SEQ ID NO: 758 - protein, 185 aa, Homo sapien
MKLVSVALMYLGSLAFLGADTARLDVASEFRKKWNKWALSRGKRELRMSSSYPTGLADVKAGPAQTLIRPQDMKGASRSPEDSSPDAARIRVKRYRQSMNNFQGLRSFGCRFGTCTVQKLAHQIYQFTDKDKDNVAPRSKISPQGYGRRRRRSLPEAGPGRTLVSSKPQAHGAPAPPSGSAPHFL

SEQ ID NO: 759 - DNA, 5789 bp, Homo sapien
ggcgggccgcggccccgcgagccgtgagcgatgatttggcgttgcggccacggcggcagggcggtccgtggggcgcacacaccctccccgcgcagccaatgggcgtgcgcacgtcactgatccggaggcccgcgggccggcagcccctcaataagccacattgttgcatgaaactccggcgcaggagtcccgggctgccgctggcaacatcgtgtcacccagctaagaaaatccgcgggcccgagccacgcgcctgtgaatcggagaggtcccactgcccgagtggagccgggctgagattcttctcaagttgagcctcagtgatcctgtggccgaagttagcgccttgacgtgggacaaccggacacgtcgccaggagagaactgaggcgccttctagcagttgtgacgccaaaatcacgtctccggagacccgcgccctccgccagccgggcgcaccctcgccggtagccttctttgtgcgccgtccggactcccagctcccggcccggcagccgagccccagcacaaagcagtcggaccgcgccgcccgcctcccctctcgcgtctccgcctcggtttcccaactctgcgccgtcgggccgcggcaggatgattgcctcgcatctgcttgcctacttcttcacggagctcaaccatgaccaagtgcagaaggttgaccagtatctctaccacatgcgcctctctgatgagaccctcttggagatctctaagcggttccgcaaggagatggagaaagggcttggagccaccactcaccctactgcagcagtgaagatgctgcccacctttgtgaggtccactccagatgggacagaacacggagagttcctggctctggatcttggagggaccaacttccgtgtgctttgggtgaaagtaacggacaatgggctccagaaggtggagatggagaatcagatctatgccatccctgaggacatcatgcgaggcagtggcacccagctgtttgaccacattgccgaatgcctggctaacttcatggataagctacaaatcaaagacaagaagctcccactgggttttaccttctcgttcccctgccaccagactaaactagacgagagtttcctggtctcatggaccaagggattcaagtccagtggagtggaaggcagagacgttgtggctctgatccggaaggccatccagaggagaggggactttgatatcgacattgtggctgtggtgaatgacacagttgggaccatgatgacctgtggttatgatgaccacaactgtgagattggtctcattgtgggcacggggcagcaacgcctgctacatggaagagatgcgccacatcgacatggtggaaggcgatgaggggcggatgtgtatcaatatggagtggggggccttcggggacgatggctcgctcaacgacattcgcactgagtttgaccaggagattgacatgggctcactgaacccgggaaagcaactgtttgagaagatgatcagtgggatgtacatgggggagctggtgaggcttatcctggtgaagatggccaaggaggagctgctctttggggggaagctcagcccagagcttctcaacaccggtcgctttgagaccaaagacatctcagacattgaaggggagaaggatggcatccggaaggcccgtgaggtcctgatgcggttgggcctggacccgactcaggaggactgcgtggccactcaccggatctgccagatcgtgtccacacgctccgccagcctgtgcgcagccaccctggccgccgtgctgcagcgcatcaaggagaacaaaggcgaggagcggctgcgctctactattggggtcgacggttccgtctacaagaaacacccccattttgccaagcgtctacataagaccgtgcggcggctggtgcccggctgcgatgtccgcttcctccgctccgaggatggcagtggcaaaggtgcagccatggtgacagcagtggcttaccggctggccgatcaacaccgtgcccgccagaagacattagagcatctgcagctgagccatgaccagctgctggaggtcaagaggaggatgaaggtagaaatggagcgaggtctgagcaaggagactcatgccagtgcccccgtcaagatgctgcccacctacgtgtgtgctaccccggacggcacagagaaaggggacttcttggccttggaccttggaggaacaaatttccgggtcctgctggtccgtgttcggaatgggaagtggggtggagtggagatgcacaacaagatctacgccatcccgcaggaggtcatgcacggcaccggggacgagctctttgaccacattgtccagtgcatcgcggacttcctcgagtacatgggcatgaagggcgtgtccctgcctctgggttttaccttctccttcccctgccagcagaacagcctggacgagagcatcctcctcaagtggacaaaaggcttcaaggcatctggctgcgagggcgaggacgtggtgaccctgctgaaggaagcgatccaccggcgagaggagtttgacctggatgtggttgctgtggtgaacgacacagtcggaactatgatgacctgtggctttgaagaccctcactgtgaagttggcctcattgttggcacgggcagcaatgcctgctacatggaggagatgcgcaacgtggaactggtggaaggagaagaggggcggatgtgtgtgaacatggaatggggggccttcggggacaatggatgcctagatgacttccgcacagaatttgatgtggctgtggatgagctttcactcaacccgggcaagcagaggttcgagaaaatgatcagtggaatgtacctgggtgagattgtccgtaacattctcatcgatttcaccaagcgtggactgctcttccgaggccgcatctcagagcggctcaagacaaggggcatctttgaaaccaagttcttgtctcagattgagagtgactgcctggccctgctgcaagtccgagccatcctgcaacacttagggcttgagagcacctgtgacgacagcatcattgttaaggaggtgtgcactgtggtggcccggcgggcagcccagctctgtggcgcaggcatggccgctgtggtggacaggatacgagaaaaccgtgggctggacgctctcaaagtgacagtgggtgtggatgggaccctctacaagctacatcctcactttgccaaagtcatgcatgagacagtgaaggacctggctccgaaatgtgatgtgtctttcctgcagtcagaggatggcagcgggaagggggcggcgctcatcactgctgtggcctgccgcatccgtgaggctggacagcgatagaacccctgaaatcggaagggacttcctctttctctccttcttccctgttttaaattataagatgtcatccccttgtgtcagagacagaccccttggcttttgcttggcagagaggaccccactggactgggttttgtctctgcatctcattgtagagcttggtggctgagcttggccctattaagataaatagagttccaaataaggatttgttcacatgcatcataaccattcccattggttctcctaaaacatgaaaattatctcccttagtaatcccccttgccaaattccatgtccctgtataattctacaggatggggacactaatgaagatacggttgcttcaccttggagcctgaacatgacatttctaagtggggtgcatcccccagcactgatgttgttactgattctcctgtcagagatctgggaggtctccactgaggatgtgagcctgattatcctataggcagacgtggggagggtggaggggtgacagtggaggaaaatccatggatatccacgcagcagcccctctttaacctcatctacaagcatttgccctgtggattccagcatttgccattcctggaatcaaggaatcctgagtctgggcaatgaaaccaaagccaggagttgacgcatcctgcagttgggccagctgtcgcatctcagcggggcgcacatgttatccacaagcaatggacctttggggaagggggagtttttagtttgttttacaaatttttcctgcaaaagtggaatcactgtattttcattttaatttatatttgaaattttatttagttcttgagtagatctgcttcttcatcttgacatgtaatgaatggtcagttgtacgtaatgtatttatatgttaatttgttatgtatatagatgtgcaagtcttgtcagaattggcctcagtgtagttaaagggcagaaggggaagatactgactagtcatagaaatacctcattcgcctgtgggaagagaagggaagcctcttcagggtgagtgaatggcaaagcggttgcttctggctcctccttcccctgtggtcttggaagtgtgtggaaggcagggacagagatggaggccgagccaatagactgaagagaccacagcaattggctcctccatctagagattttcttggcagtattccatgggatgttaagcaaaggaaaccaaaggaatcgtttcaaatggactcatggcttagaaatctttattcttagggcagtcagtagtattctaaagctttctgacaagataaaggaagtcaccaaaatttctttttttaaattgtatctaatcctcaacaacaaaccaaaacagaacaattaaacagccaaataaaacctcagggacaacatttttggtgtatttgagccctcccagcaagtttcaccttgggtttgtattttaaatgttttacaagaattgtccatgtgcttccctaggctgagctggcattggtctgctgacctgtttttgtgtttttcttttttttatacacaacatttatttcaaactattgggagggatgagagtggcttaaaaacttccatccctacttttcaagagtgcagttgattctgaatctgaaagcccgcctctgtcctaaaatacaaacaagcacagacattaaacctggatactatatgataaagagggatgtaactattgaattggatacaaggatcagaatggaaagaaactcacgatgaaattgaacctggtttttgtatatttatcaaacttgtgctgagaatagtgtctgattatacgacttttaagcaaagttgggtgtaattaggtgaaaacagcccaggtcctcccgggagcacagaggggctaggggctggtccttctcgtttgctctagtcttgctttgctgtctggtgtagctcctctgctgctcccatctgcactaattgacccaaaacgtgggtatttcctgctacacaaaagccaaaaggtttcatgtagattttagttcactaaagggtgcccacaaaatagagattaattttaacttaaattttaagcttgaagattaggtactatctgtgaagttacactttttttttttaaaggtagagatgtgtgtgtgtgtaggtattaaagatgtgttgttggtttccaaaaaggaacactggaaaataaattttgaatgtttatgttctcagaatcaggttgacagtcccttgctgacatggctttgctttgtgtaaatacagtggatctcaatcttcggggtgtgatgaatagcgaatcatctcaaatccttgagcactcagtctagtgaagatgttgtcattatgtacaatacataactagtttaattaactatgtgatgttaactattattaataaattttaacattttccaaaataaaaaataaagtcgacg

SEQ ID NO: 760 - protein, 698 aa, Homo sapien
MTTTVRLVSLWARGSNACYMEEMRHIDMVEGDEGRMCINMEWGAFGDDGSLNDIRTEFDQEIDMGSLNPGKQLFEKMISGMYMGELVRLILVKMAKEELLFGGKLSPELLNTGRFETKDISDIEGEKDGIRKAREVLMRLGLDPTQEDCVATHRICQIVSTRSASLCAATLAAVLQRIKENKGEERLRSTIGVDGSVYKKHPHFAKRLHKTVRRLVPGCDVRFLRSEDGSGKGAAMVTAVAYRLADQHRARQKTLEHLQLSHDQLLEVKRRMKVEMERGLSKETHASAPVKMLPTYVCATPDGTEKGDFLALDLGGTNFRVLLVRVRNGKWGGVEMHNKIYAIPQEVMHGTGDELFDHIVQCIADFLEYMGMKGVSLPLGFTFSFPCQQNSLDESILLKWTKGFKASGCEGEDVVTLLKEAIHRREEFDLDVVAVVNDTVGTMMTCGFEDPHCEVGLIVGTGSNACYMEEMRNVELVEGEEGRMCVNMEWGAFGDNGCLDDFRTEFDVAVDELSLNPGKQRFEKMISGMYLGEIVRNILIDFTKRGLLFRGRISERLKTRGIFETKFLSQIESDCLALLQVRAILQHLGLESTCDDSIIVKEVCTVVARRAAQLCGAGMAAVVDRIRENRGLDALKVTVGVDGTLYKLHPHFAKVMHETVKDLAPKCDVSFLQSEDGSGKGAALITAVACRIREAGQR

SEQ ID NO: 761 - DNA, 1191 bp, Homo sapien
atggtggcgcgcaggaggaagtgcgccgcgcgggacccggaggaccgtatccccagcccactgggctacgcagctattccaatcaagttctctgaaaagcaacaggcttctcactacctctatgtgagagcacacggcgttcgacaaggcaccaagtccacctggcctcagaagaggactctttttgtcctcaatgtgcccccatactgcacagaggagagcctgtcccgcctcctgtccacctgtggcctcgtccagtctgtagagttgcaggagaagccggacctggctgagagcccaaaggagtcaaggtcgaagttttttcatcccaagccagttccgggtttccaggtagcctatgtggtgttccagaagccaagtggggtgtcagcggccttggccctgaagggccccctgctggtgtccacagagagccaccctgtgaagagtggcattcacaagtggatcagtgactacgcagactctgtgcccgaccctgaggccctgagggtggaagtggacacgttcatggaggcatatgaccagaagatcgctgaggaagaagctaaggccaaggaggaggagggggtccctgacgaggagggctgggtgaaggtgacccgccggggccggcggcctgtgctcccccggactgaggcagccagcttgcgggtgctggagagggagagacggaagcgcagccgaaaagagctgctcaacttctacgcctggcagcatcgagagagcaagatggagcatctagcgcagctgcgcaagaagttcgaggaggacaagcagaggatcgagctgctgcgggcccagcgcaaattccgaccgtactgagctgtgagagccgcagtgaatggctggaggtgcagggccaggaggaggcgaggcagggcctgcagcggtctctgagaggccgagctctggccaacgggccccaggttgaaggccaccgcgtccaacagccccatcagagtccacacaggccaggagggaaggaccaggccacccctcgggtcttgtgcttcagcagtcctggggacccaggcgtgccgagaggaggacttgtccttcctgcttcttgcctccacaccctcctctccaggaccctggatgaatccgttctgtgcttccttttccctcaatgcaaaagcccttgctggcaacgaaaaagcctcaaaagca

SEQ ID NO: 762 - protein, 280 aa, Homo sapien
MVARRRKCAARDPEDRIPSPLGYAAIPIKFSEKQQASHYLYVRAHGVRQGTKSTWPQKRTLFVLNVPPYCTEESLSRLLSTCGLVQSVELQEKPDLAESPKESRSKFFHPKPVPGFQVAYVVFQKPSGVSAALALKGPLLVSTESHPVKSGIHKWISDYADSVPDPEALRVEVDTFMEAYDQKIAEEEAKAKEEEGVPDEEGWVKVTRRGRRPVLPRTEAASLRVLERERRKRSRKELLNFYAWQHRESKMEHLAQLRKKFEEDKQRIELLRAQRKFRPY

SEQ ID NO: 763 - DNA, 827 bp, Homo sapien
ggaacagtgtggcccgccatgttcttctccgcggcgctccgggcccgggcggctggcctcaccgcccactggggaagacatgtaaggaatttgcataagacagctatgcaaaatggagctggaggagctttatttgtgcacagagatactcctgagaataaccctgatactccatttgatttcacaccagaaaactataagaggatagaggcaattgtaaaaaactatccagaaggccataaagcagcagctgttcttccagtcctggatttagcccaaaggcagaatgggtggttgcccatctctgctatgaacaaggttgcagaagttttacaagtacctccaatgagagtatatgaagtagcaactttttatacaatgtataatcgaaagccagttggaaagtatcacattcaggtctgcactactacaccctgcatgcttcgaaactctgacagcatactggaggccattcagaaaaagcttggaataaaggttggggagactacacctgacaaacttttcactcttatagaagtggaatgtttaggggcctgtgtgaacgcaccaatggttcaaataaatgacaattactatgaggatttgacagctaaggatattgaagaaattattgatgagctcaaggctggcaaaatcccaaaaccagggccaaggagtggacgcttctcttgtgagccagctggaggtcttacctctttgactgaaccacccaagggacctggatttggtgtacaagcaggcctttaatttatattgaactgtaaatatgtcactagagaaataaaatatggacttccaatctacgt

SEQ ID NO: 764 - protein, 249 aa, Homo sapien
MFFSAALRARAAGLTAHWGRHVRNLHKTAMQNGAGGALFVHRDTPENNPDTPFDFTPENYKRIEAIVKNYPEGHKAAAVLPVLDLAQRQNGWLPISAMNKVAEVLQVPPMRVYEVATFYTMYNRKPVGKYHIQVCTTTPCMLRNSDSILEAIQKKLGIKVGETTPDKLFTLIEVECLGACVNAPMVQINDNYYEDLTAKDIEEIIDELKAGKIPKPGPRSGRFSCEPAGGLTSLTEPPKGPGFGVQAGL

SEQ ID NO: 765 - DNA, 852 bp, Homo sapien
caccctgtaagtggctgcggcgggaagatggcggagctgcgcgtgctcgtagctgtcaagagggtcatcgactacgccgtgaagatccgagtgaagcctgacaggaccggtgtggtcacggatggtgtgaagcactccatgaaccccttctgtgagatcgcggtggaggaggctgtgcggctcaaggagaagaagctggtgaaggaggtcatcgccgtcagctgtgggcctgcacagtgccaggagacgattcgtaccgccctggccatgggtgcagaccgaggtatccacgtggaggtgcccccagcagaagcagaacgcttgggtcccctgcaggtggctcgggtcctggccaagctggcagagaaggagaaggtggacctggtgctgctgggcaaacaggccatcgatgatgactgtaaccagacagggcagatgacagctggatttcttgactggccacagggcacattcgcctcccaggtgacgctggagggggacaagttgaaagtggagcgggagatcgatgggggcctggagaccctgcgcctgaagctgccagctgtggtgacagctgacctgaggctcaacgagccccgctacgccacgctgcccaacatcatgaaagccaagaagaagaagatcgaggtgatcaagcctggggacctgggtgtggacctgacctccaagctctctgtgatcagtgtggaggacccgccccagcgcacggccggcgtcaaggtggagaccactgaggacctggtggccaagctgaaggagattgggcggatttgagcccctcccagagatggcaataaaactgactctcaacatcaaaaaaaaaaaaaaaaa

SEQ ID NO: 766 - protein, 255 aa, Homo sapien
MAELRVLVAVKRVIDYAVKIRVKPDRTGVVTDGVKHSMNPFCEIAVEEAVRLKEKKLVKEVIAVSCGPAQCQETIRTALAMGADRGIHVEVPPAEAERLGPLQVARVLAKLAEKEKVDLVLLGKQAIDDDCNQTGQMTAGFLDWPQGTFASQVTLEGDKLKVEREIDGGLETLRLKLPAVVTADLRLNEPRYATLPNIMKAKKKKIEVIKPGDLGVDLTSKLSVISVEDPPQRTAGVKVETTEDLVAKLKEIGRI

SEQ ID NO: 767 - DNA, 783 bp, Homo sapien
ggcacgagcgagttcctgtctctctgccaacgccgcccggatggcttcccaaaaccgcgacccagccgccactagcgtcgccgccgcccgtaaaggagctgagccgagcgggggcgccgcccggggtccggtgggcaaaaggctacagcaggagctgatgaccctcatgatgtctggcgataaagggatttctgccttccctgaatcagacaaccttttcaaatgggtagggaccatccatggagcagctggaacagtatatgaagacctgaggtataagctctcgctagagttccccagtggctacccttacaatgcgcccacagtgaagttcctcacgccctgctatcaccccaacgtggacacccagggtaacatatgcctggacatcctgaaggaaaagtggtctgccctgtatgatgtcaggaccattctgctctccatccagagccttctaggagaacccaacattgatagtcccttgaacacacatgctgccgagctctggaaaaaccccacagcttttaagaagtacctgcaagaaacctactcaaagcaggtcaccagccaggagccctgacccaggctgcccagcctgtccttgtgtcgtctttttaatttttccttagatggtctgtcctttttgtgatttctgtataggactctttatcttgagctgtggtatttttgttttgtttttgtcttttaaattaagcctcggttgagcccttgtatattaaataaatgcatttttgtccttttttaaaaaaaaaaaaaaaaaaa

SEQ ID NO: 768 - protein, 179 aa, Homo sapien
MASQNRDPAATSVAAARKGAEPSGGAARGPVGKRLQQELMTLMMSGDKGISAFPESDNLFKWVGTIHGAAGTVYEDLRYKLSLEFPSGYPYNAPTVKFLTPCYHPNVDTQGNICLDILKEKWSALYDVRTILLSIQSLLGEPNIDSPLNTHAAELWKNPTAFKKYLQETYSKQVTSQEP

SEQ ID NO: 769 - DNA, 1227 bp, Homo sapien
gggagttagacaaaatgccaggaatgttcttctctgctaacccaaaggaattgaaaggaaccactcattcacttctagacgacaaaatgcaaaaaaggaggccaaagacttttggaatggatatgaaagcatacctgagatctatgatcccacatctggaatctggaatgaaatcttccaagtccaaggatgtactttctgctgctgaagtaatgcaatggtctcaatctctggaaaaacttcttgccaaccaaactggtcaaaatgtctttggaagtttcctaaagtctgaattcagtgaggagaatattgagttctggctggcttgtgaagactataagaaaacagagtctgatcttttgccctgtaaagcagaagagatatataaagcatttgtgcattcagatgctgctaaacaaatcaatattgacttccgcactcgagaatctacagccaagaagattaaagcaccaacccccacgtgttttgatgaagcacaaaaagtcatatatactcttatggaaaaggactcttatcccaggttcctcaaatcacatatttacttaaatcttctaaatgacctgcaggctaatagcctaaagtgactggtccctggctgaagggaattaacagatagtatcagcgcagaaggaatgtgccagtatggatccctgggtgaacagcttggccttttttgggtgtcttgacaggccaagaagaacaaatgactcagaaccggattaacatgaaagttatccaggcgcagagttgaagaagcataagcaagcaagacaaaaacagagagaccgcaaggaggaagatctgtggtactgtcataaaaaacagtggagctctgtattagaaaagcccctcagaactgggaaggccaggtaactctagttacacagaaactggtactaaagtctatcaaactgattacacagactgtaagaattcaaagtcaactgacatctatgctacatatattatatagtttgtacttgactatgagccattaacttaaagcatatgtttcaaatagccattgctactattccttgtccggtgtaattttattttattgtttttactttggaagagatgaactgtgtatttaacttaagctattgctcttaaaaccagggagtcagatatatttgtaaggttaaatcattggtgcaataataaatgtggattttgtattaaaatatatatgaagcaaaaaaa

SEQ ID NO: 770 - protein, 196 aa, Homo sapien
MPGMFFSANPKELKGTTHSLLDDKMQKRRPKTFGMDMKAYLRSMIPHLESGMKSSKSKDVLSAAEVMQWSQSLEKLLANQTGQNVFGSFLKSEFSEENIEFWLACEDYKKTESDLLPCKAEEIYKAFVHSDAAKQINIDFRTRESTAKKIKAPTPTCFDEAQKVIYTLMEKDSYPRFLKSHIYLNLLNDLQANSLK

SEQ ID NO: 771 - DNA, 1280 bp, Homo sapien
gcggccgccgtggccaggcaacctatgggtaccaccgggttctcgcgggtcttgcgaacgaacttttccttgaaactctctggattcctgtaaacagtggggctcagcccctcaatgactggaggcttcgatggttcaaaggggacctccggaatcacagggccgggagtcgccatgtccgggccacagcagcaggagaaaatcgggactccgacctcagcctcccggtgaaggtcatgaaaggggcggggaaacgaataaattgagccttgtacgcaggcgcaaatgctcgttgcatcctgggagtcgtagtgctcagcacggtagtgctacaaaaggactacatttccccaaatgcccgcaaagccttgtgcacgccttccggaaggagtttgttacacgaggtctgagagacagaggcagcgtgtttgagctgctggtgcggtggtcagcgcgatgcccaaggccaagggcaaaacccggaggcagaagtttggttacagtgtcaaccgaaagcgtctgaaccggaatgctcgacggaaggcagcgcgcggaatcgaatgctcccacatccgacatgcctgggaccacgctaaatcggtacggcagaacctggccgagatggggttggctgtggaccccaacagggcggtgcccctccgtaagagaaaggtgaaggccatggaggtggacatagaggagaggcctaaagagcttgtacggaagccctatgtgctgaatgacctggaggcagaagccagccttccagaaaagaaaggaaatactctgtctcgggacctcattgactatgtacgctacatggtagagaaccacggggaggactataaggccatggcccgtgatgagaagaattactatcaagataccccaaaacagattcggagtaagatcaacgtctataaacgcttttacccagcagagtggcaagacttcctcgattctttgcagaagaggaagatggaggtggagtaactggtttacatcacagctgccccaggctgaggcgtcccccggaccagtgaagctggagccagggtgtaaggcaaggaggtgctgtgtggctccagaggggctggccaggtcccatggaatcagaaggttacacacacacgtgcacactccccgctctggggaaggaactgttctcagaggctccaatttatattcatctgggggttcacggaaaagccagaacctgctgttttcagggtgggtgatgtaaatatagtgtgtacataataaagcaaatatattttaaa

SEQ ID NO: 772 - protein, 178 aa, Homo sapien
MPKAKGKTRRQKFGYSVNRKRLNRNARRKAARGIECSHIRHAWDHAKSVRQNLAEMGLAVDPNRAVPLRKRKVKAMEVDIEERPKELVRKPYVLNDLEAEASLPEKKGNTLSRDLIDYVRYMVENHGEDYKAMARDEKNYYQDTPKQIRSKINVYKRFYPAEWQDFLDSLQKRKMEVE

SEQ ID NO: 773 - DNA, 687 bp, Homo sapien
gcagtgtcccagccgggttcgtgtcgccatggggcagatcgagtgggccatgtgggccaacgagcaggcgctggcgtccggcctgatcctcatcaccgggggcatcgtggccacagctgggcgcttcacccagtggtactttggtgcctactccattgtggcgggcgtgtttgtgtgcctgctggagtacccccgggggaagaggaagaagggctccaccatggagcgctggggacagaagcacatgaccgccgtggtgaagctgttcgggccctttaccaggaattactatgttcgggccgtcctgcatctcctgctctcggtgcccgccggcttcctgctggccaccatccttgggaccgcctgcctggccattgcgagcggcatctacctactggcggctgtgcgtggcgagcagtggacgcccatcgagcccaagccccgggagcggccgcagatcggaggcaccatcaagcagccgcccagcaaccccccgccgcggcccccggccgaggcccgcaagaagcccagcgaggaggaggctgcggcggcggcggggggacccccgggaggtccccaggtcaaccccatcccggtgaccgacgaggtcgtgtgacctcgccccggacctgccctcccaccaggtgcacccacctgcaataaacgcagcgaaggccgggaaaaaaa

SEQ ID NO: 774 - protein, 195 aa, Homo sapien
MGQIEWAMWANEQALASGLILITGGIVATAGRFTQWYFGAYSIVAGVFVCLLEYPRGKRKKGSTMERWGQKHMTAVVKLFGPFTRNYYVRAVLHLLLSVPAGFLLATILGTACLAIASGIYLLAAVRGEQWTPIEPKPRERPQIGGTIKQPPSNPPPRPPAEARKKPSEEEAAAAAGGPPGGPQVNPIPVTDEVV

SEQ ID NO: 775 - DNA, 4719 bp, Homo sapien
aaccggctgcggggatggggccaccgctcccgctgctgctgctgctactgctgctgctgccgccacgcgtcctgcctgccgccccttcgtccgtcccccgcggccggcagctcccggggcgtctgggctgcctgctcgaggagggcctctgcggagcgtccgaggcctgtgtgaacgatggagtgtttggaaggtgccagaaggttccggcaatggacttttaccgctacgaggtgtcgcccgtggccctgcagcgcctgcgcgtggcgttgcagaagctttccggcacaggtttcacgtggcaggatgactatactcagtatgtgatggaccaggaacttgcagacctcccgaaaacctacctgaggcgtcctgaagcatccagcccagccaggccctcaaaacacagcgttggcagcgagaggaggtacagtcgggagggcggtgctgccctggccaacgccctccgacgccacctgcccttcctggaggccctgtcccaggccccagcctcagacgtgctcgccaggacccatacggcgcaggacagaccccccgctgagggtgatgaccgcttctccgagagcatcctgacctatgtggcccacacgtctgcgctgacgtaccctcccgggccccggacccagctccgggaggacctcctgccgcggaccctcggccagctccagccagatgagctcagccctaaggtggacagtggtgtggacagacaccatctgatggcggccctcagtgcctatgctgcccagaggcccccagctccccccggggagggcagcctggagccacagtaccttctgcgtgcaccctcaagaatgcccaggcctttgctggcaccagccgccccccagaagtggccttcacctctgggagattccgaagacccctccagcacaggcgatggagcacggattcataccctcctgaaggacctgcagaggcagccggctgaggtgaggggcctgagtggcctggagctggacggcatggctgagctgatggctggcctgatgcaaggcgtggaccatggagtagctcgaggcagccctgggagagcggccctgggagagtctggagaacaggcggatggccccaaggccaccctccgtggagacagctttccagatgacggagtgcaggacgacgatgatagactttaccaagaggtccaccgtctgagtgccacactcgggggcctcctgcaggaccacgggtctcgactcttacctggagccctcccctttgcaaggcccctcgacatggagaggaagaagtccgagcaccctgagtcttccctgtcttcagaagaggagactgccggagtggagaacgtcaagagccagacgtattccaaagatctgctggggcagcagccgcattcggagcccggggccgctgcgtttggggagctccaaaaccagatgcctgggccctcgaaggaggagcagagccttccagcgggtgctcaggaggccctcagcgacggcctgcaattggaggtccagccttccgaggaagaggcgcggggctacatcgtgacagacagagaccccctgcgccccgaggaaggaaggcggctggtggaggacgtcgcccgcctcctgcaggtgcccagcagtgcgttcgctgacgtggaggttctcggaccagcagtgaccttcaaagtgagcgccaatgtccaaaacgtgaccactgaggatgtggagaaggccacagttgacaacaaagacaaactggaggaaacctctggactgaaaattcttcaaaccggagtcgggtcgaaaagcaaactcaagttcctgcctcctcaggcggagcaagaagactccaccaagttcatcgcgctcaccctggtctccctcgcctgcatcctgggcgtcctcctggcctctggcctcatctactgcctccgccatagctctcagcacaggctgaaggagaagctctcgggactagggggcgacccaggtgcagatgccactgccgcctaccaggagctgtgccgccagcgtatggccacgcggccaccagaccgacctgagggcccgcacacgtcacgcatcagcagcgtctcatcccagttcagcgacgggccgatccccagcccctccgcacgcagcagcgcctcatcctggtccgaggagcctgtgcagtccaacatggacatctccaccggccacatgatcctgtcctacatggaggaccacctgaagaacaagaaccggctggagaaggagtgggaagcgctgtgcgcctaccaggcggagcccaacagctcgttcgtggcccagagggaggagaacgtgcccaagaaccgctccctggctgtgctgacctatgaccactcccgggtcctgctgaaggcggagaacagccacagccactcagactacatcaacgctagccccatcatggatcacgacccgaggaaccccgcgtacatcgccacccagggaccgctgcccgccaccgtggctgacttttggcagatggtgtgggagagcggctgcgtggtgatcgtcatgctgacacccctcgcggagaacggcgtccggcagtgctaccactactggccggatgaaggctccaatctctaccacatctatgaggtgaacctggtctccgagcacatctggtgtgaggacttcctggtgaggagcttctatctgaagaacctgcagaccaacgagacgcgcaccgtgacgcagttccacttcctgagttggtatgaccgaggagtcccttcctcctcaaggtccctcctggacttccgcagaaaagtaaacaaatgctacaggggccgttcttgtccgataattgttcattgcagtgacggtgcaggccggagcggcacctacgtcctgatcgacatggttctcaacaagatggccaaaggtgctaaagagattgatatcgcagcgaccctggagcacttgagggaccagagacccggcatggtccagacgaaggagcagtttgagttcgcgctgacagccgtggctgaggaggtgaacgccatcctcaaggcccttccccagtgagcggcagcgtcaggggcctcaggggagcccccaccccacggatgttgtcaggaatcatgatctgactttaattgtgtgtcttctattataactgcatagtaatagggcccttagctctcccgtagtcagcgcagtttagcagttaaaagtgtatttttgtttaatcaaacaataataaagagagatttgtggaaaaatccagttacgggtggaggggaatcggttcatcaattttcacttgcttaaaaaaaatactttttcttaaagcacccgttcaccttcttggttgaagttgtgttaacaatgcagtagccagcacgttcgaggcggtttccaggaagagtgtgcttgtcatctgccactttcgggagggtggatccactgtgcaggagtggccggggaagctggcagcactcagtgaggccgcccggcacacaaggcacgtttggcatttctctttgagagagtttatcattgggagaagccgcggggacagaactgaacgtcctgcagcttcggggcaagtgagacaatcacagctcctcgctgcgtctccatcaacactgcgccgggtaccatggacggccccgtcagccacaccggtcagcccaagcagagtgattcaggggctccccgggggcagacacctgtgcaccccatgagtagtgcccacttgaggctggcactcccctgacctcacctttgcaaagttacagatgcaccccaacattgagatgtgtttttaatgttaaaatattgatttctacgttatgaaaacagatgcccccgtgaatgcttacctgtgagataaccacaaccaggaagaacaaatctgggcattgagcaagctatgagggtccccgggagcacacgaaccctgccaggcccccgctggctcctccaggcacgtcccggacctgtggggccccagagaggggacatttccctcctgggagagaaggagatcagggcaactcggagagggctgcgagcatttccctcccgggagaggaaatcagggcgacctgcacgcactgcgtagagcctggaagggaagtgagaaaccagccgaccggccctgcccctcttcccgggatcacttaatgaaccacgtgttttgacatcatgttaacctaagcacgtacagatgattccggatttgacaaaataacatttgagtatccgattcgccatcacccctacccccgaaataggacaactcacttcattgaccaggatgatcacatggaaggcggcgcagaggcagctgtgtgggctgcagatttcctgtgtggggttcagcgtataaaacgcacctccatcccgcccttcccacagcattcctccatcttagatagatggtactctccaaaggccctaccagagggaacacggcctactgagcggacagaatgatgccaaaatattgcttatgtctctacatggtattgtaatgaatatctgctttaatatagctatcatttcttttccaaaattacttctctttatctggaatttaattaatcgaaatgaatttatctgaatataggaagcatatgcctacttgtaatttctaactacttatgtttgaagagaaacctccggtgtgagatatacaaatatatttaattgtgtcatattaaacttcccggaattc

SEQ ID NO: 776 - protein, 1015 aa, Homo sapien
MGPPLPLLLLLLLLLPPRVLPAAPSSVPRGRQLPGRLGCLLEEGLCGASEACVNDGVFGRCQKVPAMDFYRYEVSPVALQRLRVALQKLSGTGFTWQDDYTQYVMDQELADLPKTYLRRPEASSPARPSKHSVGSERRYSREGGAALANALRRHLPFLEALSQAPASDVLARTHTAQDRPPAEGDDRFSESILTYVAHTSALTYPPGPRTQLREDLLPRTLGQLQPDELSPKVDSGVDRHHLMAALSAYAAQRPPAPPGEGSLEPQYLLRAPSRMPRPLLAPAAPQKWPSPLGDSEDPSSTGDGARIHTLLKDLQRQPAEVRGLSGLELDGMAELMAGLMQGVDHGVARGSPGRAALGESGEQADGPKATLRGDSFPDDGVQDDDDRLYQEVHRLSATLGGLLQDHGSRLLPGALPFARPLDMERKKSEHPESSLSSEEETAGVENVKSQTYSKDLLGQQPHSEPGAAAFGELQNQMPGPSKEEQSLPAGAQEALSDGLQLEVQPSEEEARGYIVTDRDPLRPEEGRRLVEDVARLLQVPSSAFADVEVLGPAVTFKVSANVQNVTTEDVEKATVDNKDKLEETSGLKILQTGVGSKSKLKFLPPQAEQEDSTKFIALTLVSLACILGVLLASGLIYCLRHSSQHRLKEKLSGLGGDPGADATAAYQELCRQRMATRPPDRPEGPHTSRISSVSSQFSDGPIPSPSARSSASSWSEEPVQSNMDISTGHMILSYMEDHLKNKNRLEKEWEALCAYQAEPNSSFVAQREENVPKNRSLAVLTYDHSRVLLKAENSHSHSDYINASPIMDHDPRNPAYIATQGPLPATVADFWQMVWESGCVVIVMLTPLAENGVRQCYHYWPDEGSNLYHIYEVNLVSEHIWCEDFLVRSFYLKNLQTNETRTVTQFHFLSWYDRGVPSSSRSLLDFRRKVNKCYRGRSCPIIVHCSDGAGRSGTYVLIDMVLNKMAKGAKEIDIAATLEHLRDQRPGMVQTKEQFEFALTAVAEEVNAILKALPQ

SEQ ID NO: 777 - DNA, 4932 bp, Homo sapien
tgcgagcaacagatccggacgccgcgagctgacccgctctgctgttgggcgatttttttttaattgcagaaaaatttattaaattggaaaatcttgcgtttttcaatggcgctggccccgggtcagcgggcgattttctctgcatcaagatgggctttgccgtttccgtagtgggcaccagtggtggcctgattgtcagtcttctcccggcatttttaaggccaggagccgagcgctgcttgtaggcgaataccctacagagcggtttggctttttaaattactgttattattttgggcagagaacagtcggtctggtgcaccccgtcctcgctgcagaagaggctgcgagtccgaggtgggtctctcggaaggtgaaattccttctggggtgagcgagccccggccccgcgcgcagtccagcggccccgcgtgtgtgccctcgccctgccggagccgggaaaatggaggctgtgattgagaaggaatgcagcgcgctcggaggcctcttccagaccatcatcagcgacatgaaggggagctatccagtttgggaagatttcataaacaaagcaggaaagctgcagtcccagcttcggacaacagtagtagcagcagctgccttcttggacgcctttcagaaagtggctgacatggccaccaacacacgtggtgggaccagggagattggatctgctctcaccaggatgtgcatgaggcacagaagcattgaagccaagctgaggcagttttcgagcgctttaattgattgtctgataaacccacttcaagaacagatggaagaatggaagaaagtggccaaccagctggataaagaccacgcaaaagaatataagaaagcccgccaagagataaaaaagaagtcctcggatacgctgaaactgcagaagaaagcaaaaaaagggagaggtgatatccagcctcagttggacagtgctctccaagatgtcaatgataagtatctcttattggaagaaacagaaaagcaggctgtccggaaggctttgattgaagaacgtggccgattctgtaccttcatctctatgctgcggccagtgattgaagaagaaatctcaatgctaggggaaataacccaccttcagaccatctcggaagatctaaaaagcctgaccatggaccctcacaaactgccctcctcaagtgaacaggtgattctggacttgaaaggttctgattacagctggtcgtatcagacgccaccctcttcccccagcaccaccatgtccagaaagtccagtgtctgcagcagcctgaacagtgtcaacagcagtgactcccggtccagcggctcccactcgcattcccccagctcacattaccgctaccgcagctccaacctggcccagcaggctcctgtgaggctgtccagcgtgtcctcccatgactcaggattcatatcccaggatgccttccagtccaagtcaccatcccccatgccgccagaggcccccaaccagttgtctaacgggttttctcactatagtttatcaagtgagtcccacgtggggcccacgggtgcaggccttttccctcattgcctgcctgcctcccgcctgctccctcgggtcacctctgtccaccttccagactacgctcattattacaccattgggcccggcatgttcccgtcatctcagatccctagctggaaggactgggctaagcctgggccctatgaccagcctctggtgaacaccctgcagcgccgcaaagagaagcgagaaccggaccccaacgggggaggacccactaccgccagcggcccacctgcagcagctgaggaggctcagagaccacggagcatgactgtatcggctgccaccaggcctggtgaggagatggaggcttgtgaggagctggccctggccctgtctcggggcctgcagctggacacccagaggagcagccgggactcgcttcagtgctccagcggctacagcacccagacaaccaccccctgctgctctgaggacaccatcccttcccaagtttcagattatgattatttctctgtaagtggtgaccaggaggcagatcagcaggagttcgacaagtcctccaccattccaagaaacagcgacatcagccagtcctaccgacggatgttccaagccaagcgtccagcctcaactgctggcctccccaccaccctgggacctgctatggtcactccaggggttgcaactatccgacggaccccttccaccaagccttctgtccgccggggaaccattggagctggtcccatccccatcaagacacccgtgatccctgtcaagaccccaaccgtcccagacctcccaggggtgatgccagcccctccagatgggccagaagagcggggggagcacagccctgagtcgccatctgtgggtgagggcccccaaggtgtcaccagcatgccctcctcaatgtggagcggccaagcttccgttaaccctccacttccaggcccgaagcccagtatccctgaggagcacagacaggcaattccagaaagtgaagctgaagaccaggaacgggaacccccaagtgccactgtctccccaggccagattccagagagtgaccctgcagacctgagcccaagggatactccacaaggagaagacatgctgaacgccatccgaaggggcgtgaaactgaagaagaccacgacaaacgatcgctcagcccctcgcttttcttaggttcacaagaaatgcgccggtggggaatgaactgtttcattaataaaacctaatttgtcttgatccattccactctataataaaacaaaagattttgtaggcaactcggaatatagctcttttgaaagtactcgacacctttagataagaattaaaaccaacctatgtaactgacataatcttgatcttttaatttgtaaatattgacaattttctttctgcacattttaatcttagtttcccttttgatttttctgaaggtgccaaattccatttaacttttttacaagtctttgtaaaattttaaatgcataaagggggttggggcaggggaaccacgaagtagttaattttagaaaaggatttactatacttcactcttctttttttttccccacaagcttttgtagatgcattgtagtagtctagcttagaagcaaatgcaagttattttaatgtacaaactaaatgggtaagaggtaaaatcttcatttaaatatactatgttctggatgaaaagagcaggagtaacaattgatgagcaatattcagagtgaagtaaatctggaaatggtagactgtgttgggattggggggagggccatgggaggggtacatcgtcaacatagccgatcctgttacatttaagagtagcctcgtaggttgaatttcttctggtagcttcatggtaaatgcatccgaataagccatactggattgcagtgtttgtttctgtagggtgtttaaggacttgacttcctttctcccatgattcctctggactgcacacagcacccacaaccagccccatgcatgctgctgcctctgggcagtcgtagaatctcccacttcagtttctcgttgattgtactcacctttatggaatccaaatacatccaaaagggtaaggcagttttaaaaatgtgaaaacatttaaaaatgataatagcagggaattcttagattatagtaaatgccttttacttaactgtgcccagcaggctgggtgcgttaaaaagcccaagtattttgaaaaaactcgaacagatttgacaagggtagccagcttggagtctagcaacttgccaatgtgtttaccaatctgggggcttgtttttcttttcttctttcaaataaatggcagttaactggctttacagtaaacattgaagagaggaggatttgtttattgtcactgggaatctgaccactatactgtcctttttttgtattctgggtaatgttttttggaaaagatttgtcttttctaagtggaagttaaatttgttatactgcccatcccctaaagccaacagagatttgtagatttaaagggatcacatttgaagacaatagtgtttaagaaagcaagcaagtcccttagcagtcaggtcataacagggcacatttctgaccgaaccctctcaaggcagaggaggagtttggtgggtttcatacaccctgcagattcctgttggctctaaccctcaattacctaatcttatgctttaacacataactgcattggatgtgagagtaacgtaccgtatggtcattgttctatatattaacattgaacactgctgcgattgctcaaggacattttatgttacggctttaaagcaaaggcatgattattagaaactatttaagcttttttctttgaaaaacaagcttcttttacagaatataaacaacagtagtgcctgtggtttagcccaccaatcttgatgactaaaagtagctgatgcattgtgcatatgatgcttgagatggtttttgcaaaagcagaaatcgctgcaaggtaatcacaatagataaaagtggtattttaaacctttgaaataaatggatgtaactgtaccttggtacagcttttcacttgtttagtttttaaacgttagtataatctgaataaataaaatgttgccaaattcaatgtagaaagaatgtgacaacacaccttgggtagttctgcttgtgtttttgcatattgtaaaagcagtgtcacagctaaaaagaaagaaatcgtttctaacagtaaattattgtgctttagttgctagtttgtactgagagttgacctctccctgtgcagttttttgttctaaacttgtataaataacaattgtgtaatgtgtctccctcctacattgtaacaattgcttcagcctacgttataaataaagaaccactagatt

SEQ ID NO: 778 - protein, 755 aa, Homo sapien
MEAVIEKECSALGGLFQTIISDMKGSYPVWEDFINKAGKLQSQLRTTVVAAAAFLDAFQKVADMATNTRGGTREIGSALTRMCMRHRSIEAKLRQFSSALIDCLINPLQEQMEEWKKVANQLDKDHAKEYKKARQEIKKKSSDTLKLQKKAKKGRGDIQPQLDSALQDVNDKYLLLEETEKQAVRKALIEERGRFCTFISMLRPVIEEEISMLGEITHLQTISEDLKSLTMDPHKLPSSSEQVILDLKGSDYSWSYQTPPSSPSTTMSRKSSVCSSLNSVNSSDSRSSGSHSHSPSSHYRYRSSNLAQQAPVRLSSVSSHDSGFISQDAFQSKSPSPMPPEAPNQLSNGFSHYSLSSESHVGPTGAGLFPHCLPASRLLPRVTSVHLPDYAHYYTIGPGMFPSSQIPSWKDWAKPGPYDQPLVNTLQRRKEKREPDPNGGGPTTASGPPAAAEEAQRPRSMTVSAATRPGEEMEACEELALALSRGLQLDTQRSSRDSLQCSSGYSTQTTTPCCSEDTIPSQVSDYDYFSVSGDQEADQQEFDKSSTIPRNSDISQSYRRMFQAKRPASTAGLPTTLGPAMVTPGVATIRRTPSTKPSVRRGTIGAGPIPIKTPVIPVKTPTVPDLPGVMPAPPDGPEERGEHSPESPSVGEGPQGVTSMPSSMWSGQASVNPPLPGPKPSIPEEHRQAIPESEAEDQEREPPSATVSPGQIPESDPADLSPRDTPQGEDMLNAIRRGVKLKKTTTNDRSAPRFS

SEQ ID NO: 779 - DNA, 5982 bp, Homo sapien
cgagcatggagagctgccgccgcggccggccggcgacgctggcgacgctttcgcccctgaggtagtttggcgaccgcgaagaaggaaaaagggcgggcgggcggctgtcctctcaccgtcctcaccccgcgaggcccggcccgctcctccgtcgtggatttcgcggcgatccccccggcagctctttgcaaagctgcttgaaacttctcccaaactcggcatggatacgactgcggcggcggcgctgcctgcttttgtggcgctcttgctcctctctccttggcctctcctgggatcggcccaaggccagttctccgcaggtggctgtacttttgatgatggtccaggggcctgtgattaccaccaggatctgtatgatgactttgaatgggtgcatgttagtgctcaagagcctcattatctaccacccgagatgccccaaggttcctatatgatagtggactcttcagatcacgaccctggagaaaaagccagacttcagctgcctacaatgaaggagaacgacactcactgcattgatttcagttacctattatatagccagaaaggactgaatcctggcactttgaacatattagttagggtgaataaaggacctcttgccaatccaatttggaatgtgactggattcacgggtagagattggcttcgggctgagctagcagtgagcaccttttggcccaatgaatatcaggtaatatttgaagctgaagtctcaggagggagaagtggttatattgccattgatgacatccaagtactgagttatccttgtgataaatctcctcatttcctccgtctaggggatgtagaggtgaatgcagggcaaaacgctacatttcagtgcattgccacagggagagatgctgtgcataacaagttatggctccagagacgaaatggagaagatataccagtagcccagactaagaacatcaatcatagaaggtttgccgcttccttcagattgcaagaagtgacaaaaactgaccaggatttgtatcgctgtgtaactcagtcagaacgaggttccggtgtgtccaattttgctcaacttattgtgagagaaccgccaagacccattgctcctcctcagcttcttggtgttgggcctacatatttgctgatccaactaaatgccaactcgatcattggcgatggtcctatcatcctgaaagaagtagagtaccgaatgacatcaggatcctggacagaaacccatgcagtcaatgctccaacttacaaattatggcatttagatccagataccgaatatgagatccgagttctacttacaagacctggtgaaggtggaacggggctcccaggacctccactaatcaccagaacaaaatgtgcagaacctatgagaaccccaaagacattaaagattgctgaaatacaggcaagacggattgctgtggactgggaatccttgggttacaacattacgcgttgccacacttttaatgtcactatctgctaccattacttccgtggtcacaacgagagcaaggcagactgtttggacatggaccccaaagcccctcagcatgttgtgaaccatctgccaccttatacaaatgtcagcctcaagatgatcctaaccaatccagagggaaggaaggagagtgaagagacaattattcaaactgatgaagatgtgcctggtcccgtaccagtaaaatctcttcaaggaacatcctttgaaaataagatcttcttgaactggaaagaacctttggatccaaatggaatcatcactcaatatgagatcagctatagcagtataagatcatttgatcctgcagttccagtggctggacctccccagactgtatcaaatttatggaacagtacacaccatgtctttatgcatctccaccctggaaccacgtaccagtttttcataagagccagcacggtcaaaggctttggtccagccacagccatcaatgtcaccaccaatatctcagctccaactttacctgactatgaaggagttgatgcctctctcaatgaaactgccaccacaataactgtattgttgagaccagcacaagccaaaggtgctcctatcagtgcttatcagattgttgtggaagaactgcacccacaccgaaccaagagagaagccggagccatggaatgctaccaggttcctgtcacataccaaaatgccatgagtgggggtgcaccgtattactttgctgcagaactccccccgggaaacctacctgagcctgccccgttcactgtgggtgacaatcggacctaccaaggcttttggaaccctcctttggctccgcgcaaaggatacaacatctatttccaggcgatgagcagtgtggagaaggaaactaaaacccagtgcgtacgcattgctacaaaagcagcagcaacagaagaaccagaagtgatcccagatcccgccaagcagacagacagagtggtgaaaatagcaggaattagtgctggaattttggtgttcatcctccttctcctagttgtcatattaattgtaaaaaagagcaaacttgctaaaaaacgcaaagatgccatggggaatacccggcaggagatgactcacatggtgaatgcaatggatcgaagttatgctgatcagagcactctgcatgcagaagatcctctttccatcaccttcatggaccaacataactttagtccaagatatgagaaccacagtgctacagcagagtccagtcgccttctagacgtacctcgctacctctgtgaggggacggaatccccttaccagacaggacagctgcatccagccatcagggtagctgatttactgcagcacattaatctcatgaagacatcagacagctatgggttcaaagaggaatatgagagcttttttgaaggacagtcagcatcttgggatgtagctaaaaaagatcaaaatagagcaaaaaaccgatatggaaacattatagcatatgatcactccagagtgattttgcaacccgtagaggatgatccttcctcagattatattaatgccaactatattgatggctaccagagaccaagtcattacattgcaacccaaggtcccgttcatgaaacagtgtatgatttctggaggatgatttggcaagaacaatctgcttgcattgtgatggttacaaatttagttgaggttggccgggttaaatgctataaatattggcctgatgatactgaagtttatggtgacttcaaagtaacgtgtgtagaaatggaaccacttgctgaatatgtagttaggacattcaccctggaaaggagggggtacaatgaaatccgtgaagttaaacagttccatttcacgggctggcctgaccatggagtgccctaccatgctacagggctgctttcctttatccggcgagtcaagttatcaaaccctcccagtgctggccccatcgttgtacattgcagtgctggtgctggacgaactggctgctacattgtgattgacatcatgctagacatggctgaaagagagggtgttgttgatatttacaattgtgtcaaagccttaagatctcggcgtattaatatggtccagacagaggaacagtacatttttattcatgatgccattttagaagcctgcttatgtggagaaactgccatacctgtctgtgaatttaaagctgcatattttgatatgattagaatagactcccagactaactcttcacatctcaaggatgaatttcagactctgaattcagtcacccctcgactacaagctgaagactgcagtatagcgtgcctgccaaggaaccatgacaagaaccgtttcatggacatgctgccacctgacagatgtctgccttttttaattacaattgatggggagagcagtaactacatcaatgctgctcttatggacagctacaggcaaccagctgctttcatcgtcacacaataccctctgccaaacactgtaaaagacttctggagattagtgtatgattatggctgtacctccattgtgatgttaaacgaagtcgacttgtcccagggctgccctcagtactggccagaggaagggatgctacgatatggccccatccaagtggaatgtatgtcttgttcaatggactgtgatgtgatcaaccggatttttaggatatgcaatctaacaagaccacaggaaggttatctgatggtgcaacagtttcagtacctaggatgggcttctcatcgagaagtgcctggatccaaaaggtcattcttgaaactgatacttcaggtggaaaagtggcaggaggaatgcgaggaaggggaaggccggacgattatccactgcctaaatggtggcgggcgaagtggcatgttctgtgctataggcatcgttgttgaaatggtgaaacggcaaaatgttgtcgatgttttccatgcagtaaagacactgaggaacagcaagccaaacatggtggaagccccggagcaataccgtttctgctatgatgtagctttggagtacctggaatcatcttagttgggtgagactctttaaagtgcatccatgaagaaacctgtccatctattgagccagcagctgttgtacctgttacacttgtgcagaaagattttaatgtggggggtgggagacttttacatttgagaggtaaaagtattttttttatgaagttgtgtatcttaataaaaaggactgaattagtttttattactatattaaagcatcaacatttcatgccacataaattatatttaataagaaccagattgaaatgagaacgtattggtgtttgtacagtgaacatgccaccttttttctcatggtttcagtagagcagctaccacatgttgcatgagttcatactttctacgtggcatttttctccctttctaaaatgaaagctgatgaatcttaaaaggaagaagaaaagaaaagctgtgcaaattcatagtaaagttcgttttttatatgtttccagtgtagcagatctctatataaatatataaatatatataactggcttattttcttttaatgtgcaatgatggctggatcatttaaagttctttttagaaaataacataagccaaagactcaagtgtaaatatgtctatatggagaaagcacattatatttattggttacttacattccttttttgatggctaaaatactaccaccacacaatcatctttttttcctgaagaaagctttttctttagctaaaatcaattgtaaacgatttttgtagattattttttgtatgttttagtgtaagtagaagataaactttttattcataaaccaggaagcaatgttctttatagtgattctcttgtgtacatgcttgtgaattaaatttgtgtaaaatcccttggcaattgggtcttttaatataggaccaaattaaaacattttgctgaatatgtatagtttttcacaatttcattaggtaaataatggtttggtgatcatacatgagaaatgtacacattaaaaggccttgctgacaacttgcacaatgttgaacatagcctttaagcatcatttaaattttaaaggaatggagtttttcagcctgtggcccagcactggtcaagaaaacaagatggcaacatatatgctttcagggtcaaatttgagcaaactgtaaactgtcagggtgataaaatgtttctcttgatgtttacatgcacaagctttgcgttctgactataaaaagtgtgaacaaatcaatgccagattcctgttttgcgcattgtcatgggattcttaagtgaacctttctaaatgtggtcttgttcacatgctccacgtagctgtaacttcacatcatcagcttgcagtttgtaattgactaaagcattccagtgtcctctttctagattgccagctcatgacatggtgcttataaagatttaattaaagtaagaatgaaataaagtttttataattat

SEQ ID NO: 780 - protein, 1440 aa, Homo sapien
MDTTAAAALPAFVALLLLSPWPLLGSAQGQFSAGGCTFDDGPGACDYHQDLYDDFEWVHVSAQEPHYLPPEMPQGSYMIVDSSDHDPGEKARLQLPTMKENDTHCIDFSYLLYSQKGLNPGTLNILVRVNKGPLANPIWNVTGFTGRDWLRAELAVSTFWPNEYQVIFEAEVSGGRSGYIAIDDIQVLSYPCDKSPHFLRLGDVEVNAGQNATFQCIATGRDAVHNKLWLQRRNGEDIPVAQTKNINHRRFAASFRLQEVTKTDQDLYRCVTQSERGSGVSNFAQLIVREPPRPIAPPQLLGVGPTYLLIQLNANSIIGDGPIILKEVEYRMTSGSWTETHAVNAPTYKLWHLDPDTEYEIRVLLTRPGEGGTGLPGPPLITRTKCAEPMRTPKTLKIAEIQARRIAVDWESLGYNITRCHTFNVTICYHYFRGHNESKADCLDMDPKAPQHVVNHLPPYTNVSLKMILTNPEGRKESEETIIQTDEDVPGPVPVKSLQGTSFENKIFLNWKEPLDPNGIITQYEISYSSIRSFDPAVPVAGPPQTVSNLWNSTHHVFMHLHPGTTYQFFIRASTVKGFGPATAINVTTNISAPTLPDYEGVDASLNETATTITVLLRPAQAKGAPISAYQIVVEELHPHRTKREAGAMECYQVPVTYQNAMSGGAPYYFAAELPPGNLPEPAPFTVGDNRTYQGFWNPPLAPRKGYNIYFQAMSSVEKETKTQCVRIATKAAATEEPEVIPDPAKQTDRVVKIAGISAGILVFILLLLVVILIVKKSKLAKKRKDAMGNTRQEMTHMVNAMDRSYADQSTLHAEDPLSITFMDQHNFSPRYENHSATAESSRLLDVPRYLCEGTESPYQTGQLHPAIRVADLLQHINLMKTSDSYGFKEEYESFFEGQSASWDVAKKDQNRAKNRYGNIIAYDHSRVILQPVEDDPSSDYINANYIDGYQRPSHYIATQGPVHETVYDFWRMIWQEQSACIVMVTNLVEVGRVKCYKYWPDDTEVYGDFKVTCVEMEPLAEYVVRTFTLERRGYNEIREVKQFHFTGWPDHGVPYHATGLLSFIRRVKLSNPPSAGPIVVHCSAGAGRTGCYIVIDIMLDMAEREGVVDIYNCVKALRSRRINMVQTEEQYIFIHDAILEACLCGETAIPVCEFKAAYFDMIRIDSQTNSSHLKDEFQTLNSVTPRLQAEDCSIACLPRNHDKNRFMDMLPPDRCLPFLITIDGESSNYINAALMDSYRQPAAFIVTQYPLPNTVKDFWRLVYDYGCTSIVMLNEVDLSQGCPQYWPEEGMLRYGPIQVECMSCSMDCDVINRIFRICNLTRPQEGYLMVQQFQYLGWASHREVPGSKRSFLKLILQVEKWQEECEEGEGRTIIHCLNGGGRSGMFCAIGIVVEMVKRQNVVDVFHAVKTLRNSKPNMVEAPEQYRFCYDVALEYLESS

SEQ ID NO: 781 - DNA, 4565 bp, Homo sapien
ggcgagctaagccggaggatgtgcagctgcggcggcggcgccggctacgaagaggacggggacaggcgccgtgcgaaccgagcccagccagccggaggacgcgggcagggcgggacgggagcccggactcgtctgccgccgccgtcgtcgccgtcgtgccggccccgcgtccccgcgcgcgagcgggaggagccgccgccacctcgcgcccgagccgccgctagcgcgcgccgggcatggtcccctcttaaaggcgcaggccgcggcggcgggggcgggcgtgcggaacaaagcgccggcgcggggcctgcgggcggctcgggggccgcgatgggcgcggcgggcccgcggcggcggcggcgctgcccgggccgggcctcgcggcgctagggcgggctggcctccgcgggcgggggcagcgggctgagggcgcgcggggcctgcggcggcggcggcggcggcggcggcggcccggcgggcggagcggcgcgggcatggccgcgcgcggccggcgcgcctggctcagcgtgctgctcgggctcgtcctgggcttcgtgctggcctcgcggctcgtcctgccccgggcttccgagctgaagcgagcgggcccacggcgccgcgccagccccgagggctgccggtccgggcaggcggcggcttcccaggccggcggggcgcgcggcgatgcgcgcggggcgcagctctggccgcccggctcggacccagatggcggcccgcgcgacaggaactttctcttcgtgggagtcatgaccgcccagaaatacctgcagactcgggccgtggccgcctacagaacatggtccaagacaattcctgggaaagttcagttcttctcaagtgagggttctgacacatctgtaccaattccagtagtgccactacggggtgtggacgactcctacccgccccagaagaagtccttcatgatgctcaagtacatgcacgaccactacttggacaagtatgaatggtttatgagagcagatgatgacgtgtacatcaaaggagaccgtctggagaacttcctgaggagtttgaacagcagcgagcccctctttcttgggcagacaggcctgggcaccacggaagaaatgggaaaactggccctggagcctggtgagaacttctgcatgggggggcctggcgtgatcatgagccgggaggtgcttcggagaatggtgccgcacattggcaagtgtctccgggagatgtacaccacccatgaggacgtggaggtgggaaggtgtgtccggaggtttgcaggggtgcagtgtgtctggtcttatgagatgcagcagcttttttatgagaattacgagcagaacaaaaaggggtacattagagatctccataacagtaaaattcaccaagctatcacattacaccccaacaaaaacccaccctaccagtacaggctccacagctacatgctgagccgcaagatatccgagctccgccatcgcacaatacagctgcaccgcgaaattgtcctgatgagcaaatacagcaacacagaaattcataaagaggacctccagctgggaatccctccctccttcatgaggtttcagccccgccagcgagaggagattctggaatgggagtttctgactggaaaatacttgtattcggcagttgacggccagccccctcgaagaggaatggactccgcccagagggaagccttggacgacattgtcatgcaggtcatggagatgatcaatgccaacgccaagaccagagggcgcatcattgacttcaaagagatccagtacggctaccgccgggtgaaccccatgtatggggctgagtacatcctggacctgctgcttctgtacaaaaagcacaaagggaagaaaatgacggtccctgtgaggaggcacgcgtatttacagcagactttcagcaaaatccagtttgtggagcatgaggagctggatgcacaagagttggccaagagaatcaatcaggaatctggatccttgtcctttctctcaaactccctgaagaagctcgtcccctttcagctccctgggtcgaagagtgagcacaaagaacccaaagataaaaagataaacatactgattcctttgtctgggcgtttcgacatgtttgtgagatttatgggaaactttgagaagacgtgtcttatccccaatcagaacgtcaagctcgtggttctgcttttcaattctgactccaaccctgacaaggccaaacaagttgaactgatgacagattaccgcattaagtaccctaaagccgacatgcagattttgcctgtgtctggagagttttcaagagccctggccctggaagtaggatcctcccagtttaacaatgaatctttgctcttcttctgcgacgtcgacctcgtctttactacagaattccttcagcgatgtcgagcaaatacagttctgggccaacaaatatattttccaatcatcttcagccagtatgacccaaagattgtttatagtgggaaagttcccagtgacaaccattttgcctttactcagaaaactggcttctggagaaactatgggtttggcatcacgtgtatttataagggagatcttgtccgagtgggtggctttgatgtttccatccaaggctgggggctggaggatgtggaccttttcaacaaggttgtccaggcaggtttgaagacgtttaggagccaggaagtaggagtagtccacgtccaccatcctgtcttttgtgatcccaatcttgaccccaaacagtacaaaatgtgcttggggtccaaagcatcgacctatgggtccacacagcagctggctgagatgtggctggaaaaaaatgatccaagttacagtaaaagcagcaataataatggctcagtgaggacagcctaatgtccagctttgctggaaaagacgtttttaattatctaatttatttttcaaaaattttttgtatgatcagtttttgaagtccgtatacaaggatatattttacaagtggttttcttacataggactcctttaagattgagctttctgaacaagaaggtgatcagtgtttgcctttgaacacatcttcttgctgaacattatgtagcagacctgcttaactttgacttgaaatgtacctgatgaacaaaacttttttaaaaaaatgttttcttttgagaccctttgctccagtcctatggcagaaaacgtgaacattcctgcaaagtattattgtaacaaaacactgtaactctggtaaatgttctgttgtgattgttaacattccacagattctaccttttgtgttttgtttttttttttttacaattgttttaaagccatttcatgttccagttgtaagataaggaaatgtgataatagctgtttcatcattgtcttcaggagagctttccagagttgatcatttcccctcatggtactctgctcagcatggccacgtaggttttttgtttgttttgttttgttctttttttgagacggagtctcactctgttacccaggctggaatgcagtggcgcaatcttggctcactttaacctccacttccctggttcaagcaattcccctgcctttgcctcccgagtagctgggattacaggcacacaccaccacgcccagctagtttttttgtatttttagtagagacggggtttcaccatgcaagcccagctggccacgtaggttttaaagcaaggggcgtgaagaaggcacagtgaggtatgtggctgttctcgtggtagttcattcggcctaaatagacctggcattaaatttcaagaaggatttggcattttctcttcttgacccttctctttaaagggtaaaatattaatgtttagaatgacaaagatgaattattacaataaatctgatgtacacagactgaaacacacacacatacaccctaatcaaaacgttggggaaaaatgtatttggttttgttcctttcatcctgtctgtgttatgtgggtggagatggttttcattctttcattactgttttgttttatcctttgtatctgaaatacctttaatttatttaatatctgttgttcagagctctgccatttcttgagtacctgttagttagtattatttatgtgtatcgggagtgtgtttagtctgttttatttgcagtaaaccgatctccaaagatttccttttggaaacgctttttcccctccttaatttttatattccttactgttttactaaatattaagtgttctttgacaattttggtgctcatgtgttttggggacaaaagtgaaatgaatctgtcattataccagaaagttaaattctcagatcaaatgtgccttaataaatttgttttcatttagatttcaaacagtgatagacttgccattttaatacacgtcattggagggctgcgtatttgtaaatagcctgatgctcatttggaaaaataaaccagtgaacaatatttttctattgtacttttcagaaccattttgtctcattattcctgttttagctgaagaattgtattacatttggagagtaaaaaacttaaacacg

SEQ ID NO: 782 - protein, 802 aa, Homo sapien
MAARGRRAWLSVLLGLVLGFVLASRLVLPRASELKRAGPRRRASPEGCRSGQAAASQAGGARGDARGAQLWPPGSDPDGGPRDRNFLFVGVMTAQKYLQTRAVAAYRTWSKTIPGKVQFFSSEGSDTSVPIPVVPLRGVDDSYPPQKKSFMMLKYMHDHYLDKYEWFMRADDDVYIKGDRLENFLRSLNSSEPLFLGQTGLGTTEEMGKLALEPGENFCMGGPGVIMSREVLRRMVPHIGKCLREMYTTHEDVEVGRCVRRFAGVQCVWSYEMQQLFYENYEQNKKGYIRDLHNSKIHQAITLHPNKNPPYQYRLHSYMLSRKISELRHRTIQLHREIVLMSKYSNTEIHKEDLQLGIPPSFMRFQPRQREEILEWEFLTGKYLYSAVDGQPPRRGMDSAQREALDDIVMQVMEMINANAKTRGRIIDFKEIQYGYRRVNPMYGAEYILDLLLLYKKHKGKKMTVPVRRHAYLQQTFSKIQFVEHEELDAQELAKRINQESGSLSFLSNSLKKLVPFQLPGSKSEHKEPKDKKINILIPLSGRFDMFVRFMGNFEKTCLIPNQNVKLVVLLFNSDSNPDKAKQVELMTDYRIKYPKADMQILPVSGEFSRALALEVGSSQFNNESLLFFCDVDLVFTTEFLQRCRANTVLGQQIYFPIIFSQYDPKIVYSGKVPSDNHFAFTQKTGFWRNYGFGITCIYKGDLVRVGGFDVSIQGWGLEDVDLFNKVVQAGLKTFRSQEVGVVHVHHPVFCDPNLDPKQYKMCLGSKASTYGSTQQLAEMWLEKNDPSYSKSSNNNGSVRTA

SEQ ID NO: 783 - DNA, 4221 bp, Homo sapien
cagcccgagcccgagcccgagcccgagccggcgccaccgcgcccccggccatggcttttgccaatttccgccgcatcctgcgcctgtctaccttcgagaagagaaagtcccgcgaatatgagcacgtccgccgcgacctggaccccaacgaggtgtgggagatcgtgggcgagctgggcgacggcgccttcggcaaggtttacaaggccaagaataaggagacgggtgctttggctgcggccaaagtcattgaaaccaagagtgaggaggagctggaggactacatcgtggagattgagatcctggccacctgcgaccacccctacattgtgaagctcctgggagcctactatcacgacgggaagctgtggatcatgattgagttctgtccagggggagccgtggacgccatcatgctggagctggacagaggcctcacggagccccagatacaggtggtttgccgccagatgctagaagccctcaacttcctgcacagcaagaggatcatccaccgagatctgaaagctggcaacgtgctgatgaccctcgagggagacatcaggctggctgactttggtgtgtctgccaagaatctgaagactctacagaaacgagattccttcatcggcacgccttactggatggcccccgaggtggtcatgtgtgagaccatgaaagacacgccctacgactacaaagccgacatctggtccctgggcatcacgctgattgagatggcccagatcgagccgccacaccacgagctcaaccccatgcgggtcctgctaaagatcgccaagtcagaccctcccacgctgctcacgccctccaagtggtctgtagagttccgtgacttcctgaagatagccctggataagaacccagaaacccgacccagtgccgcgcagctgctggagcatcccttcgtcagcagcatcaccagtaacaaggctctgcgggagctggtggctgaggccaaggccgaggtgatggaagagatcgaagacggccgggatgagggggaagaggaggacgccgtggatgccgcctccaccctggagaaccatactcagaactcctctgaggtgagtccgccaagcctcaatgctgacaagcctctcgaggagtcaccttccaccccgctggcacccagccagtctcaggacagtgtgaatgagccctgcagccagccctctggggacagatccctccaaaccaccagtcccccagtcgtggcccctggaaatgagaacggcctggcagtgcctgtgcccctgcggaagtcccgacccgtgtcaatggatgccagaattcaggtagcccaggagaagcaagttgctgagcagggtggggacctcagcccagcagccaacagatctcaaaaggccagccagagccggcccaacagcagcgccctggagaccttgggtggggagaagctggccaatggcagcctggagccacctgcccaggcagctccagggccttccaagagggactcggactgcagcagcctctgcacctctgagagcatggactatggtaccaatctctccactgacctgtcgctgaacaaagagatgggctctctgtccatcaaggacccgaaactgtacaaaaaaaccctcaagcggacacgcaaatttgtggtggatggtgtggaggtgagcatcaccacctccaagatcatcagcgaagatgagaagaaggatgaggagatgagatttctcaggcgccaggaactccgagagcttcggctgctccagaaagaagagcatcggaaccagacccagctgagtaacaagcatgagctgcagctggagcaaatgcataaacgttttgaacaggaaatcaacgccaagaagaagttctttgacacggaattagagaacctggagcgtcagcaaaagcagcaagtggagaagatggagcaagaccatgccgtgcgccgccgggaggaggccaggcggatccgcctggagcaggatcgggactacaccaggttccaagagcagctcaaactgatgaagaaagaggtgaagaacgaggtggagaagctcccccgacagcagcggaaggaaagcatgaagcagaagatggaggagcacacgcagaaaaagcagcttcttgaccgggactttgtagccaagcagaaggaggacctggagctggccatgaagaggctcaccaccgacaacaggcgggagatctgtgacaaggagcgcgagtgcctcatgaagaagcaggagctccttcgagaccgggaagcagccctgtgggagatggaagagcaccagctgcaggagaggcaccagctggtgaagcagcagctcaaagaccagtacttcctccagcggcacgagctgctgcgcaagcatgagaaggagcgggagcagatgcagcgctacaaccagcgcatgatagagcagctgaaggtgcggcagcaacaggaaaaggcgcggctgcccaagatccagaggagtgagggcaagacgcgcatggccatgtacaagaagagcctccacatcaacggcgggggcagcgcagctgagcagcgtgagaagatcaagcagttctcccagcaggaggagaagaggcagaagtcggagcggctgcagcaacagcagaaacacgagaaccagatgcgggacatgctggcgcagtgtgagagcaacatgagcgagctgcagcagctgcagaatgaaaagtgccacctcctggtagagcacgaaacccagaaactgaaggccctggatgagagccataaccagaacctgaaggaatggcgggacaagcttcggccgcgcaagaaggctctggaagaggatctgaaccagaagaagcgggagcaggagatgttcttcaagctgagcgaggaggcggagtgcccaaacccctccaccccaagcaaggccgccaagttcttcccctacagttctgcggatgcttcttaacaaccgcccggggctgtggctggcagcttggtgggccccagggccttctccttcattctctgtgaacatgtaactcaggaccccttttccctcttgcgtctgtgccagctcaaatccagcccctcgccctgtgccaccccaactgtgcctgatagacctgccccagcgttcctgacttcttgctggcctgtggagggtgaggtgtaattatttgtcacctgaacctaatgtatattctccttgagccccagatcccttcaagctggaagggatggggctgttggtggggtcagggtccaagaggaatgggtgttctgtggcctcgagtcctctcctgtttgcgaaaataccagttttgctctctgtgggacaaagcactgctgatgaagtccccgtgggctcatccgggctggaattcttggtttttcagccattccctgcagagtcactcaatcatcaagtccctcacagccatttctgttcccagaggagccaggcctgcagctggctgctcaggagatggcctcattcctcctgttctcccagtttgctttccacttaagacaaagccttgtctatgtggggggcggggaccggggaaagagggaggctgaaatgtttattctgcttctcccgtgtttcatgccatctcgcgtcccccttcctgcacatgggtgtgaatgcacacacatacgcgtacacacaggacttggtctgctggcctggcctcttctgcccaggtgggttggaacacgtttgctgcctgagcctgtgccactgagcatgttaggtggagcagttggtgtggcacgtgcggggtgttggcaccggaggcatggaaaagcacaggctgtactgccaggctgcgatgcgtgctggcccccgcacaggctcctgtgtgcagggactgattcctcagcacacgaggcttccacaacccagtctgctccatagcactctggcccaccctgtctgcaggtgaaacaggagggctgtttgcctctgccccatccccccgactgtgttcaggagtcccaccttgcatttcagacctgggctggcagtctgttggacttctcttcaggaagaaaaagcatcagggggaaatggaatgcccctgccccaggaacatggcagaagcacaggttctgtacctcagatggactcctgctgggccttcggggtctcagttggcttcccccagattctgattctacagctgcagaatgtatataacacaataaaagcaaatgtttgaaccagt

SEQ ID NO: 784 - protein, 968 aa, Homo sapien
MAFANFRRILRLSTFEKRKSREYEHVRRDLDPNEVWEIVGELGDGAFGKVYKAKNKETGALAAAKVIETKSEEELEDYIVEIEILATCDHPYIVKLLGAYYHDGKLWIMIEFCPGGAVDAIMLELDRGLTEPQIQVVCRQMLEALNFLHSKRIIHRDLKAGNVLMTLEGDIRLADFGVSAKNLKTLQKRDSFIGTPYWMAPEVVMCETMKDTPYDYKADIWSLGITLIEMAQIEPPHHELNPMRVLLKIAKSDPPTLLTPSKWSVEFRDFLKIALDKNPETRPSAAQLLEHPFVSSITSNKALRELVAEAKAEVMEEIEDGRDEGEEEDAVDAASTLENHTQNSSEVSPPSLNADKPLEESPSTPLAPSQSQDSVNEPCSQPSGDRSLQTTSPPVVAPGNENGLAVPVPLRKSRPVSMDARIQVAQEKQVAEQGGDLSPAANRSQKASQSRPNSSALETLGGEKLANGSLEPPAQAAPGPSKRDSDCSSLCTSESMDYGTNLSTDLSLNKEMGSLSIKDPKLYKKTLKRTRKFVVDGVEVSITTSKIISEDEKKDEEMRFLRRQELRELRLLQKEEHRNQTQLSNKHELQLEQMHKRFEQEINAKKKFFDTELENLERQQKQQVEKMEQDHAVRRREEARRIRLEQDRDYTRFQEQLKLMKKEVKNEVEKLPRQQRKESMKQKMEEHTQKKQLLDRDFVAKQKEDLELAMKRLTTDNRREICDKERECLMKKQELLRDREAALWEMEEHQLQERHQLVKQQLKDQYFLQRHELLRKHEKEREQMQRYNQRMIEQLKVRQQQEKARLPKIQRSEGKTRMAMYKKSLHINGGGSAAEQREKIKQFSQQEEKRQKSERLQQQQKHENQMRDMLAQCESNMSELQQLQNEKCHLLVEHETQKLKALDESHNQNLKEWRDKLRPRKKALEEDLNQKKREQEMFFKLSEEAECPNPSTPSKAAKFFPYSSADAS

SEQ ID NO: 785 - DNA, 6450 bp, Homo sapien
cgcgctcgcggggggcggtggcgcccggcacagaggggttaagggggcggtgcagacgtctccccgcccatcccgcccctcgagagccgcggcgccccgccctatttatagcagcggtgcctagcgcgccgcgtctctccgcaggccccggccgcggcgtcctcgacaacctatcgaaggcgccatggagcgaccggcgcccctggccgtgcttcccttctcggaccccgcgcacgccctgagcctgctgcgcggcctgagccagctgcgcgccgagcgcaagttcctggacgtgaccctggaggcggcgggcgggcgcgacttcccggcgcaccgtgcggtgctggccgccgccagcccctacttccgcgccatgttcgcggggcagctgcgcgagagccgcgccgagcgggtgcgcctgcacggagtgcctcccgacatgctgcagctgctgctggacttcagctacacgggccgcgtggcggtaagcggcgacaacgctgagccgctgctgcgcgccgccgacctgctgcagttcccggccgtgaaggaggcgtgcggggccttcctgcagcagcagctcgacctggccaactgcctggacatgcaggacttcgctgaggccttcagctgctcgggactggcgagcgcggcgcagcggttcattctgcgccacgtgggcgagctgggcgccgagcagctggagcggctgccactggcgcgcctgctgcgctacctgcgggacgacgggctgtgtgtgcccaaggaggaggccgcctaccagctggcgctgcgctgggtccgcgctgacccgccgcgccgcgccgcgcactggccgcagctgctggaggccgtgcgcctgcccttcgtgcgccgcttctacctgttggcgcacgtcgaggccgagccgctggtggcgcgctgcccaccctgcctgcgcctgctgcgcgaggcgcgcgacttccaggcggcgcgctacgaccgccacgaccgcgggccctgtccccgaatgcgtcctcgcccgtccaccggtctcgccgagatcctcgtgctcgtgggcggctgcgaccaggactgtgacgagctggtcactgtcgactgctacaacccgcagacgggtcagtggcgctacctggccgagttcccagaccacctgggcggaggctacagcatcgtggcgctgggcaatgacatctacgtgacgggtgggtccgatggctcccggctctatgactgcgtgtggaggtacaactcaagcgtgaatgagtgggcggaggtggcgcccatgctgaaggcccgcgagtaccacagctcctctgtgctggacggactgctgtacgtggtggccgccgacagcaccgagcgctatgaccacaccactgactcctgggaggccctgcagcccatgacctaccccatggacaactgctccaccactgcgtgccgtggccggctctatgccatcggctccctggctggcaaggagaccatggtgatgcagtgctacgacccggacaccgacctgtggtcgctggtggactgcggccagctcccgccctggtccttcgcccccaagactgcgactctaaacggactcatgtactttgtcagggatgactccgctgaggtggacgtgtacaacccgacgaggaacgaatgggacaagatcccgtccatgaatcaggtaaattttcaggcgggccagcattggaagcacaggctggtcctgattttgcaacccaagtgtcatcgtgatgagtgtttgggatccacagccatgatggatgggtctcatctcaattaatagaaggctgctcttacccttattttgcacttaaggctcactgagacacagatgttaagtaataccctatgattacacagcttagtacacatttgagcagtgtttattgagtatctgctgtgagccagagagcagaaggaagtgagggagcaaggcatacagtcatctggggacacctgttccagagagggacagcaggtacagaggccctgcagcagggcaccctggcgtgttcttagatacaccagcagcccatgtggccggagcagagtcagcatgaggtctgtgacctaccttttttatttttgagacagggtcttgctctgtcacccaggctggagtgcagtggtacaatcatggctcactgcagcctccacctccttgactcgcagtcctcccaccgcaccttcctgaatagctgagactacaggcgtgtgccaccacacccagtaattttttttctcatatgtagatacaaaaggatattcttaaaatttttatagagacagggtcttgctgtgttacccaggctggtctcacactcctggcctcaagtgaccctcctgtctcagcctcccaaagtgctaggattataggcgtgaaccaccacgcccagctggttcctgaggaagtcagtgtgggaatactttttttttttttatacggagtctcgctctgtcacccaggctggagtgcagtggcacgatctcggctcactgcaagctccatctcccaggttcacgccattctcccgcctcaacctcccgagtagctgggactacaggtacccaccaccacgcccagctaattttgtttgtgtatttttagtagagacgggatttcactgtgttagccaggatggtctggatctcctgaccttgtgatctgcctggctcagcctcccaaagtgctgggattacaggcatgagccaccatgcccagcccactgtgggaatacttgtgttgagcacttgctgtgtgttctgaataggacaaccagggtccaccccttctctctgggcttgttgagaagaggggtgcccagcctgacagtgatgggacagggaggcttcagtgccatttggccatgtgagcagtgttagtctgaggtacacatcatattgcctacagccttctttcctgtgtgtctgttaacatttccaaacctacactccgtgacatccagcctcacagcttacatcacagcttaatgtcctggcatttaagagacccagcgttctgttttccccgcagtaagctgcacatagtcatagcgaatttgggaaagatggaaggaatcatccagcctcgcggttcagagcccagctctgccactgtcagccatgcaagcctcagttttcccatctgtaacatggggagaacagcactgctcagcccagagggccactgcagagattctgagagagaacgtaggaagcgctgctcggcacgacctgcacacggggaggcctggcgctgcagcgggcaccctcatcaccatagggaaggcccagctgcctccggggaggcccgttctcctaggcagggtgttggaaaggggttggcctctctgctgctttctgggagagccaaggccacccctctggggtactgacagggcatgccttgtctccagtggttccccaggtggggccctgccctaccctctcctctgacctccactcactcatccctttggcccacaggtacatgtggggggcagcctggccgtccttggggggaagctgtacgtctctgggggatacgacaatacatttgaactctcggacgtggtagaggcctatgacccagagactcgcgcgtggagcgtggtggggcggctcccagaacccaccttctggcatggcagtgtcagcatcttccgccagttcatgccccagaccttctcgggtgggcgtggcttcgagttggacagtggcagcgatgacatggacccaggccgaccccggccgccgcgggaccccgatgagctgcactagccccagtctggcccggcacgggcctcggtgcaggtaactggcacctctgcggggcagtgccccactcctttgtgcacaaggacacgttgggctcacaggaggagcacaggctcttgggtggcgaagccagcccaggatccattacctggaaggtttctgtaccttgagagcctgaatcagaggccgtcgggaacgccctccctgcagttgaggaagagccactttcctgccagcacatgtttctgggtcttggaggtcacccccaccccgcggatcacagctcacccacgcggcgcacacccctcctgccgttgtcatctgcacctacttgttcccaccttgggagaggacgatgacttgggagggacgcgtgaagggagaaggggtcctcccatgaggctgaggatggcctgaacctggagcagcggaccaggcagacgggctgaagtggggtcccaaattccatgtccagaggtgtggggagcctgcctccctagctcctggcccctgccaggggcttacatcaaaacacctcagagggctgccctccagaggctgcacccagaacagtgggacatgagcaggggtgtgggcttggagggtgaagaggatgtggtcctatcagatgctgggcctcctcagccatagccccctgctcctaccccctgactggctcttgcgtcctcacctctcaccctctccttcccgggaggccctgggaggtgatcattgacacccagccaagcagacagctgcgggtgcccaagcccttgctgggcctgcgcgtgaggagtcccactgcttctaaaggaagtcctgggcaggaggtggctttggtggttggttccaaagttgaaaatgcttgcagtttgaccttagaagaagtgggaagaagaaggagctctacagggtcagctttgtttgatttgtccagtctaagaagtcccattgccaaagctttctgcaggagggtgaatgccgcagcttggcagcccctgggtttctcttggaaatggtcagtttcccctcaaagtacccaaagtagccttggcttgagtttttgtccttgcctcctttttagagaagagggcatttagactgcattttcctggttaaagaaggttaaagcaaatgtttattgccttttctagtgaactaactcgtagagatgttctcagcaggaagacagtcttagcactgtcacttagcagattgcacttaagtcccttgtgctggccagatggcgtggctggttgccttaatatgtcccaggacccctgacagggctgcctggcctctccctcgtgctcctcaagagcccagtccatacactgtggatgtcattgctgtcgggttaggaagtcttgtcctagaacgccctggctggtatgaccacagttcatggcggctcttctcgcttgggtcatggtcatcttccagcacctgctgtgctgggaaggccgaggatgggggcccagcactgtccaggcctgctggggcctggctgggagtcctgtgggcagcatggaacatgcagctgggcttcctgtgaccaggcaccctctggcactgttgcttgccctgtgccctggaccttttcctgcccttctccttcctctgctcccttggggctaccccttggcccctcctggtctgtgcaaactccctcagggagcccccctgccctgtagctctcgcttaacttcctaggggctgctgagcccacccagaggttgttggagttcagcggggcagcttgtctcccttgtcagcaggggcgtaagggctgggtttggccatacaaggttggctacgccctcaatccctgaccgttccaggcactgagctgggcacccacggaaggacatgctgtccagactgtgatgactgccagcacagggcatctcgggcttggctggtctgcgaggccttgcccctgtggaactctgggttcctgttttctcagtcttttttgcggctttgctgtggttggcagctgccgtactccaggcttgtgtcggccactcagatgagggctgtggtgcgagccagtgcaggagagctgcgcttgggattgtgccctctcctgtgtctgtcctccggacctacccaggtctccaccatcaggaccctgtctttgggtttagaagaccaagtatggggaaaaccaggcaccagcctctgcagcaatgggtccctctagcctgtggacaccagctgggggatccagggtcaggccccctcctctccccagtttccctctgctgtgggttctgggctgtcatgtctccaccacttaaggatgtctttacactgacttcaggatagatgttgggatgcctgggcatggccacatgttacatgtacagaactttgtctacagcacaaattaagttatataaacacagtgactggtatttaatgctgatctactataaggtattctatatttatatgacttcagagacgcgtatgtaataaaggacgccctccctccagtgtccacatccagttcaccccagagggtcgggcaggttgacatatttatttttgtctattctgtaggcttccatgtccagaatcctgcttaaggttttagggtaccttcagtactttttgcaataaaagtatttcctatccatttgg

SEQ ID NO: 786 - protein, 539 aa, Homo sapien
MERPAPLAVLPFSDPAHALSLLRGLSQLRAERKFLDVTLEAAGGRDFPAHRAVLAAASPYFRAMFAGQLRESRAERVRLHGVPPDMLQLLLDFSYTGRVAVSGDNAEPLLRAADLLQFPAVKEACGAFLQQQLDLANCLDMQDFAEAFSCSGLASAAQRFILRHVGELGAEQLERLPLARLLRYLRDDGLCVPKEEAAYQLALRWVRADPPRRAAHWPQLLEAVRLPFVRRFYLLAHVEAEPLVARCPPCLRLLREARDFQAARYDRHDRGPCPRMRPRPSTGLAEILVLVGGCDQDCDELVTVDCYNPQTGQWRYLAEFPDHLGGGYSIVALGNDIYVTGGSDGSRLYDCVWRYNSSVNEWAEVAPMLKAREYHSSSVLDGLLYVVAADSTERYDHTTDSWEALQPMTYPMDNCSTTACRGRLYAIGSLAGKETMVMQCYDPDTDLWSLVDCGQLPPWSFAPKTATLNGLMYFVRDDSAEVDVYNPTRNEWDKIPSMNQVNFQAGQHWKHRLVLILQPKCHRDECLGSTAMMDGSHLN

SEQ ID NO: 787 - DNA, 2285 bp, Homo sapien
gcgcccgggccgccggccgggcccgggcctgggggcggggcgggaagacggcggccgggagtgttttcagttccgcctccaatcgcccattcccctcttcccctcccagccccctccatcccatcggaagaggaaggaacaaaaggtcccggaccccccggatctgacggggcgggacctggcgccaccttgcaggttcgatacaagaggctgttttcctagcgtggcttgctgcctttggtaagaacatgtcgtccatcttgccattcacgccgccagttgtgaagagactgctgggatggaagaagtcagctggtgggtctggaggagcaggcggaggagagcagaatgggcaggaagaaaagtggtgtgagaaagcagtgaaaagtctggtgaagaagctaaagaaaacaggacgattagatgagcttgagaaagccatcaccactcaaaactgtaatactaaatgtgttaccataccaagcacttgctctgaaatttggggactgagtacaccaaatacgatagatcagtgggatacaacaggcctttacagcttctctgaacaaaccaggtctcttgatggtcgtctccaggtatcccatcgaaaaggattgccacatgttatatattgccgattatggcgctggcctgatcttcacagtcatcatgaactcaaggcaattgaaaactgcgaatatgcttttaatcttaaaaaggatgaagtatgtgtaaacccttaccactatcagagagttgagacaccagttttgcctccagtattagtgccccgacacaccgagatcctaacagaacttccgcctctggatgactatactcactccattccagaaaacactaacttcccagcaggaattgagccacagagtaattatattccagaaacgccacctcctggatatatcagtgaagatggagaaacaagtgaccaacagttgaatcaaagtatggacacaggctctccagcagaactatctcctactactctttcccctgttaatcatagcttggatttacagccagttacttactcagaacctgcattttggtgttcgatagcatattatgaattaaatcagagggttggagaaaccttccatgcatcacagccctcactcactgtagatggctttacagacccatcaaattcagagaggttctgcttaggtttactctccaatgttaaccgaaatgccacggtagaaatgacaagaaggcatataggaagaggagtgcgcttatactacataggtggggaagtttttgctgagtgcctaagtgatagtgcaatctttgtgcagagccccaattgtaatcagagatatggctggcaccctgcaacagtgtgtaaaattccaccaggctgtaatctgaagatcttcaacaaccaggaatttgctgctcttctggctcagtctgttaatcagggttttgaagccgtctatcagctaactagaatgtgcaccataagaatgagttttgtgaaagggtggggagcagaataccgaaggcagacggtaacaagtactccttgctggattgaacttcatctgaatggacctctacagtggttggacaaagtattaactcagatgggatccccttcagtgcgttgctcaagcatgtcataaagcttcaccaatcaagtcccatgaaaagacttaatgtaacaactcttctgtcatagcattgtgtgtggtccctatggactgtttactatccaaaagttcaagagagaaaacagcacttgaggtctcatcaattaaagcaccttgtggaatctgtttcctatatttgaatattagatgggaaaattagtgtctagaaatactctcccattaaagaggaagagaagattttaaagacttaatgatgtcttattgggcataaaactgagtgtcccaaaggtttattaataacagtagtagttatgtgtacaggtaatgtatcatgatccagtatcacagtattgtgctgtttatatacatttttagtttgcatagatgaggtgtgtgtgtgcgctgcttcttgatctaggcaaacctttataaagttgcagtacctaatctgttattcccacttctctgttatttttgtgtgtcttttttaatatataatatatatcaagattttcaaattatttagaagcagattttcctgtagaaaaactaatttttctgccttttaccaaaaataaactcttgggggaagaaaaaaaaaaaaaaaaaaaaaaaaaaaaaaaaaaaaaaaaaaaaaaaaaaaaa

SEQ ID NO: 788 - protein, 467 aa, Homo sapien
MSSILPFTPPVVKRLLGWKKSAGGSGGAGGGEQNGQEEKWCEKAVKSLVKKLKKTGRLDELEKAITTQNCNTKCVTIPSTCSEIWGLSTPNTIDQWDTTGLYSFSEQTRSLDGRLQVSHRKGLPHVIYCRLWRWPDLHSHHELKAIENCEYAFNLKKDEVCVNPYHYQRVETPVLPPVLVPRHTEILTELPPLDDYTHSIPENTNFPAGIEPQSNYIPETPPPGYISEDGETSDQQLNQSMDTGSPAELSPTTLSPVNHSLDLQPVTYSEPAFWCSIAYYELNQRVGETFHASQPSLTVDGFTDPSNSERFCLGLLSNVNRNATVEMTRRHIGRGVRLYYIGGEVFAECLSDSAIFVQSPNCNQRYGWHPATVCKIPPGCNLKIFNNQEFAALLAQSVNQGFEAVYQLTRMCTIRMSFVKGWGAEYRRQTVTSTPCWIELHLNGPLQWLDKVLTQMGSPSVRCSSMS

SEQ ID NO: 789 - DNA, 4181 bp, Homo sapien
gttacttgttattggtaaatagccactatggaggctaaggaccagaagaaacacagaaagaaaaacagtggacccaaagctgcaaagaaaaagaagcggcttctgcaggatctccagctaggagacgaagaagatgcccggaagagaaatcccaaagcttttgcagttcagtctgctgtgcggatggctcgatcctttcacaggactcaggatttgaagacaaaaaagcatcatattccagtggttgatcgaactccactagagcccccaccaatagtggtagtggtgatgggacctccaaaagttggaaagagcactttgatacaatgcctcattcggaactttacccggcagaagttgaccgagatcagaggccctgtgacgattgtgtcaggtaaaaagcgcagactcaccattattgaatgtgggtgtgacattaacatgatgattgatctggctaaagtagcagatctggtactgatgcttatagatgccagctttgggtttgaaatggaaacgtttgagtttctaaacatctgtcaagtacatggctttcctaaaattatgggagttctcacccacctcgactccttcaagcataataagcaactgaagaagacaaagaagcgattaaaacacaggttctggacggaagtttacccgggtgccaagctgttctacctttctggaatggtgcatggagaatatcaaaaccaagaaatccacaatctgggccgttttattacagttatgaagtttaggcctctcacatggcaaacttctcacccttatatcctggcagacaggatggaagatttgacaaacccagaggatatccgaacaaacatcaaatgtgaccggaaggtgtcactttatggttatttaagaggagcacacttgaaaaataaaagccaaattcacatgccaggggtaggagattttgccgtgagtgacatcagtttcctcccagacccttgcgctcttcctgaacaacaaaagaagcgctgtttaaatgagaaggagaagctggtttatgcgcctctttctggagttgggggtgtgctgtatgacaaagacgctgtctatgttgaccttggtggcagccacgtttttcaggatgaagtggggcccacccatgagctggtccagagtctcatctctacccactccaccattgatgccaagatggcttcaagtcgagtgacgctgttttctgattccaaaccacttgggtcagaggatatagataatcaagggctaatgatgccaaaggaggaaaaacaaatggacttgaacactggtcgaatgcgtcggaaagccattttcggagatgaagatgaatctggagatagtgatgatgaagaagatgatgaaatgtctgaagatgacgggttggaaaacggctctagtgatgaggaagcagaagaggaggaaaatgctgagatgactgatcagtatatggctgttaagggcatcaaacgacggaaacttgagttggaagaagacagtgaaatggatttgccagcatttgctgacagtgacgatgaccttgagaggagctcagcggaagaaggggaagcggaggaagctgatgaaagcagtgaagaagaggactgcactgcaggagagaagggcatttcaggatcaaaggctgctggagaaggtagtaaagcagggctgtcaccagctaattgccagagtgaccgtgtgaatctggagaagtctttgctgatgaagaaagcagctctccccactttcgattctgggcattgcacagctgaagaggtgtttgcatctgaagatgaatctgaagaaagctcctcactcagtgcagaggaagaagactcagaaaatgaagaggctattagaaaaaagctttcaaagccttctcaagtgagcagtggtcagaaactggggccacagaacttcattgatgagaccagtgatatagaaaatttactcaaagaggaagaagattacaaggaagaaaataatgattccaaagaaacgtcaggtgccctcaagtggaaggaagacctttccagaaaggcagctgaggcctttctgaggcagcagcaagcagctccaaacctccgaaagcttatttatgggacagtgacagaagataatgaagaagaagatgatgatactctagaagagcttggagggttgtttcgtgtcaaccagcctgacagagagtgtaagcacaaggctgactctttggactgctccagatttcttgtggaggccccccatgactgggatttagaggaggttatgaacagtatcagagattgcttcgtgactggaaagtgggaagatgataaagatgcagccaaggtcttagcagaagatgaggagctctacggtgactttgaagacttggaaacaggggacgtgcacaagggaaaatcaggccccaatactcagaatgaagatatagagaaagaagttaaggaagaaattgaccccgacgaagaagaaagtgccaagaaaaagcatttggataagaagagaaaattgaaggagatgtttgatgcagaatatgatgaaggagaaagcacatattttgatgatcttaaaggagaaatgcagaaacaagcacagctgaatcgcgcagaatttgaagatcaagatgatgaagccagagttcagtatgagggttttcgacctgggatgtacgtccgcattgagattgaaaatgttccctgtgaatttgtgcagaactttgacccccattaccccattatcctgggtggcttgggcaacagtgagggaaatgttggctacgtgcagatgcgtctgaagaaacatcgctggtataagaaaatcctcaagtcccgagatccaatcatattttctgtagggtggaggaggtttcagaccatcccactgtattatatcgaagaccacaatggaagacaaaggcttctaaagtataccccacagcacatgcattgcggagcagccttttggggccctatcactccacagggaactggtttcttggcaatacagtctgtcagtggcataatgcctgattttcggatagctgctacaggagttgtccttgatctggataaatccataaaaattgtgaagaaattaaagctaactggttttccatataaaattttcaagaacacttcatttattaagggaatgtttaattctgccttggaagtggccaaatttgaaggtgctgtgattcgaacagtcagtgggataagggggcagatcaagaaagcactccgagctccagaaggagctttcagggccagctttgaggataagctgctgatgagcgatattgtcttcatgcgaacttggtatcctgtttccatcccagcgttctataacccagtaacatctttgttgaaaccagtgggtgagaaagacacctggtcaggaatgcggaccacgggccaactcaggctcgcccatggcgtcagactaaaggcgaacaaggactctctgtataagccaatcctgaggcaaaagaaacattttaattcactgcacattccaaaagccttgcagaaggccctgccatttaagaacaagcccaagacccaagcaaaggcaggcaaggtgccaaaggacaggcggagaccggccgtcatacgcgagcctcatgaaagaaagatccttgcactgctggatgctctgagtacggtgcatagtcagaagatgaagaaggccaaggagcagcggcacctgcacaataaagagcacttcagagccaagcagaaggaggaggaggagaagctgaagcggcagaaggacctcaggaagaagctcttcagaattcaggggcagaaggaaagaagaaaccagaagtccagtttgaagggggctgagggccaattgcagtgagcctttggactggagggactgtccctggatctgcggaggtagacagtttcaaacatcacagtttgaatgcctgtgaatgacacgtcagtgggaaagagctcaagagatgtctctactcaaactgtgcctgcaggaggaggaacagagaagcctgggctgctgggactgggttcattctcatgacttggggctgtcgagatttaaagtgatgtaagctgtggttatgtggattctcttactttcctctgcctgcctcagtttaattattttggcctacagaaatatcattaaaatatttttttgtt

SEQ ID NO: 790 - protein, 1282 aa, Homo sapien
MEAKDQKKHRKKNSGPKAAKKKKRLLQDLQLGDEEDARKRNPKAFAVQSAVRMARSFHRTQDLKTKKHHIPVVDRTPLEPPPIVVVVMGPPKVGKSTLIQCLIRNFTRQKLTEIRGPVTIVSGKKRRLTIIECGCDINMMIDLAKVADLVLMLIDASFGFEMETFEFLNICQVHGFPKIMGVLTHLDSFKHNKQLKKTKKRLKHRFWTEVYPGAKLFYLSGMVHGEYQNQEIHNLGRFITVMKFRPLTWQTSHPYILADRMEDLTNPEDIRTNIKCDRKVSLYGYLRGAHLKNKSQIHMPGVGDFAVSDISFLPDPCALPEQQKKRCLNEKEKLVYAPLSGVGGVLYDKDAVYVDLGGSHVFQDEVGPTHELVQSLISTHSTIDAKMASSRVTLFSDSKPLGSEDIDNQGLMMPKEEKQMDLNTGRMRRKAIFGDEDESGDSDDEEDDEMSEDDGLENGSSDEEAEEEENAEMTDQYMAVKGIKRRKLELEEDSEMDLPAFADSDDDLERSSAEEGEAEEADESSEEEDCTAGEKGISGSKAAGEGSKAGLSPANCQSDRVNLEKSLLMKKAALPTFDSGHCTAEEVFASEDESEESSSLSAEEEDSENEEAIRKKLSKPSQVSSGQKLGPQNFIDETSDIENLLKEEEDYKEENNDSKETSGALKWKEDLSRKAAEAFLRQQQAAPNLRKLIYGTVTEDNEEEDDDTLEELGGLFRVNQPDRECKHKADSLDCSRFLVEAPHDWDLEEVMNSIRDCFVTGKWEDDKDAAKVLAEDEELYGDFEDLETGDVHKGKSGPNTQNEDIEKEVKEEIDPDEEESAKKKHLDKKRKLKEMFDAEYDEGESTYFDDLKGEMQKQAQLNRAEFEDQDDEARVQYEGFRPGMYVRIEIENVPCEFVQNFDPHYPIILGGLGNSEGNVGYVQMRLKKHRWYKKILKSRDPIIFSVGWRRFQTIPLYYIEDHNGRQRLLKYTPQHMHCGAAFWGPITPQGTGFLAIQSVSGIMPDFRIAATGVVLDLDKSIKIVKKLKLTGFPYKIFKNTSFIKGMFNSALEVAKFEGAVIRTVSGIRGQIKKALRAPEGAFRASFEDKLLMSDIVFMRTWYPVSIPAFYNPVTSLLKPVGEKDTWSGMRTTGQLRLAHGVRLKANKDSLYKPILRQKKHFNSLHIPKALQKALPFKNKPKTQAKAGKVPKDRRRPAVIREPHERKILALLDALSTVHSQKMKKAKEQRHLHNKEHFRAKQKEEEEKLKRQKDLRKKLFRIQGQKERRNQKSSLKGAEGQLQ

SEQ ID NO: 791 - DNA, 2366 bp, Homo sapien
caggatgtgccatatcattgaacggaactaaagtctgtgacagtggatatagctgctggaccattccatcttatatgtaaagaaatctggaattattattttaaaaccatataacatgtgattataatttttcttagcattttctttgtaaagaactacaatataaactagttggtgtataataaaaagtaatgaaattctgagaagagttttatcttaggaaaatacatatatatgcagtgtgtgtgccagtgtggtattaacaagactaatagtgcagtttgatccttaccaatatcattacttaatttgaagtgttcattagcaccccaaaatataccttttctatgtactgttaaaagaaattggcttctgatgcatgaacatttacatgtacattgaaagtagtccataatagaagttagtttaagccaagtgtagacagtacattactcccttgaaaaagaattaagttgaaagagttgactttgccttaaaaggcagatctaacccaagctccatccagtaccaaatgtgaaacttcattgttgtttggtgagaatcgccaaattctcactaatacattggtatggtgtagggcatgctactttttaaacagcagcacttatttttacagattgctactccaaggaagaaaactggccacttttcatgtaaatattttgttcaaagatttgtatatctctctaggagttttccctcagttcccaggatggggtccaggagtagattaacagctaaaaatctcccaaggatatcttgttttgatttatttactccagggaactatcagctccttcacaggagccaaaggggagctatgaatagagggtcacatgagccagattctttactgttcataaaacccagagagtagttgtgaaagatcctaatacaattgtgaaaagctctgtaaacatgaaatctaaaacaaatgtagattttcacaatatgcttattaataaatgaagtctatggaataagttttagagataatttacttcagtcacctttgttttggaaaggactcaggttttcttgcagctgtaagatatattctatttgtgtttatttcaaagggaagaggaaggatggacaactgttacaattgaccttgcaaaggatatttaaaaaaaaggtagtttttgagattaaccaactttcaaagggcaataaagacatgtgaatttgctcattttaaagcacaacagatgattagcttcaaatttattatttgcattggatgggtactgtctttggaaagtctccttatagacaaatatgctgccttacactatgatggcttcattctgatcaggtattttaaaaattagtaccagaaaagatactggaggtaatataatacagtccttcagctttacagatagtgaaaactgaaggccagaaaaggaactaaaactcagcagttcataggggtagagggaaataacctgagaaagccgagttaaatcttaaaatttttactataaggatagagatgatacaagtgaactctgcaaaatagttttgtgaaattaaacaaaaaaatctactcttaatgtatattatttcatatttgtttaacaaaagcagcttgatgcctttgttctggattatacattaagaacaagcattattttaattatgtagtaacatttactatgactttgaagccagatttcaaaatctggctttgttaaattaattggaaacactcttctattaagttaggtattaaaaaaagccaaatatcaataaagatatttttattaattttttatagaaacaaaatagctactataactctattatagtatattaacagcacttagtattatattgacttaaacatagtagctaataaaactagtttatgacatctattgaaattctcagtctgacagttttaaaatagcttaaaactaagcaccgggtatatgaaaaaggaactggaaattttaattgtccagaaatcataggaatactgggaacctgtagttacgggaaatggctgtttttctgaagttgaaaccagtttcaattacaaaaccctctgaaattttgctaagcctatagttatctccctaagaaccataaaaaaagatcattttattgttaatttcattccagtttagcttcctcattttacatgttgggatgtcatgcccttttaatatgcctggcactgcacggtggcagtagcagacttgggcttacccagaaccctaagtctctgacgctataggatagcgaaagaggtaggcaatcgtaacagacactgtataggataaatagggaagagaatgagagaaccaaaataaaaataatttaagaaacaattggtt

SEQ ID NO: 792 - protein, 98 aa, Homo sapien
MLLFKQQHLFLQIATPRKKTGHFSCKYFVQRFVYLSRSFPSVPRMGSRSRLTAKNLPRISCFDLFTPGNYQLLHRSQRGAMNRGSHEPDSLLFIKPRE

SEQ ID NO: 793 - DNA, 2905 bp, Homo sapien
ggccgaatacatcaagcaatggtaacatctttaaatgaagataatgaaagtgtaactgttgaatggatagaaaatggagatacaaaaggcaaagagattgacctggagagcatcttttcacttaaccctgaccttgttcctgatgaagaaattgaacccagtccagaaacacctccacctccagcatcctcagccaaagtaaacaaaattgtaaagaatcgacggactgtagcttctattaagaatgaccctccttcaagagataatagagtggttggttcagcacgtgcacggcccagtcaatttcctgaacagtcttcctctgcacaacagaatggtagtgtttcagatatatctccagttcaagctgcaaaaaaggaatttggacccccttcacgtagaaaatctaattgtgtgaaagaagtagaaaaactgcaagaaaaacgagagaaaaggagattgcaacagcaagaacttagagaaaaaagagcccaggacgttgatgctacaaacccaaattatgaaattatgtgtatgatcagagactttagaggaagtttggattatagaccattaacaacagcagatcctattgatgaacataggatatgtgtgtgtgtaagaaaacgaccactcaataaaaaagaaactcaaatgaaagatcttgatgtaatcacaattcctagtaaagatgttgtgatggtacatgaaccaaaacaaaaagtagatttaacaaggtacctagaaaaccaaacatttcgttttgattatgcctttgatgactcagctcctaatgaaatggtttacaggtttactgctaaaccactagtggaaactatatttgaaaggggaatggctacatgctttgcttatgggcagactggaagtggaaaaactcatactatgggtggtgacttttcaggaaagaaccaagattgttctaaaggaatttatgcattagcagctcgagatgtctttttaatgctaaagaagccaaactataagaagctagaacttcaagtatatgcaaccttctttgaaatttatagtggaaaggtgtttgacttgctaaacaggaaaacaaaattaagagttctagaagatggaaaacagcaggttcaagtggtgggattacaggaacgggaggtcaaatgtgttgaagatgtactgaaactcattgacataggcaacagttgcagaacatccggtcaaacatctgcaaatgcacattcatctcggagccatgcagtgtttcagattattcttagaaggaaaggaaaactacatggcaaattttctctcattgatttggctggaaatgaaagaggagctgatacttccagtgcggacaggcaaactaggcttgaaggtgctgaaattaataaaagccttttagcactcaaggagtgcatcagagccttaggtagaaataaacctcatactcctttccgtgcaagtaaactcactcaggtgttaagagattctttcataggtgaaaactctcgtacctgcatgattgccacaatctctccaggaatggcatcctgtgaaaatactcttaatacattaagatatgcaaatagggtcaaagaattgactgtagatccaactgctgctggtgatgttcgtccaataatgcaccatccaccaaaccagattgatgacttagagacacagtggggtgtggggagttcccctcagagagatgatctaaaacttctttgtgaacaaaatgaagaagaagtctctccacagttgtttactttccacgaagctgtttcacaaatggtagaaatggaagaacaagttgtagaagatcacagggcagtgttccaggaatctattcggtggttagaagatgaaaaggccctcttagagatgactgaagaagtagattatgatgtcgattcatatgctacacaacttgaagctattcttgagcaaaaaatagacattttaactgaactgcgggataaagtgaaatctttccgtgcagctctacaagaggaggaacaagccagcaagcaaatcaacccgaagagaccccgtgccctttaaaccggcatttgctgctaaaggatacccagaaccctcactactgtaacatacaacggttcagctgtaagggccatttgaaagtttggaattttaagtgtctgtggaaaatgttttgtccttcacctgaattacatttcaattttgtgaaacactcttttgtctacaaaatgcttctagtccaggaggcacaaccaagaactgggattaatgaagcattttgtttcatttacacaaatagtgatttacttttggagatccttgtcagttttattttctatttgatgaagtaagactgtggactcaatccagagccagatagtaggggaagccacagcatttccttttaactcagttcaatttttgtagtgagactgagcagttttaaatcctttgcgtgcatgcatacctcatcagtgattgtacataccttgcccactcctagagacagctgtgctcacttttcctgctttgtgccttgattaaggctactgaccctaaatttctgaagcacagccaagaaaaattacattccttgtcattgtaaattacctttgtgtgtacatttttactgtatttgagacattttttgtgtgtgactagttaattttgcaggatgtgccatatcattgaacggaactaaagtctgtgacagtggatatagctgctggaccattccatcttatatgtaaagaaatctggaattattattttaaaaccatataacatgtgattataatttttcttagcattttctttgtaaagaactacaatataaactagttggtgtataataaaaagtaatgaaattctgaagaaaaaaaaaaaaaaaaaaaaaaaaaaaaaaaaa

SEQ ID NO: 794 - protein, 679 aa, Homo sapien
MVTSLNEDNESVTVEWIENGDTKGKEIDLESIFSLNPDLVPDEEIEPSPETPPPPASSAKVNKIVKNRRTVASIKNDPPSRDNRVVGSARARPSQFPEQSSSAQQNGSVSDISPVQAAKKEFGPPSRRKSNCVKEVEKLQEKREKRRLQQQELREKRAQDVDATNPNYEIMCMIRDFRGSLDYRPLTTADPIDEHRICVCVRKRPLNKKETQMKDLDVITIPSKDVVMVHEPKQKVDLTRYLENQTFRFDYAFDDSAPNEMVYRFTAKPLVETIFERGMATCFAYGQTGSGKTHTMGGDFSGKNQDCSKGIYALAARDVFLMLKKPNYKKLELQVYATFFEIYSGKVFDLLNRKTKLRVLEDGKQQVQVVGLQEREVKCVEDVLKLIDIGNSCRTSGQTSANAHSSRSHAVFQIILRRKGKLHGKFSLIDLAGNERGADTSSADRQTRLEGAEINKSLLALKECIRALGRNKPHTPFRASKLTQVLRDSFIGENSRTCMIATISPGMASCENTLNTLRYANRVKELTVDPTAAGDVRPIMHHPPNQIDDLETQWGVGSSPQRDDLKLLCEQNEEEVSPQLFTFHEAVSQMVEMEEQVVEDHRAVFQESIRWLEDEKALLEMTEEVDYDVDSYATQLEAILEQKIDILTELRDKVKSFRAALQEEEQASKQINPKRPRAL

SEQ ID NO: 795 - DNA, 1875 bp, Homo sapien
ccgcccgggcaggtgctggtgccgctgtccacggagatgcctcggcagtggaatccaatttctttccagccacaacctaccccatgggtcgacctatcagatgcgccggccgggcggagagctgccactgtccaaatcatattcttctggaaacagaaaaggctttctgtccggcttgctagataatgtcaaacaagaattagccaaaaacaaagaaatgaaagaaagtataaaaaaattccgtgacgaggccagaaggctagaagaatcagacgtgctccaggaggccagaaggaaatacaaaaccatcgagtcagaaaccgtgcggacaagcgaggtgctacggaagaagcttggggagctgacgggcaccgtgaaggagagccttcacgaagtcagtaaaagtgatctcggccggaaaatcaaggagggcgtggaggaagcagccaagacggccaagcagtcggccgagtcggtatccaaaggcggggagaagctgggcaggacagcggccttcagagccctctcccagggggtggagtccgtgaagaaggaaattgacgacagcgtcctgggacagaccgggccctaccggaggccccagcgactccggaagagaacggagtttgcgggagataagttcaaggaggagaaagtgtttgagccaaacgaggaggccctgggggtcgtgctgcacaaggactccaagtggtaccagcagtggaaggacttcaaggagaacaacgtggtgtttaaccggttcttcgagatgaagatgaagtatgacgaaagcgacaacgcgttcatccgggcatcccgggcccttacggacaaggtcaccgacttgctggggggcctgttctccaagacagagatgtcggaggtgctcacggagatcctccgggtggacccgccctttgacaaggaccggtttctgaaacagtgcgagaacgacatcatccccaatgtcctggaggccatgatttctggagagcttgacattctcaaagactggtgctatgaagctacttacagccagctggcccaccccatccagcaggccaaggcactgggtctccagttccattctcgcatcctagacattgacaacgtcgacctggccatgggcaagatgatggagcaggggccggtgctgatcatcaccttccaggcacagctggtgatggtggtcaggaaccccaaaggcgaggtggtggagggtgacccggacaaggtgctgcggatgctgtacgtgtgggcgctctgccgagaccaggacgagctcaacccctacgcggcctggcggctcctggacatctcggcctccagcaccgagcagattctctgagtgtggtgccggagccaggtagccccggcctgggtcatcaggcacagaggcaccgcaacaccacctgcggcaactccagacctctgggaacaagactgcgggctctgcccccagctctgccaggacggctgcaagaccagctggcccgggaggggacaacgggctgttgcgggtgcgcggcagctggagacactcccccgcagggccaacccctgccctgttgctctgccctgcaggggtcccggcgcatggtcacctggggtgcacacaggtcacacagtgccaagaggccccagggcccagggactccccccacagcagggtgggacccgggacccgcggctcagtggcccgctagccacgtcagccaagccactttaggtccattttttaattttaacagtgctcttccatcttgtgcataagcctgagatttggaaagaataaaacaccgaattgcagaagagcaaaaaaaaaaaaaaaaaaaaaaaaaaaaaaaaaaaaaacaaaaaaaaaaaaaaaaaaaa

SEQ ID NO: 796 - protein, 415 aa, Homo sapien [sequence omitted]

SEQ ID NO: 797 - DNA, 6568 bp, Homo sapien
cttgccatcgtgagagattggtacatgatgtgtaaattcagttcagcatatgtttcttcattatgaaaccactagcaatcccagctaaccatggagttatgggccagcaggagaaacactcacttcctgcagatttcacaaaactgcatcttactgacagtctccacccacaggtgacccacgtttcttctagccattcaggatgtagtatcactagtgattctgggagcagcagtctttctgatatctaccaggccacagaaagcgaggctggtgatatggacctgagtgggttgccagaaacagcagtggattccgaagacgacgacgatgaagaagacattgagagagcatcagatcctctgatgagcagggacattgtgagagactgcctagagaaggacccaattgaccggacagatgatgacattgaacaactcttggaatttatgcaccagttgcctgcttttgccaatatgacaatgtcagtgaggcgagaactctgtgctgtgatggtgttcgcagtggtggaaagagcagggaccatagtgttaaatgatggtgaagagctggactcctggtcagtgattctcaatggatctgtggaagtgacttatccagatggaaaagcagaaatactgtgcatgggaaatagttttggtgtctctcctaccatggacaaagaatacatgaaaggagtgatgagaacaaaggtggatgactgccagtttgtctgcatagcccagcaagattactgccgtattctcaatcaagtagaaaagaacatgcaaaaagttgaagaggaaggagagattgttatggtgaaagaacaccgagaacttgatcgaactggaacaagaaagggacacattgtcatcaagggtacctcagaaaggttaacaatgcatttggtggaagagcattcagtagtagatccaacattcatagaagactttctgttgacctataggacttttctttctagcccaatggaagtgggcaaaaagttattggagtggtttaatgacccgagcctcagggataaggttacacgggtagtattattgtgggtaaataatcacttcaatgactttgaaggagatcctgcaatgactcgatttttagaagaatttgaaaacaatctggaaagagagaaaatgggtggacacctaaggctgttgaatatcgcgtgtgctgctaaagcaaaaagaagattgatgacgttaacaaaaccatcccgagaagctcctttgccttttatcttacttggaggctctgagaagggatttggaatctttgttgacagtgtagattcaggtagcaaagcaactgaagcaggcttgaaacggggggatcagatattagaagtaaatggccaaaactttgaaaacattcagctgtcaaaagctatggaaattcttagaaataacacacatttatctatcactgtgaaaaccaatttatttgtatttaaagaacttctaacaagattgtcagaagagaaaagaaatggtgccccccaccttcctaaaattggtgacattaaaaaggccagtcgctactccattccagatcttgctgtagatgtagaacaggtgataggacttgaaaaagtgaacaaaaaaagtaaagccaacactgtgggaggaaggaacaagctgaaaaagatactcgacaagactcggatcagtatcttgccacagaaaccatacaatgatattgggattggtcagtctcaagatgacagcatagtaggattaaggcagacaaagcacatcccaactgcattgcctgtcagtggaaccttatcatccagtaatcctgatttattgcagtcacatcatcgcattttagacttcagtgctactcctgacttgccagatcaagtgctaagggtttttaaggctgatcagcaaagccgctacatcatgatcagtaaggacactacagcaaaggaagtggtcattcaggctatcagggagtttgctgttactgccaccccggatcaatattcactatgtgaggtctctgtcacacctgagggagtaatcaaacaaagaagacttccagatcagctttccaaacttgcagacagaatacaactgagtggaaggtattatctgaaaaacaacatggaaacagaaactctttgttcagatgaagatgctcaggagttgttgagagagagtcaaatttccctccttcagctcagcactgtggaagttgcaacacagctctctatgcgaaattttgaactctttcgcaacattgaacctactgaatatatagatgatttatttaaactcagatcaaaaaccagctgtgccaacctgaagagatttgaagaagtcattaaccaggaaacattttgggtagcatctgaaattctcagagaaacaaaccagctgaagaggatgaagatcattaagcatttcatcaagatagcactgcactgtagggaatgcaagaattttaactcaatgtttgcaatcatcagtggcctaaacctggcaccagtggcaagactgcgaacgacctgggagaaacttcccaataaatacgaaaaactatttcaagatctccaagacctgtttgatccttccagaaacatggcaaaatatcgtaatgttctcaatagtcaaaatctacaacctcccataatccctctattcccagttatcaaaaaggatctcaccttccttcacgaaggaaatgactcaaaagtagacgggctggtcaattttgagaagctaaggatgattgcaaaagaaattcgtcacgttggccgaatggcttcagtgaacatggaccctgccctcatgttcaggactcggaagaagaaatggcggagtttggggtctctcagccagggtagtacaaatgcaacagtgctagatgttgctcagacaggtggtcataaaaagcgggtacgtcgtagttcctttctcaatgccaaaaagctttatgaagatgcccaaatggctcgaaaagtgaagcagtacctttccaatttggagctagaaatggacgaggagagtcttcagacattatctctgcagtgtgagccagcaaccaacacattgcctaagaatcctggtgacaaaaagcctgtcaaatccgagacctctccagtagctccaagggcagggtcacaacagaaagctcagtccctgccacagccccagcagcagccaccaccagcacataaaatcaaccagggactacaggttcccgccgtgtccctttatccttcacggaagaaagtgcccgtaaaggatctcccaccttttggcataaactctccacaagctttaaaaaaaattctttctttgtctgaagaaggaagtttggaacgtcacaagaaacaggctgaagatacaatatcaaatgcatcttcgcagctttcttctcctcctacttctccacagagttctccaaggaaaggctatactttggctcccagtggtactgtggataatttttcagattctggtcacagtgaaatttcttcacgatccagtattgttagcaattcgtcttttgactcagtgccagtctcactgcacgatgagaggcgccagaggcattctgtcagcatcgtggaaacaaacctagggatgggcaggatggagaggcggaccatgattgaacctgatcagtatagcttggggtcctatgcaccaatgtccgagggccgaggcttatatgctacagctacagtaatttcttctccaagcacagaggaactttcccaggatcagggggatcgcgcgtcacttgatgctgctgacagtggccgtgggagctggacgtcatgctcaagtggctcccatgataatatacagacgatccagcaccagagaagctgggagactcttccattcgggcatactcactttgattattcaggggatcctgcaggtttatgggcatcaagcagccatatggaccaaattatgttttctgatcatagcacaaagtataacaggcaaaatcaaagtagagagagccttgaacaagcccagtcccgagcaagctgggcgtcttccacaggttactggggagaagactcagaaggtgacacaggcacaataaagcggaggggtggaaaggatgtttccattgaagccgaaagcagtagcctaacgtctgtgactacggaagaaaccaagcctgtccccatgcctgcccacatagctgtggcatcaagtactacaaaggggctcattgcacgaaaggagggcaggtatcgagagcccccgcccacccctcccggctacattggaattcccattactgactttccagaagggcactcccatccagccaggaaaccgccggactacaacgtggcccttcagagatcgcggatggtcgcacgatcctccgacacagctgggccttcatccgtacagcagccacatgggcatcccaccagcagcaggcctgtgaacaaacctcagtggcataaaccgaacgagtctgacccgcgcctcgccccttatcagtcccaagggttttccaccgaggaggatgaagatgaacaagtttctgctgtttgaggcacagacttttctggaagcagagcgagccacctgaaaggagagcacaagaagacgtcctgagcattggagccttggaactcacattctgaggacggtggaccagtttgcctccttccctgccttaaaagcagcatggggcttcttctccccttcttcctttcccctttgcatgtgaaatactgtgaagaaattgccctggcacttttcagactttgttgcttgaaatgcacagtgcagcaatcttcgagctcccactgttgctgcctgccacatcacacagtatcattccaaattccaagatcatcacaacaagatgattcactctggctgcacttctcaatgcctggaaggattttttttaatcttccttttagatttcaatccagtcctagcacttgatctcattgggataatgagaaaagctagccattgaactacttggggcctttaacccaccaaggaagacaaagaaaaacaatgaaatcctttgagtacagtgcttgtccacttgtttacaatgtcctccttttaaaaaaaaaaatgagtttaaagattttgttcagagagtaaatatatatccatttaatgattacagtattattttaaaccttaagtagggttgccagcctggtttctgaaaaaccaaatatgccggacagggtgtggccacaccaagaagacgggaagacctggcttgtgaccctggcttcccatgtccttctggtctcacccgcgaagtgccctatcctggaagtatgaaatgttagccaattaataccaagacacctcatctgctccttccccagtggatggggttcttctgtaaaactgtttgcacatggccaggggagggaactaggacccttgtgtcctgtctgagccttatggaggcaggacggtgtcattggcggatgtgtcctgctccattgagatggatggcaaaccccatttttaagttatatttctttgatttttgttaatttagaggtgtaggttttgttttttgttttttgtttttttttaagagaaacatttataactggatagcattgcagtgaaagcagcttgggatgttggagctaatgccagctgtttatactgctctttcaagacagcctccctttattgaattggcattagggaataaacaagcctttaaacgtgataaaagatcaaaaacctggttagacatgccagcctttgcaaggcaggttagtcaccaaagactaacctccaagtggctttatggacgctgcatatagagaaggcctaagtgtagcaaccatctgctcacagctgctattaaccctataatgactgaaatgacccctccactctatttttgtgttgttttgcacagactccggaaaagtgaaggctgccaatctgagtagtactcaaatgtgaggaactgctggtcttggattttttttccattaaattcagctgatcatattgatcagtagataaacgtaaatagcttcaaattttaaaagtggaattgcagtgttttttcactgtatcaaacaatgtcagtgctttatttaataattctcttctgtatcatggcatttgtctacttgcttattacattgtcaattatgcatttgtaattttacatgtaatatgcattatttgccagttttattatataggctatggacctcatgtgcatatagaaagacagaaatctagctctaccacaagttgcacaaatgttatctaagcattaagtaattgtagaacataggactgctaatctcagttcgctctgtgatgtcaagtgcagaatgtacaattaactggtgatttcctcatacttttgatactacttgtacctgtatgtcttttagaaagacattggtggagtctgtatcccttttgtatttttaatacaataattgtacatattggttatatttttgttgaagatggtagaaatgtactatgtttatgcttctacatccagtttgtacaagctggaaaataaataaatataacat

SEQ ID NO: 798 - protein, 1499 aa, Homo sapien
MKPLAIPANHGVMGQQEKHSLPADFTKLHLTDSLHPQVTHVSSSHSGCSITSDSGSSSLSDIYQATESEAGDMDLSGLPETAVDSEDDDDEEDIERASDPLMSRDIVRDCLEKDPIDRTDDDIEQLLEFMHQLPAFANMTMSVRRELCAVMVFAVVERAGTIVLNDGEELDSWSVILNGSVEVTYPDGKAEILCMGNSFGVSPTMDKEYMKGVMRTKVDDCQFVCIAQQDYCRILNQVEKNMQKVEEEGEIVMVKEHRELDRTGTRKGHIVIKGTSERLTMHLVEEHSVVDPTFIEDFLLTYRTFLSSPMEVGKKLLEWFNDPSLRDKVTRVVLLWVNNHFNDFEGDPAMTRFLEEFENNLEREKMGGHLRLLNIACAAKAKRRLMTLTKPSREAPLPFILLGGSEKGFGIFVDSVDSGSKATEAGLKRGDQILEVNGQNFENIQLSKAMEILRNNTHLSITVKTNLFVFKELLTRLSEEKRNGAPHLPKIGDIKKASRYSIPDLAVDVEQVIGLEKVNKKSKANTVGGRNKLKKILDKTRISILPQKPYNDIGIGQSQDDSIVGLRQTKHIPTALPVSGTLSSSNPDLLQSHHRILDFSATPDLPDQVLRVFKADQQSRYIMISKDTTAKEVVIQAIREFAVTATPDQYSLCEVSVTPEGVIKQRRLPDQLSKLADRIQLSGRYYLKNNMETETLCSDEDAQELLRESQISLLQLSTVEVATQLSMRNFELFRNIEPTEYIDDLFKLRSKTSCANLKRFEEVINQETFWVASEILRETNQLKRMKIIKHFIKIALHCRECKNFNSMFAIISGLNLAPVARLRTTWEKLPNKYEKLFQDLQDLFDPSRNMAKYRNVLNSQNLQPPIIPLFPVIKKDLTFLHEGNDSKVDGLVNFEKLRMIAKEIRHVGRMASVNMDPALMFRTRKKKWRSLGSLSQGSTNATVLDVAQTGGHKKRVRRSSFLNAKKLYEDAQMARKVKQYLSNLELEMDEESLQTLSLQCEPATNTLPKNPGDKKPVKSETSPVAPRAGSQQKAQSLPQPQQQPPPAHKINQGLQVPAVSLYPSRKKVPVKDLPPFGINSPQALKKILSLSEEGSLERHKKQAEDTISNASSQLSSPPTSPQSSPRKGYTLAPSGTVDNFSDSGHSEISSRSSIVSNSSFDSVPVSLHDERRQRHSVSIVETNLGMGRMERRTMIEPDQYSLGSYAPMSEGRGLYATATVISSPSTEELSQDQGDRASLDAADSGRGSWTSCSSGSHDNIQTIQHQRSWETLPFGHTHFDYSGDPAGLWASSSHMDQIMFSDHSTKYNRQNQSRESLEQAQSRASWASSTGYWGEDSEGDTGTIKRRGGKDVSIEAESSSLTSVTTEETKPVPMPAHIAVASSTTKGLIARKEGRYREPPPTPPGYIGIPITDFPEGHSHPARKPPDYNVALQRSRMVARSSDTAGPSSVQQPHGHPTSSRPVNKPQWHKPNESDPRLAPYQSQGFSTEEDEDEQVSAV

SEQ ID NO: 799 - DNA, 2677 bp, Homo sapien
gggcgcggtgtgccgcggggcagttgcgggttgtcataacggtccccgccggagtgaggcgaggccgcgtcgctcagttctggccgtctagggcccctgtaaggatgagagcgcagaggacgcagggccgctggaggcgcaggtaacgaagctagggtgcggttgggaccgcggctgagctttttccgggacccgtggtgctgaatggagaggacggagacgaagccgagccgcggctcctagcggcggcgccgatgctcgagctgtagctgccaggcgaggatgtgtggagcgcaggcggcgcggggtaaatgagaggtctcgggccccaggacccccggggcccgggatgagttagcgagggcagccgcgggggccagttccgaccgtgacaggccaaggcgacggccgccgcccgcccgccccttccgtgcagaagcagctgctcctttccgcgcccgcccgcctgcgctcccggccctggagaccatgaggttccgcatctacaaacggaaggtgctaatcctgacgctcgtggtggccgcctgcggcttcgtcctctggagcagcaatgggcgacaaaggaagaacgaggccctcgccccaccgttgctggacgccgaacccgcgcggggtgccggcggccgcggtggggaccacccctctgtggctgtgggcatccgcagggtctccaacgtgtcggcggcttccctggtcccggcggtcccccagcccgaggcggacaacctgacgctgcggtaccggtccctggtgtaccagctgaactttgatcagaccctgaggaatgtagataaggctggcacctgggccccccgggagctggtgctggtggtccaggtgcataaccggcccgaatacctcagactgctgctggactcacttcgaaaagcccagggaattgacaacgtcctcgtcatctttagccatgacttctggtcgaccgagatcaatcagctgatcgccggggtgaatttctgtccggttctgcaggtgttctttcctttcagcattcagttgtaccctaacgagtttccaggtagtgaccctagagattgtcccagagacctgccgaagaatgccgctttgaaattggggtgcatcaatgctgagtatcccgactccttcggccattatagagaggccaaattctcccagaccaaacatcactggtggtggaagctgcattttgtgtgggaaagagtgaaaattcttcgagattatgctggccttatacttttcctagaagaggatcactacttagccccagacttttaccatgtcttcaaaaagatgtggaaactgaagcagcaagagtgccctgaatgtgatgttctctccctggggacctatagtgccagtcgcagtttctatggcatggctgacaaggtagatgtgaaaacttggaaatccacagagcacaatatgggtctagccttgacccggaatgcctatcagaagctgatcgagtgcacagacactttctgtacttatgatgattataactgggactggactcttcaatacttgactgtatcttgtcttccaaaattctggaaagtgctggttcctcaaattcctaggatctttcatgctggagactgtggtatgcatcacaagaaaacctgtagaccatccactcagagtgcccaaattgagtcactcttaaataataacaaacaatacatgtttccagaaactctaactatcagtgaaaagtttactgtggtagccatttccccacctagaaaaaatggagggtggggagatattagggaccatgaactctgtaaaagttatagaagactgcagtgaaaatcacagttacaaaagcgacagtcttctatttttgatatttgtccaaacaggacatacaattgaataaaagagtttaggaactggtttctgctttaatacaaaaacaaaatcttgtaaaaggtgtccaaatacatagtaatcttttccagttatgtctgattaagatttaaaactgaaggtttcattttgggagtagggttttaaagctcaatctgttatctgctaaaattgattattgttgatatgagagaagaggggaaattttatttaaattgcatttattaatctttttatctgaaactttgtacacttttccactttcaaaacctattttaagtacagcaaaatttatttaaaactgtgatagcagtaaaaagtattacgatgaaattgttagggtattaatggaacaaacccagtttcactctcttgacacacttattaggaagggattgcttcactggtttaataatttaaaagttatgtttgttaaacaccctgtcagaacagtcattttcagtattagattcctgtactattgtgttttgagtgtgttttggaaccttcatagaacacactttcttttggaatgtatttgattgataagaaagtttaaacattgttttcacctcaatgtagaaatacagtggttttgtttttttttttcttttagtgctgacaaaataaaatactcatttttgcataaaaaggttcctaatccttttgcagaataagttttgtttactctttataccaaaattcagtgaaggcattctacaagttttgagttagcattacattttaatatttactattgctacattgtataattgagtttgaa

SEQ ID NO: 800 - protein, 447 aa, Homo sapien
MRFRIYKRKVLILTLVVAACGFVLWSSNGRQRKNEALAPPLLDAEPARGAGGRGGDHPSVAVGIRRVSNVSAASLVPAVPQPEADNLTLRYRSLVYQLNFDQTLRNVDKAGTWAPRELVLVVQVHNRPEYLRLLLDSLRKAQGIDNVLVIFSHDFWSTEINQLIAGVNFCPVLQVFFPFSIQLYPNEFPGSDPRDCPRDLPKNAALKLGCINAEYPDSFGHYREAKFSQTKHHWWWKLHFVWERVKILRDYAGLILFLEEDHYLAPDFYHVFKKMWKLKQQECPECDVLSLGTYSASRSFYGMADKVDVKTWKSTEHNMGLALTRNAYQKLIECTDTFCTYDDYNWDWTLQYLTVSCLPKFWKVLVPQIPRIFHAGDCGMHHKKTCRPSTQSAQIESLLNNNKQYMFPETLTISEKFTVVAISPPRKNGGWGDIRDHELCKSYRRLQ

SEQ ID NO: 801 - DNA, 751 bp, Homo sapien
aggatgatcaagctgttctcgctgaagcagcagaagaaggaggaggagtcggcgggcggcaccaagggcagcagcaagaaggcgtcggcggcgcagctgcggatccagaaggacataaacgagctgaacctgcccaagacgtgtgatatcagcttctcagatccagacgacctcctcaacttcaagctggtcatctgtcctgatgagggcttctacaagagtgggaagtttgtgttcagttttaaggtgggccagggttacccgcatgatccccccaaggtgaagtgtgagacaatggtctatcaccccaacattgacctcgagggcaacgtctgcctcaacatcctcagagaggactggaagccagtccttacgataaactccataatttatggcctgcagtatctcttcttggagcccaaccccgaggacccactgaacaaggaggccgcagaggtcctgcagaacaaccggcggctgtttgagcagaacgtgcagcgctccatgcggggtggctacatcggctccacctactttgagcgctgcctgaaatagggttggcgcatacccacccgccgccacggccacaagccctggcatcccctgcaaatatttattgggggccatgggtaggggtttggggggcggccggtgggggaatcccctgccttggccttgcctccccttcctgccacgtgcccctagttattttttttttaacaccaggctaactaaaggggaatgttactgc

SEQ ID NO: 802 - protein, 183 aa, Homo sapien
MIKLFSLKQQKKEEESAGGTKGSSKKASAAQLRIQKDINELNLPKTCDISFSDPDDLLNFKLVICPDEGFYKSGKFVFSFKVGQGYPHDPPKVKCETMVYHPNIDLEGNVCLNILREDWKPVLTINSIIYGLQYLFLEPNPEDPLNKEAAEVLQNNRRLFEQNVQRSMRGGYIGSTYFERCLK

SEQ ID NO: 803 - DNA, 661 bp, Homo sapien
ccggcggtgacaacggcaacatggccctgaacggagctgaagtcgacgacttctcctgggagcccccgactgaggcggagacgaaggtgctgcaggcgcgacgggagcggcaagatcgcatctcccggctcatgggcgactatctgctgcgcggttaccgcatgctgggcgagacgtgtgcggactgcgggacgatcctcctccaagacaaacagcggaaaatctactgcgtggcttgtcaggaactcgactcagacgtggataaagataatcccgctctgaatgcccaggctgccctctcccaagctcgggagcaccagctggcctcagcctcagagctccccctgggctctcgacctgcgccccagcccccagtacctcgtccggagcactgtgagggagctgcagcaggactcaaggcagcccaggggccacctgctcctgctgtgcctccaaatacagatgtcatggcctgcacacagacagccctcttgcagaagctgacctgggcctctgctgaactgggctccagcacctccctggagactagcatccagctgtgtggccttatccgcgcatgtgcggaggccctgcgcagcctgcagcagctacagcactaagagaagcccctgagaaaaaccctctagaaaaacaaaaaaaa

SEQ ID NO: 804 - protein, 199 aa, Homo sapien
MALNGAEVDDFSWEPPTEAETKVLQARRERQDRISRLMGDYLLRGYRMLGETCADCGTILLQDKQRKIYCVACQELDSDVDKDNPALNAQAALSQAREHQLASASELPLGSRPAPQPPVPRPEHCEGAAAGLKAAQGPPAPAVPPNTDVMACTQTALLQKLTWASAELGSSTSLETSIQLCGLIRACAEALRSLQQLQH

SEQ ID NO: 805 - DNA, 3497 bp, Homo sapien
cactgctcctccggctcccgggaagccgcgagtttccgcagggaggcggcggcagctgcggcggggccggtctgtagcctttgctgagtcaacactactcacagtgaaagtgatgccttttctccatttgcacaacatgagtgtgacgtggttagccagaccaggagctcaacctcatgtagaatccagtccactgctctgatgccgaaggggaggcagaaagtgccacacttggatgcccccctgggcctgcccacctgcctctggctggaattagccgggctcttcttactggttccctgggtcatgggcctggcagggacaggtgggcctgatggccagggcacaggggggccgagctgggctgtgcacctggaaagcctggaaggtgacggggaggaagagactctggagcagcaggcggatgccttggcccaggcagcagggctggtgaatgctggacgcatcggagagcttcaggggcactacctctttgtccagcctgctgggcacaggccggccctggaggtggaggccatccggcagcaggtggaggctgtgttggctgggcatgaagctgtgcgctggcactcagagcagaggctgctaaggcgggccaagcgcagcgtccacttcaacgaccccaagtacccgcagcaatggcacctgaataaccgacggagcccgggcagggacatcaacgtgacgggtgtgtgggaacgcaatgtgactgggcgaggggtgacggtggtggtagtggatgacggagtggaacacaccatccaggacattgcacccaactatagccctgagggtagctatgacctcaactctaatgaccctgaccccatgccccacccggatgtggagaatggcaaccaccatggcacgcgatgtgcaggagagatcgcggctgtgcccaacaacagcttctgtgccgtgggcgtggcctacgggagccgcatcgcaggtatccgggtactggatggacctctcacagacagcatggaggcagtggcgttcaacaagcactatcagatcaatgacatctacagctgcagctggggaccagatgacgatgggaagacagtggatggcccccatcagcttggaaaggctgccttacaacatggggtgattgctggtcgccagggctttgggagcatctttgtggtagccagtggcaacggaggccaacacaacgacaactgcaactacgatggctacgccaactccatctacaccgtcaccataggagctgtggatgaggagggacgcatgcctttctatgcagaagaatgtgcctccatgctggcagtcaccttcagtggtggggacaagatgcttcggagcattgtgaccactgactgggaccttcagaagggcactggctgcactgagggccacacagggacctcagctgcagcgcctctggcagctggcatgatagccttaatgctgcaggtgcggccctgcctcacgtggcgtgacgtccagcacatcattgtcttcacagccacccggtatgaggatcgccgtgcagagtgggtcaccaacgaggcaggcttcagccatagccaccagcacggtttcggcctcctcaacgcctggaggctcgtgaatgcagccaagatctggacatctgtcccttacttagcatcctacgtcagtcccgtgttaaaagaaaacaaggcgattccgcagtccccccgttccctggaggtcctgtggaatgtcagcaggatggacctggagatgtcagggctgaagaccctggagcatgtggcagtgacagtctccatcactcacccacggcgcggcagcttggagctgaagctgttctgccccagtggcatgatgtccctcatcggcgccccccgcagcatggactcggatcccaacggcttcaatgactggaccttctccactgtgcgatgctggggggagagagcccgagggacctacaggcttgtcatcagggatgtcggggatgagtcattccaggtcggcatcctccggcaatggcagctgaccctatatggctctgtgtggagtgcagtagacatcagggacagacaaaggctgttagagagtgccatgagtggaaaatacctgcacgatgacttcgccctgccctgcccaccggggctgaaaattcctgaggaagatggttacaccatcacccccaacaccctcaagaccctggtgctggtaggctgtttcaccgtcttctggactgtttactacatgctggaagtatatttgagccagaggaatgtggcttccaatcaagtttgtaggagtggaccctgccactggccccatcggagccggaaagccaaggaggaagggacagagctagaatcagtgccactttgcagcagcaaggatccagacgaagtggaaacagagagcaggggccctcccaccacctctgacctccttgccccagacctgctggagcaaggggactggagcctgtcccagaacaagagcgccctggactgccctcatcagcacctagacgtaccgcacgggaaggaggagcagatctgctgacctcagggcctgacagtgtgggacaggctcttctttcccaaaattagggagctcttgacagaaagcagttctgatgcttacatctggaatctgaggcatcctctgactccactcaaagagggtgagggccttcttaagatacaaatggtggaggattgctgccagagaagtctggtcagagccacagggtctgcctccagccaaacgggagcttttggtgagaaggtgttggacaggggattggcgcccccctttggtttggcctccatcctcatctctcttgggccaagccagctgcctaggtcccccaagcatgggggaccccttcccacatataagttgagaaggtgcctgccatagccaggagcgcatctcaatggaaacatcactggggtcacttgggaagaggacttcggggtagaggctgggaggagcccctggacatgcctgtcctgaaagcggctgcctccattatccattcccaagatgcctgatcagaaaccaaccatgaatgaacccctggctccttcaccacccccacgattggtatgatgctgccggcacagctgggatacacacggctcccccaggcctgagctgcttcactagggaatcctgcggcaggactgcagagcagatggcagatgcacatgttggaggagagagccttgggagccactgccactccagtcctgccaccaccctgtcttcctctgcaagtgctcagggaaatggccttcccgccggaggccagctatctgcctgacaggctgtgactcttctctcaaccttggccttctcccctcttctgagctagttggttgaattttttttaatgcttaagatttgtttttctcttttcacagcaacattttcttgaatttttttctgcacagcttttccaaaataaaaaccttccaaacaaaaaaaaaaaaaaa

SEQ ID NO: 806 - protein, 785 aa, Homo sapien
MPKGRQKVPHLDAPLGLPTCLWLELAGLFLLVPWVMGLAGTGGPDGQGTGGPSWAVHLESLEGDGEEETLEQQADALAQAAGLVNAGRIGELQGHYLFVQPAGHRPALEVEAIRQQVEAVLAGHEAVRWHSEQRLLRRAKRSVHFNDPKYPQQWHLNNRRSPGRDINVTGVWERNVTGRGVTVVVVDDGVEHTIQDIAPNYSPEGSYDLNSNDPDPMPHPDVENGNHHGTRCAGEIAAVPNNSFCAVGVAYGSRIAGIRVLDGPLTDSMEAVAFNKHYQINDIYSCSWGPDDDGKTVDGPHQLGKAALQHGVIAGRQGFGSIFVVASGNGGQHNDNCNYDGYANSIYTVTIGAVDEEGRMPFYAEECASMLAVTFSGGDKMLRSIVTTDWDLQKGTGCTEGHTGTSAAAPLAAGMIALMLQVRPCLTWRDVQHIIVFTATRYEDRRAEWVTNEAGFSHSHQHGFGLLNAWRLVNAAKIWTSVPYLASYVSPVLKENKAIPQSPRSLEVLWNVSRMDLEMSGLKTLEHVAVTVSITHPRRGSLELKLFCPSGMMSLIGAPRSMDSDPNGFNDWTFSTVRCWGERARGTYRLVIRDVGDESFQVGILRQWQLTLYGSVWSAVDIRDRQRLLESAMSGKYLHDDFALPCPPGLKIPEEDGYTITPNTLKTLVLVGCFTVFWTVYYMLEVYLSQRNVASNQVCRSGPCHWPHRSRKAKEEGTELESVPLCSSKDPDEVETESRGPPTTSDLLAPDLLEQGDWSLSQNKSALDCPHQHLDVPHGKEEQIC

SEQ ID NO: 807 - DNA, 1910 bp, Homo sapien
aggtttcggcgggggctgcacgtgcgcaggggtgtggaaacttaccggctgagccatggatacaccgttaaggcgcagccgacggctgggaggcctaaggcccgaatcccccgagagcctcacctcagtttcgcggacgagacgggcccttgtggagttcgagtcgaacccagaagaaacgagggagcccgggtctcctccgagtgtgcagcgggctggcctggggtcccccgaaaggccgccgaagacaagcccaggatcaccccgtctgcagcagggtgcaggcttggagtcaccccaagggcagccagagccaggcgcagcgtccccccagcgtcagcaagacctacacctggagtcgcctcaaagacagccagagtacagtcctgaatccccacgatgtcagccgaagccaagtgaggaggcaccaaagtgttctcaggaccagggagtactggcctcggagttggcccagaataaggaggagctgaccccgggggccccccagcatcagctaccgccggtcccaggatcaccagagccttaccccggtcagcaagctcccggtccggagccctctcagccactactggagctgacacccagggcacctggctccccccggggtcagcatgagccgagcaagccacctccagctggggagacggtgacaggcggcttcggggcaaagaagcgaaaaggttcttcatcccaggccccagcgtccaagaagttgaataaagaggagcttcctgtaatcccgaaggggaagcccaaatcggggcgagtgtggaaggaccgctccaagaaaagattctcccagatgcttcaggacaagcccctgcgcacatcgtggcagcggaagatgaaggaacgacaggagaggaagctggccaaggactttgcccgtcacctggaggaggagaaggagaggcgccgccaggagaagaaacagcgccgggctgagaacctgaaacgccgcctggagaatgagcggaaggcagaggtcgtccaagtgatccgaaaccccgccaagctcaagcgggcaaagaagaagcagctgcgctccattgagaagcgggacaccctggccctgctgcagaagcagccgccccagcagccggcagccaagatctgagctcaggacggcccgaggccttccatggccaacgaccatgtcagacacagcacctcaggccgctgctcagatgcctctgctggagctggcactccaaacccatggctccagaacggggacccccaccccgaccggggctcctcggcctttgaaggcttccaggcaggtctgtgtgggacagaagcccagagggggcctgggacctggcagagatgggggcgggaagagattcagctcccatccctccttcctctccttctccaagtgccttcaaaccaagaactgtacattcttctggttcctcagtgagctggtgactggcaggtgactccctcagcagtgtatgccctttctcagcatcctaggtccatcccaggcctggaggctgacagttgggaatccagcttcccccacaccttcccaaaggctgctctgagcacctccacaccccactgcctctgtccccagcaaactgaatccggttcctctccacttttcaatactgaaagattaaaatggggaggttgcagggagcagagcttttccctagcacccactttcccaaaccagtctctgcagaagccccagagaatctaactcatgcctgtccagtctacagcaaaaatatttattgagtgcctgttgcatacaggcacaatcctaggcaccggcaaatacagacaatagaccaaagtccctgccctcgaggagctttcattctgatggagagaaaacataataaacaagcaaaatgcaaaaaaaaaaaaaaaaa

SEQ ID NO: 808 - protein, 360 aa, Homo sapien
MDTPLRRSRRLGGLRPESPESLTSVSRTRRALVEFESNPEETREPGSPPSVQRAGLGSPERPPKTSPGSPRLQQGAGLESPQGQPEPGAASPQRQQDLHLESPQRQPEYSPESPRCQPKPSEEAPKCSQDQGVLASELAQNKEELTPGAPQHQLPPVPGSPEPYPGQQAPGPEPSQPLLELTPRAPGSPRGQHEPSKPPPAGETVTGGFGAKKRKGSSSQAPASKKLNKEELPVIPKGKPKSGRVWKDRSKKRFSQMLQDKPLRTSWQRKMKERQERKLAKDFARHLEEEKERRRQEKKQRRAENLKRRLENERKAEVVQVIRNPAKLKRAKKKQLRSIEKRDTLALLQKQPPQQPAAKI

SEQ ID NO: 809 - DNA, 4740 bp, Homo sapien
ttccggtttttctcaggggacgttgaaattatttttgtaacgggagtcgggagaggacggggcgtgccccgcgtgcgcgcgcgtcgtcctccccggcgctcctccacagctcgctggctcccgccgcggaaaggcgtcatgccgcccaaaaccccccgaaaaacggccgccaccgccgccgctgccgccgcggaacccccggcaccgccgccgccgccccctcctgaggaggacccagagcaggacagcggcccggaggacctgcctctcgtcaggcttgagtttgaagaaacagaagaacctgattttactgcattatgtcagaaattaaagataccagatcatgtcagagagagagcttggttaacttgggagaaagtttcatctgtggatggagtattgggaggttatattcaaaagaaaaaggaactgtggggaatctgtatctttattgcacgagttgacctagatgagatgtcgttcactttactgagctacagaaaaacatacgaaatcagtgtccataaattctttaacttactaaaagaaattgataccagtaccaaagttgataatgctatgtcaagactgttgaagaagtatgatgtattgtttgcactcttcagcaaattggaaaggacatgtgaacttatatatttgacacaacccagcagttcgatatctactgaaataaattctgcattggtgctaaaagtttcttggatcacatttttattagctaaaggggaagtattacaaatggaagatgatctggtgatttcatttcagttaatgctatgtgtccttgactattttattaaactctcacctcccatgttgctcaaagaaccatataaaacagctgttatacccattaatggttcacctcgaacacccaggcgaggtcagaacaggagtgcacggatagcaaaacaactagaaaatgatacaagaattattgaagttctctgtaaagaacatgaatgtaatatagatgaggtgaaaaatgtttatttcaaaaattttataccttttatgaattctcttggacttgtaacatctaatggacttccagaggttgaaaatctttctaaacgatacgaagaaatttatcttaaaaataaagatctagatcgaagattatttttggatcatgataaaactcttcagactgattctatagacagttttgaaacacagagaacaccacgaaaaagtaaccttgatgaagaggtgaatataattcctccacacactccagttaggactgttatgaacactatccaacaattaatgatgattttaaattctgcaagtgatcaaccttcagaaaatctgatttcctattttaacaactgcacagtgaatccaaaagaaagtatactgaaaagagtgaaggatataggatacatctttaaagagaaatttgctaaagctgtgggacagggttgtgtcgaaattggatcacagcgatacaaacttggagttcgcttgtattaccgagtaatggaatccatgcttaaatcagaagaagaacgattatccattcaaaattttagcaaacttctgaatgacaacatttttcatatgtctttattggcgtgcgctcttgaggttgtaatggccacatatagcagaagtacatctcagaatcttgattctggaacagatttgtctttcccatggattctgaatgtgcttaatttaaaagcctttgatttttacaaagtgatcgaaagttttatcaaagcagaaggcaacttgacaagagaaatgataaaacatttagaacgatgtgaacatcgaatcatggaatcccttgcatggctctcagattcacctttatttgatcttattaaacaatcaaaggaccgagaaggaccaactgatcaccttgaatctgcttgtcctcttaatcttcctctccagaataatcacactgcagcagatatgtatctttctcctgtaagatctccaaagaaaaaaggttcaactacgcgtgtaaattctactgcaaatgcagagacacaagcaacctcagccttccagacccagaagccattgaaatctacctctctttcactgttttataaaaaagtgtatcggctagcctatctccggctaaatacactttgtgaacgccttctgtctgagcacccagaattagaacatatcatctggacccttttccagcacaccctgcagaatgagtatgaactcatgagagacaggcatttggaccaaattatgatgtgttccatgtatggcatatgcaaagtgaagaatatagaccttaaattcaaaatcattgtaacagcatacaaggatcttcctcatgctgttcaggagacattcaaacgtgttttgatcaaagaagaggagtatgattctattatagtattctataactcggtcttcatgcagagactgaaaacaaatattttgcagtatgcttccaccaggccccctaccttgtcaccaatacctcacattcctcgaagcccttacaagtttcctagttcacccttacggattcctggagggaacatctatatttcacccctgaagagtccatataaaatttcagaaggtctgccaacaccaacaaaaatgactccaagatcaagaatcttagtatcaattggtgaatcattcgggacttctgagaagttccagaaaataaatcagatggtatgtaacagcgaccgtgtgctcaaaagaagtgctgaaggaagcaaccctcctaaaccactgaaaaaactacgctttgatattgaaggatcagatgaagcagatggaagtaaacatctcccaggagagtccaaatttcagcagaaactggcagaaatgacttctactcgaacacgaatgcaaaagcagaaaatgaatgatagcatggatacctcaaacaaggaagagaaatgaggatctcaggaccttggtggacactgtgtacacctctggattcattgtctctcacagatgtgactgtataactttcccaggttctgtttatggccacatttaatatcttcagctctttttgtggatataaaatgtgcagatgcaattgtttgggtgagtcctaagccacttgaaatgttagtcattgttatttatacaagattgaaaatcttgtgtaaatcctgccatttaaaaagttgtagcagattgtttcctcttccaaagtaaaattgctgtgctttatggatagtaagaatggccctagagtgggagtcctgataacccaggcctgtctgactactttgccttcttttgtagcatataggtgatgtttgctcttgtttttattaatttatatgtatatttttttaatttaacatgaacacccttagaaaatgtgtcctatctatcttccaaatgcaatttgattgactgcccattcaccaaaattatcctgaactcttctgcaaaaatggatattattagaaattagaaaaaaattactaattttacacattagattttattttactattggaatctgatatactgtgtgcttgttttataaaattttgcttttaattaaataaaagctggaagcaaagtataaccatatgatactatcatactactgaaacagatttcatacctcagaatgtaaaagaacttactgattattttcttcatccaacttatgtttttaaatgaggattattgatagtactcttggtttttataccattcagatcactgaatttataaagtacccatctagtacttgaaaaagtaaagtgttctgccagatcttaggtatagaggaccctaacacagtatatcccaagtgcactttctaatgtttctgggtcctgaagaattaagatacaaattaattttactccataaacagactgttaattataggagccttaatttttttttcatagagatttgtctaattgcatctcaaaattattctgccctccttaatttgggaaggtttgtgttttctctggaatggtacatgtcttccatgtatcttttgaactggcaattgtctatttatcttttatttttttaagtcagtatggtctaacactggcatgttcaaagccacattatttctagtccaaaattacaagtaatcaagggtcattatgggttaggcattaatgtttctatctgattttgtgcaaaagcttcaaattaaaacagctgcattagaaaaagaggcgcttctcccctcccctacacctaaaggtgtatttaaactatcttgtgtgattaacttatttagagatgctgtaacttaaaataggggatatttaaggtagcttcagctagcttttaggaaaatcactttgtctaactcagaattatttttaaaaagaaatctggtcttgttagaaaacaaaattttattttgtgctcatttaagtttcaaacttactattttgacagttattttgataacaatgacactagaaaacttgactccatttcatcattgtttctgcatgaatatcatacaaatcagttagtttttaggtcaagggcttactatttctgggtcttttgctactaagttcacattagaattagtgccagaattttaggaacttcagagatcgtgtattgagatttcttaaataatgcttcagatattattgctttattgcttttttgtattggttaaaactgtacatttaaaattgctatgttactattttctacaattaatagtttgtctattttaaaataaattagttgttaagagtc

SEQ ID NO: 810 - protein, 928 aa, Homo sapien
MPPKTPRKTAATAAAAAAEPPAPPPPPPPEEDPEQDSGPEDLPLVRLEFEETEEPDFTALCQKLKIPDHVRERAWLTWEKVSSVDGVLGGYIQKKKELWGICIFIARVDLDEMSFTLLSYRKTYEISVHKFFNLLKEIDTSTKVDNAMSRLLKKYDVLFALFSKLERTCELIYLTQPSSSISTEINSALVLKVSWITFLLAKGEVLQMEDDLVISFQLMLCVLDYFIKLSPPMLLKEPYKTAVIPINGSPRTPRRGQNRSARIAKQLENDTRIIEVLCKEHECNIDEVKNVYFKNFIPFMNSLGLVTSNGLPEVENLSKRYEEIYLKNKDLDRRLFLDHDKTLQTDSIDSFETQRTPRKSNLDEEVNIIPPHTPVRTVMNTIQQLMMILNSASDQPSENLISYFNNCTVNPKESILKRVKDIGYIFKEKFAKAVGQGCVEIGSQRYKLGVRLYYRVMESMLKSEEERLSIQNFSKLLNDNIFHMSLLACALEVVMATYSRSTSQNLDSGTDLSFPWILNVLNLKAFDFYKVIESFIKAEGNLTREMIKHLERCEHRIMESLAWLSDSPLFDLIKQSKDREGPTDHLESACPLNLPLQNNHTAADMYLSPVRSPKKKGSTTRVNSTANAETQATSAFQTQKPLKSTSLSLFYKKVYRLAYLRLNTLCERLLSEHPELEHIIWTLFQHTLQNEYELMRDRHLDQIMMCSMYGICKVKNIDLKFKIIVTAYKDLPHAVQETFKRVLIKEEEYDSIIVFYNSVFMQRLKTNILQYASTRPPTLSPIPHIPRSPYKFPSSPLRIPGGNIYISPLKSPYKISEGLPTPTKMTPRSRILVSIGESFGTSEKFQKINQMVCNSDRVLKRSAEGSNPPKPLKKLRFDIEGSDEADGSKHLPGESKFQQKLAEMTSTRTRMQKQKMNDSMDTSNKEEK

SEQ ID NO: 811 - DNA, 3630 bp, Homo sapien
ggtattccagaagtgtttgaggatcccttccatgaaggaagagaggaaagtttttaagtaaacctcccactcccatgtgtcttcagctttcttttgcaaaggagaaaatccttgaagtttggtaaagaccgagttagtctatctctctttgcctatctcgagttgggctggggagaggaggagataggttcttttgtctttttctgtcttctcccttccccacttccttccctccagtccccactcactcacatgcacacactaaccttggagccgatgggattgagtgactggcacttgggaccacagagaaatgtcagagtgtttggttacagactcaaggaaacctctcattttagagtgctcatttggttttgagcaaaattttggactgtgaagcaaggcattggtgaagacaaaatggcctcgccggctgacagctgtatccagttcacccgccatgccagtgatgttcttctcaaccttaatcgtctccggagtcgagacatcttgactgatgttgtcattgttgtgagccgtgagcagtttagagcccataaaacggtcctcatggcctgcagtggcctgttctatagcatctttacagaccagttgaaatgcaaccttagtgtgatcaatctagatcctgagatcaaccctgagggattctgcatcctcctggacttcatgtacacatctcggctcaatttgcgggagggcaacatcatggctgtgatggccacggctatgtacctgcagatggagcatgttgtggacacttgccggaagtttattaaggccagtgaagcagagatggtttctgccatcaagcctcctcgtgaagagttcctcaacagccggatgctgatgccccaagacatcatggcctatcggggtcgtgaggtggtggagaacaacctgccactgaggagcgcccctgggtgtgagagcagagcctttgcccccagcctgtacagtggcctgtccacaccgccagcctcttattccatgtacagccacctccctgtcagcagcctcctcttctccgatgaggagtttcgggatgtccggatgcctgtggccaaccccttccccaaggagcgggcactcccatgtgatagtgccaggccagtccctggtgagtacagccggccgactttggaggtgtcccccaatgtgtgccacagcaatatctattcacccaaggaaacaatcccagaagaggcacgaagtgatatgcactacagtgtggctgagggcctcaaacctgctgccccctcagcccgaaatgccccctacttcccttgtgacaaggccagcaaagaagaagagagaccctcctcggaagatgagattgccctgcatttcgagccccccaatgcacccctgaaccggaagggtctggttagtccacagagcccccagaaatctgactgccagcccaactcgcccacagagtcctgcagcagtaagaatgcctgcatcctccaggcttctggctcccctccagccaagagccccactgaccccaaagcctgcaactggaagaaatacaagttcatcgtgctcaacagcctcaaccagaatgccaaaccagaggggcctgagcaggctgagctgggccgcctttccccacgagcctacacggccccacctgcctgccagccacccatggagcctgagaaccttgacctccagtccccaaccaagctgagtgccagcggggaggactccaccatcccacaagccagccggctcaataacatcgttaacaggtccatgacgggctctccccgcagcagcagcgagagccactcaccactctacatgcaccccccgaagtgcacgtcctgcggctctcagtccccacagcatgcagagatgtgcctccacaccgctggccccacgttccctgaggagatgggagagacccagtctgagtactcagattctagctgtgagaacggggccttcttctgcaatgagtgtgactgccgcttctctgaggaggcctcactcaagaggcacacgctgcagacccacagtgacaaaccctacaagtgtgaccgctgccaggcctccttccgctacaagggcaacctcgccagccacaagaccgtccataccggtgagaaaccctatcgttgcaacatctgtggggcccagttcaaccggccagccaacctgaaaacccacactcgaattcactctggagagaagccctacaaatgcgaaacctgcggagccagatttgtacaggtggcccacctccgtgcccatgtgcttatccacactggtgagaagccctatccctgtgaaatctgtggcacccgtttccggcaccttcagactctgaagagccacctgcgaatccacacaggagagaaaccttaccattgtgagaagtgtaacctgcatttccgtcacaaaagccagctgcgacttcacttgcgccagaagcatggcgccatcaccaacaccaaggtgcaataccgcgtgtcagccactgacctgcctccggagctccccaaagcctgctgaagcatggagtgttgatgctttcgtctccagccccttctcagaatctacccaaaggatactgtaacactttacaatgttcatcccatgatgtagtgcctctttcatccactagtgcaaatcatagctgggggttgggggtggtgggggtcggggcctgggggactgggagccgcagcagctccccctcccccactgccataaaacattaagaaaatcatattgcttcttctcctatgtgtaaggtgaaccatgtcagcaaaaagcaaaatcattttatatgtcaaagcaggggagtatgcaaaagttctgacttgactttagtctgcaaaatgaggaatgtatatgttttgtgggaacagatgtttcttttgtatgtaaatgtgcattcttttaaaagacaagacttcagtatgttgtcaaagagagggctttaatttttttaaccaaaggtgaaggaatatatggcagagttgtaaatatataaatatatatatatataaaataaatatatataaacctaacaaagatatattaaaaatataaaactgcgttaaaggctcgattttgtatctgcaggcagacacggatctgagaatctttattgagaaagagcacttaagagaatattttaagtattgcatctgtataagtaagaaaatattttgtctaaaatgcctcagtgtatttgtatttttttgcaagtgaaggtttacaatttacaaagtgtgtattaaaaaaaacaaaaagaacaaaaaaatctgcagaaggaaaaatgtgtaattttgttctagttttcagtttgtatatacccgtacaacgtgtcctcacggtgccttttttcacggaagttttcaatgatgggcgagcgtgcaccatccctttttgaagtgtaggcagacacagggacttgaagttgttactaactaaactctctttgggaatgtttgtctcatcccattctgcgtcatgcttgtgttataactactccggagacagggtttggctgtgtctaaactgcattaccgcgttgtaaaatatagctgtacaaatataagaataaaatgttgaaaagtcaaactggaaaaaaaa

SEQ ID NO: 812 - protein, 706 aa, Homo sapien
MASPADSCIQFTRHASDVLLNLNRLRSRDILTDVVIVVSREQFRAHKTVLMACSGLFYSIFTDQLKCNLSVINLDPEINPEGFCILLDFMYTSRLNLREGNIMAVMATAMYLQMEHVVDTCRKFIKASEAEMVSAIKPPREEFLNSRMLMPQDIMAYRGREVVENNLPLRSAPGCESRAFAPSLYSGLSTPPASYSMYSHLPVSSLLFSDEEFRDVRMPVANPFPKERALPCDSARPVPGEYSRPTLEVSPNVCHSNIYSPKETIPEEARSDMHYSVAEGLKPAAPSARNAPYFPCDKASKEEERPSSEDEIALHFEPPNAPLNRKGLVSPQSPQKSDCQPNSPTESCSSKNACILQASGSPPAKSPTDPKACNWKKYKFIVLNSLNQNAKPEGPEQAELGRLSPRAYTAPPACQPPMEPENLDLQSPTKLSASGEDSTIPQASRLNNIVNRSMTGSPRSSSESHSPLYMHPPKCTSCGSQSPQHAEMCLHTAGPTFPEEMGETQSEYSDSSCENGAFFCNECDCRFSEEASLKRHTLQTHSDKPYKCDRCQASFRYKGNLASHKTVHTGEKPYRCNICGAQFNRPANLKTHTRIHSGEKPYKCETCGARFVQVAHLRAHVLIHTGEKPYPCEICGTRFRHLQTLKSHLRIHTGEKPYHCEKCNLHFRHKSQLRLHLRQKHGAITNTKVQYRVSATDLPPELPKAC

SEQ ID NO: 813 - DNA, 2324 bp, Homo sapien
cattttgtgggtggggcttcaggtgccacccagctgaaggatggccacccctgtggtcaccaagacagcctggaagttgcaagagatcgtcgcgcatgccagcaacgtgtcctcactggtgctgggcaaagcctccgggcggctgctggctacaggcggggatgactgccgcgtcaacctgtggtccatcaacaagcccaactgcatcatgagcctgacgggccacacatccccagtggagagcgtccgcctcaacacccccgaggagctcatcgtggccggctctcagtcgggctccatccgtgtctgggacctggaagctgccaaaattcttcgcacactcatgggactcaaagccaacatctgcagcctggatttccacccgtacggcgagtttgtagcctctggttcccaggacacaaacatcaagctctgggacatcaggaggaaaggctgtgtcttccgatacagggggcacagccaggccgtgcggtgtctccggttcagccccgatgggaagtggttggcgtcggccgcagatgaccacaccgtgaagctctgggatctcactgccggcaagatgatgtctgagttccctggtcacacggggcctgtcaacgtggtcgagtttcaccccaacgagtacctcctggcctccggcagctctgacgggacaatccgcttctgggacctggagaagttccaggtggtgagccgcatcgaaggggagcctgggcccgtcaggagcgtcctcttcaacccagacggctgctgcctgtacagcggctgccaggactcactgcgtgtctacggctgggaacctgagcggtgctttgatgtggtcctcgtcaactggggcaaggtggccgacctggccatctgcaatgaccagttgataggtgtggccttctcccagagcaacgtctcctcctacgtggtggatctgacgcgtgtcaccaggactggcacggtggcccgggaccctgtgcaggaccaccggcccctggcacagccactgcccaaccccagcgcccccctccggcgcatctatgagcggcccagcacaacctgcagcaagcctcagagggtgaagcagaactcagagagcgagcgccgcagccccagcagcgaggatgaccgggacgagcgcgagtcccgcgcggagatccagaacgccgaggactacaacgagatcttccagcccaagaacagcatcagtcggacgccaccccggagaagtgagcccttccctgcacccccagaggacgacgcagccacagcaaaggaggcagcaaagcccagccctgccatggatgtgcagttcccggtgccaaatctggaggtcctgccccggcccccagtggttgcttccacacctgcacccaaggctgagcctgccatcatccctgccacccggaacgagcccatcgggctgaaggcctccgacttcctgcccgccgtgaagatcccccagcaggccgagctggtggacgaggatgccatgtcacagatccgcaaaggccacgacaccatgtgtgtggtgctcaccagccgccacaagaacctggacactgtgcgggctgtgtggaccatgggcgacatcaagacgtcggtggactccgctgtggccatcaacgacctgtcggtggtggtggacctcctgaacatcgtcaaccagaaagcctccctgtggaagctggacctgtgcaccaccgtcctgccacagattgagaagcttctgcagagcaagtatgagagctacgtccagacgggctgcacctccctgaagctgatcctgcagcggtttctgcccctcatcacagacatgctggcggccccaccctctgtgggtgtggatatcagcagggaggagaggctgcataagtgccggctctgctacaagcagcttaagagcatcagcggcctggtcaagagcaagtcaggcctgagcggccgccatggcagtaccttccgcgagctgcacctgctcatggccagtctggactgaggaaagcagtgggcaggggcgctcggcagcccacagggcctggcctcagcccccactcctgttccttgtgcacccactggcccatgagcctctgcctggcccctgctgctgtcctgtggccgtcctggaggaggtgatgctggtccctggccacctctacagccctgaactcttgagacaactctctccagcaatagctgcccagctttgcccaactgttgcttcttggggcagcgaactgagccctggggctgctgctgtaatttataaggcaaattttattaaatttgtaactattaaaaaaaaaaaaaaaaaa

SEQ ID NO: 814 - protein, 655 aa, Homo sapien
MATPVVTKTAWKLQEIVAHASNVSSLVLGKASGRLLATGGDDCRVNLWSINKPNCIMSLTGHTSPVESVRLNTPEELIVAGSQSGSIRVWDLEAAKILRTLMGLKANICSLDFHPYGEFVASGSQDTNIKLWDIRRKGCVFRYRGHSQAVRCLRFSPDGKWLASAADDHTVKLWDLTAGKMMSEFPGHTGPVNVVEFHPNEYLLASGSSDGTIRFWDLEKFQVVSRIEGEPGPVRSVLFNPDGCCLYSGCQDSLRVYGWEPERCFDVVLVNWGKVADLAICNDQLIGVAFSQSNVSSYVVDLTRVTRTGTVARDPVQDHRPLAQPLPNPSAPLRRIYERPSTTCSKPQRVKQNSESERRSPSSEDDRDERESRAEIQNAEDYNEIFQPKNSISRTPPRRSEPFPAPPEDDAATAKEAAKPSPAMDVQFPVPNLEVLPRPPVVASTPAPKAEPAIIPATRNEPIGLKASDFLPAVKIPQQAELVDEDAMSQIRKGHDTMCVVLTSRHKNLDTVRAVWTMGDIKTSVDSAVAINDLSVVVDLLNIVNQKASLWKLDLCTTVLPQIEKLLQSKYESYVQTGCTSLKLILQRFLPLITDMLAAPPSVGVDISREERLHKCRLCYKQLKSISGLVKSKSGLSGRHGSTFRELHLLMASLD

SEQ ID NO: 815 - DNA, 1347 bp, Homo sapien
gtggacggagaaagtgaaaggtgaggcacggccctgcagattttccagcggatcccccggtggcctcatgtcgcgcagtggaaccgatcctcagcaacgccagcaggcgtcagaggcggacgccgcagcagcaaccttccgggcaaacgaccatcagcatatccgctacaacccgctgcaggatgagtgggtgctggtgtcagctcaccgcatgaagcggccctggcagggtcaagtggagccccagcttctgaagacagtgccccgccatgaccctctcaaccctctgtgtcctggggccatccgagccaacggagaggtgaatccccagtacgatagcaccttcctgtttgacaacgacttcccagctctgcagcctgatgcccccagtccaggacccagtgatcatccccttttccaagcaaagtctgctcgaggagtctgtaaggtcatgtgcttccacccctggtcggatgtaacgctgccactcatgtcggtccctgagatccgggctgttgttgatgcatgggcctcagtcacagaggagctgggtgcccagtacccttgggtgcagatctttgaaaacaaaggtgccatgatgggctgttctaacccccacccccactgccaggtatgggccagcagtttcctgccagatattgcccagcgtgaggagcgatctcagcaggcctataagagtcagcatggagagcccctgctaatggagtacagccgccaggagctactcaggaaggaacgtctggtcctaaccagtgagcactggttagtactggtccccttctgggcaacatggccctaccagacactgctgctgccccgtcggcatgtgcggcggctacctgagctgacccctgctgagcgtgatgatctagcctccatcatgaagaagctcttgaccaagtatgacaacctctttgagacgtcctttccctactccatgggctggcatggggctcccacaggatcagaggctggggccaactggaaccattggcagctgcacgctcattactaccctccgctcctgcgctctgccactgtccggaaattcatggttggctacgaaatgcttgctcaggctcagagggacctcacccctgagcaggctgcagagagactaagggcacttcctgaggttcattaccacctggggcagaaggacagggagacagcaaccatcgcctgaccacgccgaccacagggccttgaatccttttttgttttcaacagtcttgctgaattaagcagaaagggccttgaatcctggcctggaatttgggcagatatagcattaataaaactgtgcatctcaaaaaaaaaaaaaaa

SEQ ID NO: 816 - protein, 379 aa, Homo sapien
MSRSGTDPQQRQQASEADAAAATFRANDHQHIRYNPLQDEWVLVSAHRMKRPWQGQVEPQLLKTVPRHDPLNPLCPGAIRANGEVNPQYDSTFLFDNDFPALQPDAPSPGPSDHPLFQAKSARGVCKVMCFHPWSDVTLPLMSVPEIRAVVDAWASVTEELGAQYPWVQIFENKGAMMGCSNPHPHCQVWASSFLPDIAQREERSQQAYKSQHGEPLLMEYSRQELLRKERLVLTSEHWLVLVPFWATWPYQTLLLPRRHVRRLPELTPAERDDLASIMKKLLTKYDNLFETSFPYSMGWHGAPTGSEAGANWNHWQLHAHYYPPLLRSATVRKFMVGYEMLAQAQRDLTPEQAAERLRALPEVHYHLGQKDRETATIA

SEQ ID NO: 817 - DNA, 3745 bp, Homo sapien
gaattcggcacgaggccattgaatcccagtcctaacagaagtactgcgaatcttgtggcctcattctgaacaaaagggattagagaagaaaaatctcttgatataaggcttgaaagcaagggcaggcaatcttggttgtgaatattttctgatttttccagaaatcaagcagaagattgagctgctgatgtcagttaactctgagaagtcgtcctcttcagaaaggccggagcctcaacagaaagctcctttagttcctcctcctccaccgccaccaccaccaccaccgccacctttgccagaccccacacccccggagccagaggaggagatcctgggatcagatgatgaggagcaagaggaccctgcggactactgcaaaggtggatatcatccagtgaaaattggagacctcttcaatggccggtatcatgttattagaaagcttggatgggggcacttctctactgtctggctgtgctgggatatgcaggggaaaagatttgttgcaatgaaagttgtaaaaagtgcccagcattatacggagacagccttggatgaaataaaattgctcaaatgtgttcgagaaagtgatcccagtgacccaaacaaagacatggtggtccagctcattgacgacttcaagatttcaggcatgaatgggatacatgtctgcatggtcttcgaagtacttggccaccatctcctcaagtggatcatcaaatccaactatcaaggcctcccagtacgttgtgtgaagagtatcattcgacaggtccttcaagggttagattacttacacagtaagtgcaagatcattcatactgacataaagccggaaaatatcttgatgtgtgtggatgatgcatatgtgagaagaatggcagctgagcctgagtggcagaaagcaggtgctcctcctccttcagggtctgcagtgagtacggctccacagcagaaacctataggaaaaatatctaaaaacaaaaagaaaaaactgaaaaagaaacagaagaggcaggctgagttattggagaagcgcctgcaggagatagaagaattggagcgagaagctgaaaggaaaataatagaagaaaacatcacctcagctgcaccttccaatgaccaggatggcgaatactgcccagaggtgaaactaaaaacaacaggattagaggaggcggctgaggcagagactgcaaaggacaatggtgaagctgaggaccaggaagagaaagaagatgctgagaaagaaaacattgaaaaagatgaagatgatgtagatcaggaacttgcgaacatagaccctacgtggatagaatcacctaaaaccaatggccatattgagaatggcccattctcactggagcagcaactggacgatgaagatgatgatgaagaagactgcccaaatcctgaggaatataatcttgatgagccaaatgcagaaagtgattacacatatagcagctcctatgaacaattcaatggtgaattgccaaatggacgacataaaattcccgagtcacagttcccagagttttccacctcgttgttctctggatccttagaacctgtggcctgcggctctgtgctttctgagggatcaccacttactgagcaagaggagagcagtccatcccatgacagaagcagaacggtttcagcctccagtactggggatttgccaaaagcaaaaacccgggcagctgacttgttggtgaatcccctggatccgcggaatcgagataaaattagagtaaaaattgctgacctgggaaatgcttgttgggtgcataaacacttcacggaagacatccagacgcgtcagtaccgctccatagaggttttaataggagcggggtacagcacccctgcggacatctggagcacggcgtgtatggcatttgagctggcaacgggagattatttgtttgaaccacattctggggaagactattccagagacgaagaccacatagcccacatcatagagctgctaggcagtattccaaggcactttgctctatctggaaaatattctcgggaattcttcaatcgcagaggagaactgcgacacatcaccaagctgaagccctggagcctctttgatgtacttgtggaaaagtatggctggccccatgaagatgctgcacagtttacagatttcctgatcccgatgttagaaatggttccagaaaaacgagcctcagctggcgaatgtcggcatccttggttgaattcttagcaaattctaccaatattgcattctgagctagcaaatgttcccagtacattggacctaaacggtgactctcattctttaacaggattacaagtgagctggcttcatcctcagacctttattttgctttgaggtactgttgtttgacattttgctttttgtgcactgtgatcctggggaagggtagtcttttgtcttcagctaagtagtttactgaccattttcttctggaaacaataacatgtctctaagcattgtttcttgtgttgtgtgacattcaaatgtcatttttttgaatgaaaaatactttcccctttgtgttttggcaggttttgtaactatttatgaagaaatattttagctgagtactatataatttacaatcttaagaaattatcaagttggaaccaagaaatagcaaggaaatgtacaattttatcttctggcaaagggacatcattcctgtattatagtgtatgtaaatgcaccctgtaaatgttactttccattaaatatgggagggggactcaaatttcagaaaagctaccaagtcttgagtgctttgtagcctatgttgcatgtagcggactttaactgctccaaggagttgtgcaaacttttcattccataacagtcttttcacattggattttaaacaaagtggctctgggttataagatgtcattctctatatggcactttaaaggaagaaaagatatgtttctcattctaaaatatgcattataatttagcagtcccatttgtgattttgcatatttttaaaagtacttttaaagaagagcaatttccctttaaaaatgtgatggctcagtaccatgtcatgttgcctcctctgggcgctgtaagttaagctctacatagattaaattggagaaacgtgttaattgtgtggaatgaaaaaatacatatatttttggaaaagcatgatcatgcttgtctagaacacaaggtatggtatatacaatttgcagtgcagtgggcagaatacttctcacagctcaaagataacagtgatcacattcattccataggtagctttacgtgtggctacaacaaattttactagctttttcattgtctttccatgaaacgaagttgagaaaatgattttccctttgcaggttgcacacagttttgtttatgcatttccttaaaattaattgtagactccaggatacaaaccatagtaggcaatacaatttagaatgtaatatatagaggtatattagcctctttagaagtcagtggattgaatgtctttttattttaaattttacattcattaaggtgcctcgtttttgactttgtccattaacatttatccatatgcctttgcaataactagattgtgaaaagctaacaagtgttgtaacaataatccattgtttgaggtgcttgcagttgtcttaaaaattaaagtgttttggtttttttttttccagaaaaaaaaaaaaaaaaaaaaaaaaaaaaaattcctgc

SEQ ID NO: 818 - protein, 686 aa, Homo sapien
MSVNSEKSSSSERPEPQQKAPLVPPPPPPPPPPPPPLPDPTPPEPEEEILGSDDEEQEDPADYCKGGYHPVKIGDLFNGRYHVIRKLGWGHFSTVWLCWDMQGKRFVAMKVVKSAQHYTETALDEIKLLKCVRESDPSDPNKDMVVQLIDDFKISGMNGIHVCMVFEVLGHHLLKWIIKSNYQGLPVRCVKSIIRQVLQGLDYLHSKCKIIHTDIKPENILMCVDDAYVRRMAAEPEWQKAGAPPPSGSAVSTAPQQKPIGKISKNKKKKLKKKQKRQAELLEKRLQEIEELEREAERKIIEENITSAAPSNDQDGEYCPEVKLKTTGLEEAAEAETAKDNGEAEDQEEKEDAEKENIEKDEDDVDQELANIDPTWIESPKTNGHIENGPFSLEQQLDDEDDDEEDCPNPEEYNLDEPNAESDYTYSSSYEQFNGELPNGRHKIPESQFPEFSTSLFSGSLEPVACGSVLSEGSPLTEQEESSPSHDRSRTVSASSTGDLPKAKTRAADLLVNPLDPRNRDKIRVKIADLGNACWVHKHFTEDIQTRQYRSIEVLIGAGYSTPADIWSTACMAFELATGDYLFEPHSGEDYSRDEDHIAHIIELLGSIPRHFALSGKYSREFFNRRGELRHITKLKPWSLFDVLVEKYGWPHEDAAQFTDFLIPMLEMVPEKRASAGECRHPWLNS

SEQ ID NO: 819 - DNA, 507 bp, Homo sapien
ggtgcttctgagatgtgggcttgcacacgctgttgctatagtacgtgtgatcctgactgctgtcatggcgtgccctctggagaaggccctggatgtgatggtgtccaccttccacaagtactcgggcaaagagggtgacaagttcaagctcaacaagtcagaactaaaggagctgctgacccgggagctgcccagcttcttggggaaaaggacagatgaagctgctttccagaagctgatgagcaacttggacagcaacagggacaacgaggtggacttccaagagtactgtgtcttcctgtcctgcatcgccatgatgtgtaacgaattctttgaaggcttcccagataagcagcccaggaagaaatgaaaactcctctgatgtggttggggggtctgccagctggggccctccctgtcgccagtgggcacttttttttttccaccctggctccttcagacacgtgcttgatgctgagcaagttcaataaagattcttggaagttt

SEQ ID NO: 820 - protein, 101 aa, Homo sapien
MACPLEKALDVMVSTFHKYSGKEGDKFKLNKSELKELLTRELPSFLGKRTDEAAFQKLMSNLDSNRDNEVDFQEYCVFLSCIAMMCNEFFEGFPDKQPRKK

SEQ ID NO: 821 - DNA, 6519 bp, Homo sapien
gcacgagcggctccggcggcgccatgacgcgctgggtgcccaccaagcgcgaggagaagtacggcgtggctttttataactatgatgccagaggagcggatgaactttctttacagatcggagacactgtgcacatcttagaaacatatgaagggtggtaccgaggttacacgttacgaaaaaagtctaagaagggtatatttcctgcttcatatattcatcttaaagaagcgatagttgaaggaaaagggcaacatgaaacagtcatcccgggtgacctccccctcatccaggaagtcaccacgacactccgagagtggtccaccatctggaggcagctctacgtgcaagataacagggagatgtttcgaagtgtgcggcacatgatctatgaccttattgaatggcgatcacaaattctttctggaactctgcctcaggatgaactcaaagaactgaagaagaaggtcacagccaaaattgattatggaaacagaattctagatttggacctggtggttagagatgaagatgggaatattttggatccagaattaactagcacgattagtctcttcagagctcatgaaatagcttctaaacaagtggaggaaaggttacaagaggaaaaatctcaaaagcagaacatagatattaacagacaagccaagtttgctgcaaccccttctctggccttgtttgtgaacctcaaaaatgtggtttgtaaaataggagaagatgctgaagtcctcatgtctctatatgaccctgtggagtccaaattcatcagtgagaactacctggttcgctggtccagttcaggattacctaaagacatagacagattacataatttgcgagccgtgtttactgacctcggaagcaaagacctgaaaagggagaaaatcagttttgtctgtcagattgttcgcgtgggtcgcatggagctgagggacaacaacaccaggaaactgacctcggggttgcggcgaccttttggagtggctgtgatggatgtaacagatataataaatggaaaagtagatgatgaagataagcagcatttcattccctttcagccggtggcaggggagaatgacttccttcagactgttataaacaaagtcatcgctgccaaagaagtcaaccacaaggggcagggtttgtgggtaacattgaaattacttcctggagatatccatcagatccgaaaagagtttccgcatttagtggacaggaccacagctgtggctcgaaaaacagggtttccggagataatcatgcctggtgatgttcgaaatgatatctatgtaacattagttcaaggagattttgataaaggaagcaaaacaacagcgaagaacgtggaggtcacggtgtctgtgtacgatgaggatgggaaacgattagagcatgtgattttcccgggtgctggtgatgaagcgatttcagagtacaaatctgtgatttactaccaagtaaagcagccacgctggtttgagactgttaaggtggccattcccatcgaggacgttaaccgcagtcaccttcggtttaccttccgccacaggtcatcacaggactctaaggataaatctgagaaaatatttgcactagcatttgtcaagctgatgagatacgatggtaccaccctgcgagacggagagcacgatcttatcgtctataaggccgaagcgaagaagctggaagatgctgccacgtacttgagtctgccctccacgaaggcagagttggaagaaaagggccactcggccaccggcaagagcatgcagagccttgggagctgcaccattagcaaggactccttccagatctccacgctcgtgtgctccaccaaactgactcagaacgtggaccttctggggctcttgaaatggcgctccaacaccagcctgctgcagcagaacttgaggcagctgatgaaagtcgatggtggtgaagtagtgaagtttcttcaggacacgttggatgccctcttcaacatcatgatggagaactcagagagtgagacttttgacacgttagtctttgatgctctggtatttatcattggactgattgctgatagaaaatttcagcattttaatcctgttttggaaacttacattaagaaacactttagtgcaacgttagcctacacgaagttgacaaaagtgttgaagaactacgtggacggtgctgagaagccgggagtaaatgagcagctgtacaaagccatgaaagcgctagaatccatcttcaagttcatcgtgcgctccaggatcctgttcaatcaactgtatgaaaacaagggagaggctgacttcgtggaatctttgctgcagctcttcaggtccatcaatgacatgatgagcagcatgtcagaccagaccgtccgggtgaagggggcagcactgaaatacttaccaacgatcgtcaacgatgtgaaattggtgtttgatcccaaagagctcagcaaaatgtttactgaattcatcctcaatgttcccatgggcttgctgaccatccagaaactctactgcttgatcgaaatcgtccacagtgacctcttcacacagcatgactgcagagagatcctgcttcccatgatgaccgatcagctcaagtaccatctggagagacaggaggacctggaggcctgctgtcagctgctcagccacatcctggaggtgctgtacaggaaggacgtggggccaacccagaggcacgtccagattatcatggagaaacttctccggaccgtgaaccgaaccgtcatttccatgggacgagattctgaactcattggaaacttcgtggcttgcatgacagctattttacgacaaatggaagattaccattatgcccacttgatcaagacttttgggaaaatgaggactgatgtggtagatttcctaatggaaacattcatcatgtttaagaacctcattggaaagaacgtttaccccttcgactgggtgatcatgaacatggtgcaaaataaagtcttcctgcgagcaattaatcagtatgcagatatgctgaacaaaaaatttctggatcaagccaactttgagctacagctgtggaacaactactttcacctggctgttgctttccttactcaagagtccctgcaactggagaatttttcaagtgccaagagagccaaaatccttaacaagtacggagatatgaggagacagattggctttgaaatcagagacatgtggtacaaccttggtcaacacaagataaagttcattccagaaatggtgggcccaatattagaaatgacattaattcccgagacggagctgcgcaaagccaccatccccatcttctttgatatgatgcagtgtgaattccattcgacccgaagcttccaaatgtttgaaaatgagatcatcaccaagctggatcatgaagtcgaaggaggcagaggagacgaacagtacaaagtgttatttgataaaatccttctggaacactgcaggaagcacaaatacctcgccaaaacaggagaaacttttgtaaaactcgttgtgcgcttaatggaaaggcttttggattatagaaccatcatgcacgacgagaacaaagaaaaccgcatgagctgcaccgtcaatgtgctgaatttctacaaagaaattgaaagagaagaaatgtatataaggtatttgtacaagctctgtgacctgcacaaggagtgtgataactacaccgaagcggcttacaccttgcttctccatgcaaagcttcttaagtggtcggaggatgtgtgtgtggcccacctcacccagcgggacgggtaccaggccaccacgcagggacagctgaaggagcagctctaccaggaaatcatccactacttcgacaaaggcaagatgtgggaggaggccattgccttgggcaaggagctagccgagcagtatgagaacgaaatgtttgattatgagcaactcagcgaattgctgaaaaaacaggctcagttttatgaaaacatcgtcaaagtgatcaggcccaagcctgactattttgctgttggctactacggacaagggttccccacattcctgcggggaaaagttttcatttaccgagggaaagagtatgagcgccgggaagattttgaggctcggctcttaactcagtttccaaacgccgagaaaatgaagacaacatctccaccaggcgacgatattaaaaactctcctggccagtatattcagtgcttcacagtgaagcccaaactcgatctgcctcctaagtttcacaggccagtgtcagagcagattgtaagtttttacagggtgaacgaggtccagcgatttgaatattctcggccaatccggaagggagagaaaaacccagacaatgaatttgcgaatatgtggatcgagagaaccatatatacaactgcatataaattacctggaattttaaggtggtttgaggtcaagtctgttttcatggtggaaatcagccccctggagaatgccatcgagaccatgcagctgacgaacgacaagatcaacagcatggtgcagcagcacctggatgaccccagcctgcccatcaacccgctctccatgctcctgaacggcatcgtggacccagctgtcatggggggcttcgcaaactacgaaaaggccttctttacagaccggtacctgcaggagcaccctgaggcccatgaaaagatcgagaagctcaaggacctgattgcttggcagattccttttctggccgaagggatcagaatccatggagacaaagtcacggaggcactgaggccgttccacgagaggatggaggcctgtttcaaacagctgaaggaaaaggtggagaaagagtacggcgtccgaatcatgccctcaagtctggatgatagaagaggcagccgcccccggtccatggtgcggtccttcacgatgccttcctcatcccgccctctgtctgtggcctctgtctcttccctctcatcggacagcaccccctccagaccaggctccgacgggtttgccctggagcctctcctgccaaagaaaatgcactccaggtcccaggacaagctggacaaggatgacctggagaaggagaagaaggacaagaagaaggaaaaaaggaacagcaaacatcaagagatatttgagaaagaatttaaacccaccgacatttccctgcagcagtctgaggctgtgatcctttcggaaacgataagtcccctgcggccccagagaccgaagagccaggtgatgaacgtcattggaagcgaaaggcgcttctcggtgtccccctcgtcaccgtcctcccagcaaacaccccctccagttacaccaagagccaagctcagcttcagcatgcagtcgagcttggagctgaacggcatgacgggggcggacgtggccgatgtcccaccccctctgcctctcaaaggcagcgtggcagattacgggaatttgatggaaaaccaggacttgctgggctcgccaacacctccacctccccctccacaccagaggcatctgccacctccactgcccagcaaaactccgcctcctccccctccaaagacaactcgcaagcagacatcggtggactctgggatcgtgcagtgacatcgcaaggctctctggaaagagtgtgctgcccctccccatctccatgccctctccttctgtgtcccctgagtctgctgtttacctcattgggcctgtgatgttaacatttcgtgcgactgctttttcttcaaaggagttcagttctcaccatggagtgagtggcctttagcgtcatggagcaaggtgggtctgggaggtagatatgggtccgggatgtgccatcgtagttaccagagttgggggcctctgagtgtgtctggctctgagagagtctgagtcttgcccaaacattctttctttttgtgccaaatgacttgcatttgcaaagagctcaattgctctgagctcagccaagtaggagaggctaggccatcactcttgggaagctgtgtagtgatgatgtataagaatcctcctcactgtcatgggatgttgtatccagcccctccttgttccagccggtggtgtgacttcgttggttgaggtgtgtctccaacctacatcagaccatgaagttcaacccctccagggaagctcctgatttcccctgcataattgaaaataggatattctcagctattgaacagttactaatttatggggtggaaacagcattaagaatactgaatcaaatggaaaaacaaatgaatacaggaagataagtgttcgttcttttctgaaaaaagagtatgtgtaccacaagagctggttttaattgggtgaattgtttttgtcctcattctgtacagaaatttgtatatatgatggttcttagaacttgttttaatttttgtggtccttctgtttattataataggcgtccaccaatgattatccatatgtgttcttaatttttaactgctggaagtgttaaaacacacacaccccggaattc

SEQ ID NO: 822 - protein, 1865 aa, Homo sapien
MTRWVPTKREEKYGVAFYNYDARGADELSLQIGDTVHILETYEGWYRGYTLRKKSKKGIFPASYIHLKEAIVEGKGQHETVIPGDLPLIQEVTTTLREWSTIWRQLYVQDNREMFRSVRHMIYDLIEWRSQILSGTLPQDELKELKKKVTAKIDYGNRILDLDLVVRDEDGNILDPELTSTISLFRAHEIASKQVEERLQEEKSQKQNIDINRQAKFAATPSLALFVNLKNVVCKIGEDAEVLMSLYDPVESKFISENYLVRWSSSGLPKDIDRLHNLRAVFTDLGSKDLKREKISFVCQIVRVGRMELRDNNTRKLTSGLRRPFGVAVMDVTDIINGKVDDEDKQHFIPFQPVAGENDFLQTVINKVIAAKEVNHKGQGLWVTLKLLPGDIHQIRKEFPHLVDRTTAVARKTGFPEIIMPGDVRNDIYVTLVQGDFDKGSKTTAKNVEVTVSVYDEDGKRLEHVIFPGAGDEAISEYKSVIYYQVKQPRWFETVKVAIPIEDVNRSHLRFTFRHRSSQDSKDKSEKIFALAFVKLMRYDGTTLRDGEHDLIVYKAEAKKLEDAATYLSLPSTKAELEEKGHSATGKSMQSLGSCTISKDSFQISTLVCSTKLTQNVDLLGLLKWRSNTSLLQQNLRQLMKVDGGEVVKFLQDTLDALFNIMMENSESETFDTLVFDALVFIIGLIADRKFQHFNPVLETYIKKHFSATLAYTKLTKVLKNYVDGAEKPGVNEQLYKAMKALESIFKFIVRSRILFNQLYENKGEADFVESLLQLFRSINDMMSSMSDQTVRVKGAALKYLPTIVNDVKLVFDPKELSKMFTEFILNVPMGLLTIQKLYCLIEIVHSDLFTQHDCREILLPMMTDQLKYHLERQEDLEACCQLLSHILEVLYRKDVGPTQRHVQIIMEKLLRTVNRTVISMGRDSELIGNFVACMTAILRQMEDYHYAHLIKTFGKMRTDVVDFLMETFIMFKNLIGKNVYPFDWVIMNMVQNKVFLRAINQYADMLNKKFLDQANFELQLWNNYFHLAVAFLTQESLQLENFSSAKRAKILNKYGDMRRQIGFEIRDMWYNLGQHKIKFIPEMVGPILEMTLIPETELRKATIPIFFDMMQCEFHSTRSFQMFENEIITKLDHEVEGGRGDEQYKVLFDKILLEHCRKHKYLAKTGETFVKLVVRLMERLLDYRTIMHDENKENRMSCTVNVLNFYKEIEREEMYIRYLYKLCDLHKECDNYTEAAYTLLLHAKLLKWSEDVCVAHLTQRDGYQATTQGQLKEQLYQEIIHYFDKGKMWEEAIALGKELAEQYENEMFDYEQLSELLKKQAQFYENIVKVIRPKPDYFAVGYYGQGFPTFLRGKVFIYRGKEYERREDFEARLLTQFPNAEKMKTTSPPGDDIKNSPGQYIQCFTVKPKLDLPPKFHRPVSEQIVSFYRVNEVQRFEYSRPIRKGEKNPDNEFANMWIERTIYTTAYKLPGILRWFEVKSVFMVEISPLENAIETMQLTNDKINSMVQQHLDDPSLPINPLSMLLNGIVDPAVMGGFANYEKAFFTDRYLQEHPEAHEKIEKLKDLIAWQIPFLAEGIRIHGDKVTEALRPFHERMEACFKQLKEKVEKEYGVRIMPSSLDDRRGSRPRSMVRSFTMPSSSRPLSVASVSSLSSDSTPSRPGSDGFALEPLLPKKMHSRSQDKLDKDDLEKEKKDKKKEKRNSKHQEIFEKEFKPTDISLQQSEAVILSETISPLRPQRPKSQVMNVIGSERRFSVSPSSPSSQQTPPPVTPRAKLSFSMQSSLELNGMTGADVADVPPPLPLKGSVADYGNLMENQDLLGSPTPPPPPPHQRHLPPPLPSKTPPPPPPKTTRKQTSVDSGIVQ

SEQ ID NO: 823 - DNA, 6703 bp, Homo sapien
cggtggcaggggtggtagcggcggcggcgacggtttcgtgggggccgcgcgctgctctgtgagcggcgggtggcagcaggggactcctgacacttccccttccccaccgaaccgcgctttctgaaacaaagactcattttgaagatgtttaacaaatcatttggaacaccctttgggggtggcacaggtggctttggcacaacttcaacatttggacagaatactggctttggcactactagtggaggggcatttggaacatctgcatttggttctagcaacaatactggaggcctctttggaaattcacagactaaaccaggaggattgtttggaaccagttcatttagccagccagctacctccacaagcactggctttgggtttggtacgtcaacaggaacagcaaataccttgtttggaactgcaagcacagggaccagtctcttctcatcccaaaacaatgcctttgcacaaaataaaccaactggctttggcaattttggaaccagtactagcagtggaggactctttggaaccacaaataccacctctaatccttttggcagcacatctggctccctctttgggccaagtagttttacagctgctcctactgggactactattaaatttaaccctccaactggtacagatactatggtcaaagctggagttagcactaacataagtaccaagcaccagtgtattactgctatgaaagaatatgaaagcaagtcactagaggaacttcgtttagaggattatcaggctaacaggaagggcccacagaaccaggtgggagcaggtaccacaactggcttgtttgggtcttctccagccacttccagcgcaacaggactcttcagctcctccaccactaattcaggctttgcatatggtcagaacaaaactgcctttggaactagtacaactggatttggaacaaatccaggtggtctctttggccaacagaatcagcagactaccagcctcttcagcaaaccatttggccaggctacaaccacccagaacactggcttttcctttggtaataccagcaccataggacagccaagcaccaacaccatgggattatttggagtaacccaagcctcacagcctggaggtctttttgggacagctacaaacaccagcactgggacagcatttggaacaggaacaggtctctttgggcagaccaatactggatttggtgctgttggttcgaccctgtttggcaataacaagcttactacatttggaagcagcacaaccagtgcaccttcatttggtacaaccagtggcgggctctttggttttggcacaaataccagtgggaatagtatttttggaagtaaaccagcacctgggactcttggaactgggcttggtgcaggatttggaacagctcttggtgctggacaggcatctttgtttgggaacaaccaacctaagattggagggcctcttggtacaggagcctttggggcccctggatttaatactacgacagccactttgggctttggagccccccaggccccagtagctttgacagatccaaatgcttctgctgcccagcaggctgttctccagcagcacatcaatagtctaacatactcaccttttggagactctcctctcttccggaatccgatgtcagaccctaagaagaaggaagagagattgaaaccaacaaatccagcagcccagaaggctcttactacacctactcattataaactgacaccccgccctgccactagagtccggccaaaggctttacaaacaacaggcacagccaagtcacatctctttgatgggctggatgacgatgaaccatccctagccaatggagcattcatgcccaagaagagcattaagaagttggttttgaagaaccttaataatagcaatctcttttctcctgttaatcgtgattcagaaaatctagcttcaccatctgaatatccagaaaatggagagagatttagtttcctaagcaaacctgttgatgagaatcaccagcaggatggagatgaagattcccttgtttcacatttttatactaaccctattgccaaacctattcctcaaaccccagaaagtgctggaaataaacacagcaacagcaacagtgtggatgataccattgttgcattaaacatgcgtgctgctttgcgaaatgggctggaaggaagcagtgaagaaacgtcttttcatgatgagtcacttcaggatgaccgagaagaaatagaaaataattcttaccatatgcacccagcaggtattattctcactaaggttggttactatactattccatctatggatgaccttgctaaaattaccaatgaaaaaggagagtgcattgtctctgatttcactattggtcggaaaggttatggttcaatctattttgaaggagatgtgaatttgacaaatctaaatttggatgatattgtgcatatccggaggaaagaagtagttgtctacttagatgataaccaaaaaccacctgtgggtgaagggctaaataggaaggctgaagttacattggatggagtttggccaacagataaaacatctcgttgtttaataaagagcccagatcgccttgctgatatcaactatgaaggaagattggaagcagtttcaaggaaacagggagctcaattcaaagaataccggcctgaaactggttcttgggtgtttaaggtctcccatttttctaagtatggccttcaggattctgatgaagaggaggaggagcatccgtctaaaactagtacaaagaagttgaagactgctcctttgcctcctgcaagccagactacgcccttgcagatggctcttaatggcaaacctgcacctccacctcagagccagagcccagaggtggagcagttagggagggttgtggaactggacagtgacatggtagatatcacccaggagccagtgttggataccatgttagaagagagcatgcctgaggatcaggaacctgtgtctgcctcaacacatattgcatcttcactgggaattaatccacatgtcttacagatcatgaaagcatcattgcttactgatgaagaagatgtagatatggcactggatcaacgcttcagtcgcctgccttccaaagcagatacttctcaagaaatctgttctcccagactccccatttcagcatcccactcgtcgaaaactcgttcactagttggtgggttactacaatcaaaatttacaagtggagcttttctttcaccaagtgtctctgtgcaagaatgtcgtactcccagagcagcatctttaatgaatatcccatccacatcctcttggtctgtccctccacccctgacttctgtgttcacaatgcccagcccagcccctgaggttccgttgaaaacagtgggtacacgtaggcaactaggcctagtgcctcgtgaaaagtctgtcacctatggcaagggaaaactcttgatggacatggccctattcatgggacgctcatttcgtgttggttggggccccaactggactcttgctaatagtggagaacagctgaatggctctcatgaactagaaaatcatcagattgccgattccatggagtttggattcctgcccaatccagtagctgttaaacccctaactgagtccccattcaaagttcacttagaaaaactcagtttgagacaaagaaagccagatgaagacatgaaattatatcagacacctctggagctcaaattaaaacacagcactgtccatgtggatgaactgtgtcctctcattgtccccaatctgggagttgctgtcattcatgactatgcagattgggttaaagaagcatcaggagacttaccagaagcacaaattgtgaagcactggagcctgacatggacactatgtgaagccctatgggcccacctgaaggagcttgacagccagctaaatgaaccccgtgaatacattcaaattctggagcgaagaagagctttctcccgctggctatcctgtactgccacacctcagattgaagaggaagtctccttaacccaaaaaaacagccctgtggaggctgtattcagctacctcacaggcaaaaggatcagtgaggcctgctctctggcccagcagtcaggggatcatcgtcttgctcttcttttatctcagtttgtgggtagccagtcagtccgggagctgctcaccatgcagttggtggactggcatcagctccaagcagactccttcatccaggatgagagactgcgcatctttgctctgttggctggaaaaccggtgtggcagctctcagaaaagaagcaaataaacgtgtgctcccagttggattggaaacgctccctggctatccatctttggtatttgcttccaccaacagcctccatttctagggcgctcagcatgtatgaagaagcatttcagaatacctctgacagtgacagatatgcctgctccccacttccttcgtatctggagggttctggctgtgtgatagcggaggagcaaaactcacagacaccacttcgagatgtctgctttcaccttctaaaactctacagtgacagacattatgatctcaaccagctgctggagcctcgaagcataacagcagatcctttggactaccgcctaagctggcacttgtgggaagtgctgagggctcttaactacacccatctctcagcgcagtgtgaaggtgtgctacaggccagttacgctggccagcttgaaagtgaggggctctgggagtgggccatctttgtcctcctgcacattgacaactcaggcatacgtgagaaggctgttcgagagctgcttacccggcactgccagctgttggagacccctgagacttgggctaaagagactttccttacccagaagctccgtgtacctgccaaatggatccacgaggccaaagctgtgcgagcacacatggaatctgacaagcacttagaggccctttgcttatttaaggctgagcactggaaccgctgccacaagctcatcatccgacacttagcttctgatgccatcattaatgagaactatgactacctgaaggggttcttggaagacctggcacctccagagcgcagcagcctaattcaggattgggaaacatctgggcttgtttacctggactatattagagtcattgaaatgctccgccatatacagcaggtggattgctcaggtaatgacctggagcagttacacatcaaagtgacttcactgtgcagtcggatagagcagattcagtgttacagtgctaaagatcgcctggctcagtcagacatggccaaacgtgtagccaacctgctgcgcgtggtgctgagtctgcatcatcctcctgatagaacctccgactcaacaccagaccctcagcgagtccctttgcgcctcttggctccccacattggccggcttcccatgcctgaggactatgccatggacgaactgcgcagccttacccagtcctatctgcgagaactggctgttgggagcctgtgagccccaggcactttgcatcacagtcacatgcccattcacaccacacagaggttccctgccttgtttggattggcactgtttgccattctctgggttggctgtggcatctaccctccctccctgctgccagaagcagcatcctccacttgttcagggcttttcttaatactgaacgtagcataagggcttctggaacccagaagaggagacagtttaccatcctcaagatcattcagtgtttttcctttaaaaaaatggtcaataaagctcctttggcagaatcccccaaagaaccagggtattctttttccatccctagccattctggatcttgtgaccctccatgccaaccagcttccctactcctaccctggcccttttatactaggactccttaggaggagtgagacaggtgataatggatccttaacagatgaactatccacagaaggaagagggatccgtctcttaagtaattggttagttaacactgaattttggaggcaaaggagggttggcctgagttaggaaacaaaatgggatctttctgacacacttagggcagaagtgaatgcctgtcacggagggattgatcttcagggctgtttttgttcctgcctttagagttccatgaacaccatacctttgctactactatgtgcaggaacccttggtcacatgtgacatgtctgtgggaagctcccagagtttggtttggtccctggttttcagtcttgctgagactctgtctggatttgcctgcagagtttggataaaaaatggcaggttgggtaaccctccctgttcatcccatgttagctccaaagcatttcccaccctccatctaccccttccagaagcaaaaacaaaccatgactgaggcaggcatggagttgggcgttaggggcaggcagagggcctttgctacactgctgacagctatagggagccccaggtaatggcatgagatagctggtgttagggctatctcaggcaatatggccacacctgggtctttatgcatgaagataatgtaaaggtttttattaaaaaatatatatatgtataaataaatgatctagatattttcctctttttctgaagctactttcttaaaaaataaataaaatgtttatagcattcctggtaaaaaaaa

SEQ ID NO: 824 - protein, 1800 aa, Homo sapien [sequence omitted]

SEQ ID NO: 825 - DNA, 2097 bp, Homo sapien
gtaagtgccagggtctcagggtcaggtcgcggctggtcactgtgcaggcgcttgggtgacgcgacgatctcagcggatctggtcaccttcgtctccccgccatggagacctcagcactcaagcagcaggagcagcccgcggcgaccaagatcaggaacctgccctgggttgaaaaataccggccacagaccctgaatgatctcatttctcatcaggacattctgagtaccattcagaagtttatcaatgaagaccgactgccacacttgcttctctacggtcccccagggacaggcaagacatctaccatcctagcctgtgcgaaacagctatataaagacaaagaatttggctccatggtcttggagctgaatgcttcagatgaccgaggaatagacatcattcgaggaccgatcctgagctttgctagcacaaggacaatatttaagaaaggctttaagctagtgatcttggatgaagcagacgccatgactcaggacgcccagaatgccttgagaagagtaattgagaaattcacagaaaataccagattctgcctcatctgtaactatctgtcaaagatcatccctgccttgcagtcccgctgcacgaggtttcggttcggtcccctgactcctgaactcatggttccccgcctggaacatgtcgtggaagaagagaaagttgatataagtgaagatggaatgaaagcactagtcactctttccagtggagacatgcgtagggctctgaacattttgcagagcaccaatatggcctttgggaaggtgacagaggagactgtctacacctgcaccgggcacccgctcaagtcagacattgccaacatcctggactggatgttgaatcaagatttcaccacagcctacagaaatattacagagttgaaaactctgaaggggttggcactgcatgatatcctgacagagatacacttgtttgtgcatagagttgactttccatcttcagttcgaatacatttattgaccaaaatggcagacattgagtacaggctttctgttggcaccaacgagaagatccagctgagctccctcattgctgcatttcaagtcaccagagacctgattgttgcagaggcctagatgctctgagggccattcacaattctcagggctcagcagtgatgggagaacagaggacagttccaggataaactgctgcctggggctgtgggatgaatcagtcaccccgaatcttggaaaaacccccttccaggagaggatgggcaggcatttaaaaagtaccatttttgtggttgtttggagcagggatgtacaaaataattttaatgtattaactcatactgcctgtcttttataggggaaaaaaataaccttttttattttaaagttataaggtttttaccttttagttgcttggatgacagggaattagcctaccccattttggtctggaacagaagactttcaaatttaatatggtccaagtgtcttcctactcaaggtaaacattatctccaaaattacatttatgattctaatatttggcattgtgtctgtatctaatttaaacagatgttaatggacgtctggccgaaactattatacttttataagatgagctgaatcctcttactttaaaaactggtctttttatttaccctctgtggtagaagagtcaccagcaggttccaaattgatgtgtatgataggaaaaaaaccttaattttaaatataatatagagccttaaactatgccactgggtggcagaggctgtataaaacgcacttgttttcatgcaggagcggggcaagtaaggttgagcctgactgtaaacctagaactgcggaaggactgggacttttgtacaaatttcacatttattttacagcaatcatgctgcatttgtgttagtgttctttataataaaaaacaaagcagcctcctggctggctgtgttacaagtgactcttccttagacagctagaaagatgctgactttgtcaaacttgcatttatatgaaaaccttctgtctctaatatcacagaataaactttctttagatgctgttctttaaaaaaaaaaaaaaaaaa

SEQ ID NO: 826 - protein, 340 aa, Homo sapien
METSALKQQEQPAATKIRNLPWVEKYRPQTLNDLISHQDILSTIQKFINEDRLPHLLLYGPPGTGKTSTILACAKQLYKDKEFGSMVLELNASDDRGIDIIRGPILSFASTRTIFKKGFKLVILDEADAMTQDAQNALRRVIEKFTENTRFCLICNYLSKIIPALQSRCTRFRFGPLTPELMVPRLEHVVEEEKVDISEDGMKALVTLSSGDMRRALNILQSTNMAFGKVTEETVYTCTGHPLKSDIANILDWMLNQDFTTAYRNITELKTLKGLALHDILTEIHLFVHRVDFPSSVRIHLLTKMADIEYRLSVGTNEKIQLSSLIAAFQVTRDLIVAEA

SEQ ID NO: 827 - DNA, 4681 bp, Homo sapien
ctccttccataagggtctggtccttcatccctcccgcttcaccagaccccctcaccctgggagccgccacctccctttccccaagaccagatgtcgcgcggccggacacagccagcacggagagtcgatgccggcgtctgagctgcgcagtggggtcttcccgctgcccagcagcctacaggcgcggtgcactctgggggaacatggccgcttccggtctccctcccgggccggcgctggcctgactgcggccccggtccgtagcactccgccctccgcttctcccgccctgtagccgcgaagactgcttcagcctttccctgtgctgcccctgccgcgcgatggagacgagctcgagctgcgagagtcttggctcccagccggcggcggctcggccgcccagcgtggactccttgtccagtgcctccacttctcattcagagaattcagtgcatacaaaatcagcttctgttgtatcatcagattccatttcaacttctgccgacaacttttctcctgatttgagggtcctgagggagtctaacaagttagcagaaatggaagaaccacccttgcttccaggagaaaatattaaagacatggccaaagatgtaacttatatatgtccattcactggcgctgtacgaggaactctgactgtcacgaattataggttatatttcaaaagcatggaacgggatcccccatttgttttagatgcttcccttggtgtgataaatagagtagaaaaaattggtggtgcttctagtcgaggtgaaaattcttatggactagaaactgtgtgtaaggatattaggaatttacgatttgctcataaacctgaggggcggacaagaagatccatatttgagaatctaatgaaatatgcatttcctgtctctaataacctgcctctttttgcttttgaatacaaagaagtattccctgaaaatgggtggaagctatatgaccctcttttagagtatagaaggcagggaattccaaatgaaagctggagaataacaaagataaatgaacgatatgaactttgtgatacataccctgccctcctggttgtgccagcaaatattcctgatgaagaattaaagagagtggcatccttcagatcaagaggccgtatcccagttttatcatggattcatcctgaaagtcaagccacaatcactcggtgtagccagcccatggttggagtgagtggaaagcgaagcaaagaagatgaaaaataccttcaagctatcatggattccaatgcccagtctcacaaaatctttatatttgatgcccggccaagtgttaatgctgttgccaacaaggcaaagggtggaggttatgaaagtgaagatgcctatcaaaatgctgaactagttttcctggatatccacaatattcatgttatgagagaatcattacgaaaacttaaggagattgtgtaccccaacattgaggaaactcactggttgtctaacttggaatctactcattggctagaacatattaagcttattcttgcaggggctcttaggattgctgacaaggtagagtcagggaagacgtctgtggtagtgcattgcagtgatggttgggatcgcacagctcagctcacttcccttgccatgctcatgttggatggatactatcgaaccatccgaggatttgaagtccttgtggagaaagaatggctaagttttggacatcgatttcaactaagagttggccatggagataagaaccatgcagatgcagacagatcgcctgtttttcttcaatttattgactgtgtctggcagatgacaagacagtttcctaccgcatttgaattcaatgagtattttctcattaccattttggaccacctatacagctgcttattcggaacattcctctgtaatagtgaacaacagagaggaaaagagaatcttcctaaaaggactgtgtcactgtggtcttacataaacagccagctggaagacttcactaatcctctctatgggagctattccaatcatgtcctttatccagtagccagcatgcgccacctagagctctgggtgggatattacataaggtggaatccacggatgaaaccacaggaacctattcacaacagatacaaagaacttcttgctaaacgagcagagcttcagaaaaaagtagaggaactacagagagagatttctaaccgatcaacctcatcctcagagagagccagctctcctgcacagtgtgtcactcctgtccaaactgttgtataaaggactgtaagatcaggggcatcattgctatacactcttgattacactggcagctctatgagtagaaagtcttcggaatttagaacccatctatgagagaaagttcagtcactttatttattttaaatctctctaggatgagtttagaactgtagcagtgcaggtggcttaagtgaagtaactccatatgtaattacatgattatgatactaatcttttaagtatccaaagaatattaaaatacttcaatcctggattcacagtgggaacaagtttctattaaaaggcaaatgctgttacaaatttttggcatctggtaatattaaaaccattttagaaatacactctgtgctcactgtgcagaggaacatcagttttcaaaccaacactgaaattctgtggcatcacatatattgggccttgatgtcatgacagatcaaaatcatttgatatccctttctccattctaggtttttctttttttcagtaactgatttaccttgatcacttttcaacttccatattcttcatatagtaaaaggcaaagtattgaagatactacggtgtggtagtagttgaaaattattgccgtcattatttacatacttaagacatattagcaagttgatccaaaatgggaggccttatagatgtgcttgggggaaaatgaaggggagaaagtagccatacaggagttcaaagaattccatgcccttcagattagcccaattaccagaaacatcatgaaagatattttaaaaactaattatttactacagtgtatttcacttgtcttgtgtgtctgaacacacagaagctaattagcaagtttttaagaagtatttaaaaatcttactaggattgacattttttctgaattctgtataaatagcttatagtgagaagtactgtgctcaaattttacatttttttcctttgcaaattctgtaatttcactcaacgattaagtctaccaaagaacacactgcatgtaaaagatgtattacaatctcaaagccagtaaaagaaatcttgcttcactgttcacctgctacaagtaagagtttggtgctggtagaaacatttgactctgatgtctattttattctacataagagccatatgtaatgtactgtaacaaaggagcttcttgtccccttggtcttttaattaaaagaaattccaactgacttttaaactttgttcttgtccaaagttgccatttcttttttttccccagaaatatttggaaattattggaggaatatgcaccccagatgaaaatgttcagtttgtacccatttttccttaaccaacacccaaatcaaacaattaaaatatacagtgtttttccactcactaattcactatacagagagtctgaaccttagcctccctcttggtcttgcagtgaggaaatttctattagtatatccaatttagcaaaattggtaccaaaatgatttctttggtaattgtgtgaaatataagctttttaacagggcatttaagtggctagcaaatcagtaattaaaaattaagctttctactccaagtatttcacaaatgcatctgccattttcctcatttaaaccttggttatcttggcctgataccacataaaagaatgtagaatggctgaagagatcaagaatttaaagcttctagtcttaacatacttgcatccacttcaaattcaaatcaaaagccagggaaatctaagtgcaaccctaccacttctctgctgagaaccttccagtggttcccctcaccttctgcagaagtctccaatatggagtacatgcacttgggcatttaatatataccactggtgtgtgtgggagggagggaggaggaatactagccctttttatatatttacacaagcaaaacttttaaatatttgaattgacagttacatgtttcataacttcgtatgtctattggttgtgcaggtgtaattttttccctttttgattagggttacaaaatttagagaccagtatgattaagttgaagctccttagcctccttcgacctagtctctgcatacctcaacttttacgtaccaatgctactctgctgttcacaattgcctcatgtaatctgcagattcctgcctccccactttggttcagtctgtcttgtgcacctggaacaactgttctcccttgtgactaattcctattttctagagtttaggcatcatctcttcctttgggaagttatctgattcacgactgccttctctgacatccccaccttcctctgtgcccccatagcactgtgtataccgctactaccactgcaattcacattatattggaatgaacaattcacatgtctaccacaagtctgtaaacataaccttatttgaaatgaattgcaataaagctctgttacaacgt

SEQ ID NO: 828 - protein, 643 aa, Homo sapien
METSSSCESLGSQPAAARPPSVDSLSSASTSHSENSVHTKSASVVSSDSISTSADNFSPDLRVLRESNKLAEMEEPPLLPGENIKDMAKDVTYICPFTGAVRGTLTVTNYRLYFKSMERDPPFVLDASLGVINRVEKIGGASSRGENSYGLETVCKDIRNLRFAHKPEGRTRRSIFENLMKYAFPVSNNLPLFAFEYKEVFPENGWKLYDPLLEYRRQGIPNESWRITKINERYELCDTYPALLVVPANIPDEELKRVASFRSRGRIPVLSWIHPESQATITRCSQPMVGVSGKRSKEDEKYLQAIMDSNAQSHKIFIFDARPSVNAVANKAKGGGYESEDAYQNAELVFLDIHNIHVMRESLRKLKEIVYPNIEETHWLSNLESTHWLEHIKLILAGALRIADKVESGKTSVVVHCSDGWDRTAQLTSLAMLMLDGYYRTIRGFEVLVEKEWLSFGHRFQLRVGHGDKNHADADRSPVFLQFIDCVWQMTRQFPTAFEFNEYFLITILDHLYSCLFGTFLCNSEQQRGKENLPKRTVSLWSYINSQLEDFTNPLYGSYSNHVLYPVASMRHLELWVGYYIRWNPRMKPQEPIHNRYKELLAKRAELQKKVEELQREISNRSTSSSERASSPAQCVTPVQTVV

SEQ ID NO: 829 - DNA, 1894 bp, Homo sapien
tcgcacttggcttcaaagctggctcttggaaattgagcggagagcgacgcggttgttgtagctgccgctgcggccgccgcggaataataagccgggatctaccatacccattgactaactatggaagattataccaaaatagagaaaattggagaaggtacctatggagttgtgtataagggtagacacaaaactacaggtcaagtggtagccatgaaaaaaatcagactagaaagtgaagaggaaggggttcctagtactgcaattcgggaaatttctctattaaaggaacttcgtcatccaaatatagtcagtcttcaggatgtgcttatgcaggattccaggttatatctcatctttgagtttctttccatggatctgaagaaatacttggattctatccctcctggtcagtacatggattcttcacttgttaagagttatttataccaaatcctacaggggattgtgttttgtcactctagaagagttcttcacagagacttaaaacctcaaaatctcttgattgatgacaaaggaacaattaaactggctgattttggccttgccagagcttttggaatacctatcagagtatatacacatgaggtagtaacactctggtacagatctccagaagtattgctggggtcagctcgttactcaactccagttgacatttggagtataggcaccatatttgctgaactagcaactaagaaaccacttttccatggggattcagaaattgatcaactcttcaggattttcagagctttgggcactcccaataatgaagtgtggccagaagtggaatctttacaggactataagaatacatttcccaaatggaaaccaggaagcctagcatcccatgtcaaaaacttggatgaaaatggcttggatttgctctcgaaaatgttaatctatgatccagccaaacgaatttctggcaaaatggcactgaatcatccatattttaatgatttggacaatcagattaagaagatgtagctttctgacaaaaagtttccatatgttatgtcaacagatagttgtgtttttattgttaactcttgtctatttttgtcttatatatatttctttgttatcaaacttcagctgtacttcgtcttctaatttcaaaaatataacttaaaaatgtaaatattctatatgaatttaaatataattctgtaaatgtgtgtaggtctcactgtaacaactatttgttactataataaaactataatattgatgtcaggaatcaggaaaaaatttgagttggcttaaatcatctcagtccttatggcagttttattttcctgtagttggaactactaaaatttaggaaaatgctaagttcaagtttcgtaatgctttgaagtatttttatgctctgaatgtttaaatgttctcatcagtttcttgccatgttgttaactatacaacctggctaaagatgaatatttttctactggtattttaatttttgacctaaatgtttaagcattcggaatgagaaaactatacagatttgagaaatgatgctaaatttataggagttttcagtaacttaaaaagctaacatgagagcatgccaaaatttgctaagtcttacaaagatcaagggctgtccgcaacagggaagaacagttttgaaaatttatgaactatcttatttttaggtaggttttgaaagctttttgtctaagtgaattcttatgccttggtcagagtaataactgaaggaggtgcttatcttggctttcgagtctgagtttaaaactacacattttgacatagtgtttattagcagccatctaaaaaggctctaatgtatatttaactaaaattactagctttgggaattaaactgtttaacaaattagga

SEQ ID NO: 830 - protein, 337 aa, Homo sapien
ALGFKAGSWKLSGERRGCCSCRCGRRGIISRDLPYPLTNYGRLYQNREKIGEGTYGVVYKGRHKTTGQVVAMKKIRLESEEEGVPSTAIREISLLKELRHPNIVSLQDVLMQDSRLYLIFEFLSMDLKKYLDSIPPGQYMDSSLVKSYLYQILQGIVFCHSRRVLHRDLKPQNLLIDDKGTIKLADFGLARAFGIPIRVYTHEVVTLWYRSPEVLLGSARYSTPVDIWSIGTIFAELATKKPLFHGDSEIDQLFRIFRALGTPNNEVWPEVESLQDYKNTFPKWKPGSLASHVKNLDENGLDLLSKMLIYDPAKRISGKMALNHPYFNDLDNQIKKM

SEQ ID NO: 831 - DNA, 1235 bp, Homo sapien
ggggggggggggcacttggcttcaaagctggctcttggaaattgagcggagagcgacgcggttgttgtagctgccgctgcggccgccgcggaataataagccgggatctaccatacccattgactaactatggaagattataccaaaatagagaaaattggagaaggtacctatggagttgtgtataagggtagacacaaaactacaggtcaagtggtagccatgaaaaaaatcagactagaaagtgaagaggaaggggttcctagtactgcaattcgggaaatttctctattaaaggaacttcgtcatccaaatatagtcagtcttcaggatgtgcttatgcaggattccaggttatatctcatctttgagtttctttccatggatctgaagaaatacttggattctatccctcctggtcagtacatggattcttcacttgttaagagttatttataccaaatcctacaggggattgtgttttgtcactctagaagagttcttcacagagacttaaaacctcaaaatctcttgattgatgacaaaggaacaattaaactggctgattttggccttgccagagcttttggaatacctatcagagtatatacacatgaggtagtaacactctggtacagatctccagaagtattgctggggtcagctcgttactcaactccagttgacatttggagtataggcaccatatttgctgaactagcaactaagaaaccacttttccatggggattcagaaattgatcaactcttcaggattttcagagctttgggcactcccaataatgaagtgtggccagaagtggaatctttacaggactataagaatacatttcccaaatggaaaccaggaagcctagcatcccatgtcaaaaacttggatgaaaatggcttggatttgctctcgaaaatgttaatctatgatccagccaaacgaatttctggcaaaatggcactgaatcatccatattttaatgatttggacaatcagattaagaagatgtagctttctgacaaaaagtttccatatgttatgtcaacagatagttgtgtttttattgttaactcttgtctatttttgtcttatatatatttctttgttatcaaacttcagctgtacttcgtcttctaatttcaaaaatataacttaaaaatgtaaatattctatatgaatttaaatataattctgtaaatgtgaaaaaaaaaaaaaaaaaaaaa

SEQ ID NO: 832 - protein, 297 aa, Homo sapien
MEDYTKIEKIGEGTYGVVYKGRHKTTGQVVAMKKIRLESEEEGVPSTAIREISLLKELRHPNIVSLQDVLMQDSRLYLIFEFLSMDLKKYLDSIPPGQYMDSSLVKSYLYQILQGIVFCHSRRVLHRDLKPQNLLIDDKGTIKLADFGLARAFGIPIRVYTHEVVTLWYRSPEVLLGSARYSTPVDIWSIGTIFAELATKKPLFHGDSEIDQLFRIFRALGTPNNEVWPEVESLQDYKNTFPKWKPGSLASHVKNLDENGLDLLSKMLIYDPAKRISGKMALNHPYFNDLDNQIKKM

SEQ ID NO: 833 - DNA, 10660 bp, Homo sapien
ctactacagtggcggacgtacaggacctgtttcactgcagggggatccaaaacaagccccgtggagcaacagccagagcaacagcagctgcaagacattgtttctctccctctgcccccccttccccacgcaaccccagatccatttacactttacagttttacctcacaaaaactactacaagcaccaagctccctgatggaaaggagcatcgtgcatcaagtcaccagggtggtccattcaagctgcagatttgtttgtcatccttgtacagcaatctcctcctccactgccactacagggaagtgcatcacatgtcagcatactggagcatagtgaaagagtctattttgaagcttcaaacttagtgctgctgcagaccaggaacaagagagaaagagtggatttcagcctgcacggatggtcttgaaacacaaatggtttttggtctaggcgttttacactgagattctccactgccaccctttctactcaagcaaaatcttcgtgaaaagatctgctgcaaggaactgatagcttatggttctccattgtgatgaaagcacatggtacagttttccaaagaaattagaccattttcttcgtgagaaagaaatcgacgtgctgttttcatagggtatttctcacttctctgtgaaaggaagaaagaacacgcctgagcccaagagccctcaggagccctccagagcctgtgggaagtctccatggtgaagtataggctgaggctacctgtgaacagtacgcagtgaatgttcatccagagctgctgttggcggattgtacccacggggagatgattcctcatgaagagcctggatcccctacagaaatcaaatgtgactttccgtttatcagactaaaatcagagccatccagacagtgaaacagtcaccgtggaggggggacggcgaaaaatgaaatccaaccaagagcggagcaacgaatgcctgcctcccaagaagcgcgagatccccgccaccagccggtcctccgaggagaaggcccctaccctgcccagcgacaaccaccgggtggagggcacagcatggctcccgggcaaccctggtggccggggccacgggggcgggaggcatgggccggcagggacctcggtggagcttggtttacaacagggaataggtttacacaaagcattgtccacagggctggactactccccgcccagcgctcccaggtctgtccccgtggccaccacgctgcctgccgcgtacgccaccccgcagccagggaccccggtgtcccccgtgcagtacgctcacctgccgcacaccttccagttcattgggtcctcccaatacagtggaacctatgccagcttcatcccatcacagctgatccccccaaccgccaaccccgtcaccagtgcagtggcctcggccgcaggggccaccactccatcccagcgctcccagctggaggcctattccactctgctggccaacatgggcagtctgagccagacgccgggacacaaggctgagcagcagcagcagcagcagcagcagcagcagcagcagcatcagcatcagcagcagcagcagcagcagcagcagcagcagcagcagcagcagcacctcagcagggctccggggctcatcaccccggggtcccccccaccagcccagcagaaccagtacgtccacatttccagttctccgcagaacaccggccgcaccgcctctcctccggccatccccgtccacctccacccccaccagacgatgatcccacacacgctcaccctggggcccccctcccaggtcgtcatgcaatacgccgactccggcagccactttgtccctcgggaggccaccaagaaagctgagagcagccggctgcagcaggccatccaggccaaggaggtcctgaacggtgagatggagaagagccggcggtacggggccccgtcctcagccgacctgggcctgggcaaggcaggcggcaagtcggttcctcacccgtacgagtccaggcacgtggtggtccacccgagcccctcagactacagcagtcgtgatccttcgggggtccgggcctctgtgatggtcctgcccaacagcaacacgcccgcagctgacctggaggtgcaacaggccactcatcgtgaagcctccccttctaccctcaacgacaaaagtggcctgcatttagggaagcctggccaccggtcctacgcgctctcaccccacacggtcattcagaccacacacagtgcttcagagccactcccggtgggactgccagccacggccttctacgcagggactcaaccccctgtcatcggctacctgagcggccagcagcaagcaatcacctacgccggcagcctgccccagcacctggtgatccccggcacacagcccctgctcatcccggtcggcagcactgacatggaagcgtcgggggcagccccggccatagtcacgtcatccccccagtttgctgcagtgcctcacacgttcgtcaccaccgcccttcccaagagcgagaacttcaaccctgaggccctggtcacccaggccgcctacccagccatggtgcaggcccagatccacctgcctgtggtgcagtccgtggcctccccggcggcggctccccctacgctgcctccctacttcatgaaaggctccatcatccagttggccaacggggagctaaagaaggtggaagacttaaaaacagaagatttcatccagagtgcagagataagcaacgacctgaagatcgactccagcaccgtagagaggattgaagacagccatagcccgggcgtggccgtgatacagttcgccgtcggggagcaccgagcccaggtcagcgttgaagttttggtagagtatcctttttttgtgtttggacagggctggtcatcctgctgtccggagagaaccagccagctctttgatttgccgtgttccaaactctcagttggggatgtctgcatctcgcttaccctcaagaacctgaagaacggctctgttaaaaagggccagcccgtggatcccgccagcgtcctgctgaagcactcaaaggccgacggcctggcgggcagcagacacaggtatgccgagcaggaaaacggaatcaaccaggggagtgcccagatgctctctgagaatggcgaactgaagtttccagagaaaatgggattgcctgcagcgcccttcctcaccaaaatagaacccagcaagcccgcggcaacgaggaagaggaggtggtcggcgccagagagccgcaaactggagaagtcagaagacgaaccacctttgactcttcctaagccttctctaattcctcaggaggttaagatttgcattgaaggccggtctaatgtaggcaagtagaggcagcgtgggggaaaggaaacgtggctctcccttatcatttgtatccagattactgtactgtaggctaaaataacacagtatttacatgttatcttcttaattttaggtttctgttctaaccttgtcattagagttacagcaggtgtgtcgcaggagactggtgcatatgctttttccacgagtgtctgtcagtgagcgggcgggaggaagggcacagcaggagcggtcagggctccaggcatccccggggaagaaaggaacggggcttcacagtgcctgccttctctagcggcacagaagcagccgggggcgctgactcccgctagtgtcaggagaaaagtcccgtgggaagagtcctgcaggggtgcagggttgcacgcatgtgggggtgcacaggcgctgtggcggcgagtgagggtctctttttctctgcctccctctgcctcactctcttgctatcggcatgggccgggggggttcagagcagtgtcctcctggggttcccacgtgcaaaatcaacatcaggaacccagcttcagggcatcgcggagacgcgtcagatggcagatttggaaagttaaccatttaaaagaacatttttctctccaacatattttacaataaaagcaacttttaattgtatagatatatatttccccctatggggcctgactgcactgatatatattttttttaaagagcaactgccacatgcgggatttcatttctgctttttactagtgcagcgatgtcaccagggtgttgtggtggacagggaagcccctgctgtcatggccccacatggggtaaggggggttgggggtgggggagagggagagagcgaacacccacgctggtttctgtgcagtgttaggaaaaccaatcaggttattgcattgacttcactcccaagaggtagatgcaaactgcccttcagtgagagcaacagaagctcttcacgttgagtttgcgaaatctttttgtctttgaactctagtactgtttatagttcatgactatggacaactcgggtgccacttttttttttttcagattccagtgtgacatgaggaattagattttgaagatgagcatatattactatctttaagcatttaaaaatactgttcacactttattaccaagcatcttggtctctcattcaacaagtactgtatctcactttaaactctttggggaaaaaacaaaaacaaaaaaaactaagttgctttctttttttcaacactgtaactacatttcagctctgcagaattgctgaagagcaagatattgaaagtttcaatgtggtttaaagggatgaatgtgaattatgaactagtatgtgacaataaatgaccaccaagtactacctgacgggaggcacttttcactttgatgtctgagaatcagttcaaggcatatgcagagttggcagagaaactgagagaaaagggatggagaagagaatactcatttttgtccagtgtttttctttttaagatgaacttttaaagaaccttgcgatttgcacatattgagtttataacttgtgtgatattcctgcagtttttatccaataacattgtgggaaaggtttgggggactgaacgagcataaataaatgtagcaaaatttctttctaacctgcctaaactctaggccattttataaggttatgttcctttgaaaattcattttggtctttttaccacatctgtcacaaaaagccaggtcttagcgggctcttagaaactctgagaattttcttcagattcattgagagagttttccataaagacatttatatatgtgagcaagattttttttaaacaattactttattattgttgttattaatgttattttcagaatggctttttttttctattcaaaatcaaatcgagatttaatgtttggtacaaacccagaaagggtatttcatagtttttaaacctttcattcccagagatccgaaatatcatttgtgggttttgaatgcatctttaaagtgctttaaaaaaaagttttataagtagggagaaatttttaaatattcttacttggatggctgcaactaaactgaacaaatacctgacttttcttttaccccattgaaaatagtactttcttcgtttcacaaattaaaaaaaaaatctggtatcaacccacattttggctgtctagtattcatttacatttagggttcaccaggactaatgatttttataaaccgttttctggggtgtaccaaaaacatttgaataggtttagaatagctagaatagttccttgactttcctcgaatttcattaccctctcagcatgcttgcagagagctgggtgggctcattcttgcagtcatactgcttatttagtgctgtattttttaaacgtttctgttcagagaacttgcttaatcttccatatattctgctcagggcacttgcaattattaggttttgtttttctttttgttttttagcctttgatggtaagaggaatacgggctgccacatagactttgttctcattaatatcactatttacaactcatgtggactcagaaaaacacacaccaccttttggcttacttcgagtattgaattgactggatccactaaaccaacactaagatgggaaaacacacatggtttggagcaataggaacatcatcataatttttgtggttctatttcaggtataggaattataaaataattggttctttctaaacacttgtcccatttcattctcttgcttttttagcatgtgcaatactttctgtgccaatagagtctgaccagtgtgctatatagttaaagctcattcccttttggctttttccttgtttggttgatcttccccattctggccagagcagggctggagggaaggagccaggagggagagagcctcccacctttcccctgctgcggatgctgagtgctggggcggggagccttcaggagccccgtgcgtctgccgccacgttgcagaaagagccagccaaggagacccgggggaggaaccgcagtgtcccctgtcaccacacggaatagtgaatgtggagtgtggagaggaaggaggcagattcatttctaagacgcactctggagccatgtagcctggagtcaacccattttccacggtcttttctgcaagtgggcaggcccctcctcggggtctgtgtccttgagacttggagccctgcctctgagcctggacgggaagtgtggcctgttgtgtgtgtgcgttctgagcgtgttggccagtggctgtggaggggaccacctgccacccacggtcaccactcccttgtggcagctttctcttcaaataggaagaacgcacagagggcaggagcctcctgtttgcagacgttggcgggccccgaggctcccagagcagcctctgtcaccgcttctgtgtagcaaacattaacgatgacaggggtagaaattcttcggtgccgttcagcttacaaggatcagccatgtgcctctgtactatgtccactttgcaatatttaccgacagccgtcttttgttctttctttcctgttttccatttttaaactagtaacagcaggccttttgcgtttacaatggaacacaatcaccaagaaattagtcagggcgaaaagaaaaaaataatactattaataagaaaccaacaaacaagaacctctctttctagggatttctaaatatataaaatgactgttccttagaatgtttaacttaagaattatttcagtttgtctgggccacactggggcagaggggggagggagggatacagagatggatgccacttacctcagatcttttaaagtggaaatccaaattgaattttcatttggactttcaggataattttctatgttggtcaacttttcgttttccctaactcacccagtttagtttgggatgatttgatttctgttgttgttgatcccatttctaacttggaattgtgagcctctatgttttctgttaggtgagtgtgttgggttttttccccccaccaggaagtggcagcatccctccttctcccctaaagggactctgcggaacctttcacacctctttctcagggacggggcaggtgtgtgtgtggtacactgacgtgtccagaagcagcactttgactgctctggagtagggttgtacaatttcaaggaatgtttggatttcctgcatcttgtggattactccttagataccgcatagattgcaatataatgctgcatgttcaagatgaacagtagctcctagtaatcataaaatccactctttgcacagtttgatctttactgaaatatgttgccaaaatttatttttgttgttgtagctctggattttgttttgttttgttttttaaggaaacgattgacaataccctttaacatctgtgactactaaggaaacctatttctttcatagagagaaaaatctccaatgcttttgaagacactaataccgtgctatttcagatatgggtgaggaagcagagctctcggtaccgaaggccgggcttcttgagctgtgttggttgtcatggctactgtttcatgaaccacaagcagctcaacagactggtctgttgccttctgaaaccctttgcacttcaatttgcaccaggtgaaaacagggccagcagactccatggcccaattcggtttcttcggtggtgatgtgaaaggagagaattacactttttttttttttaagtggcgtggaggcctttgcttccacatttgtttttaacccagaatttctgaaatagagaatttaagaacacatcaagtaataaatatacagagaatatacttttttataaagcacatgcatctgctattgtgttgggttggtttcctctcttttccacggacagtgttgtgtttctggcatagggaaactccaaacaacttgcacacctctactccggagctgagatttcttttacatagatgacctcgcttcaaatacgttaccttactgatgataggatcttttcttgtagcactataccttgtgggaatttttttttaaatgtacacctgatttgagaagctgaagaaaacaaaattttgaagcactcactttgaggagtacaggtaatgttttaaaaaattgcacaaaagaaaaatgaatgtcgaaatgattcattcagtgtttgaaagatatggctctgttgaaacaatgagtttcatactttgtttgtaaaaaaaaaaagcagagaagggttgaaagttacatgtttttttgtatatagaaatttgtcatgtctaaatgatcagatttgtatggttatggcctggaagaattactacgtaaaaggctcttaaactatacctatgcttattgttatttttgttacatatagccctcgtctgagggaggggaactcggtattctgcgatttgagaatactgttcattcctatgctgaaagtacttctctgagctcccttcttagtctaaactcttaagccattgcaacttctttttcttcagagatgatgtttgacattttcagcacttcctgttcctataaacccaaagaatataatcttgaacacgaagtgtttgtaacaagggatccaggctaccaatcaaacaggactcattatggggacaaaaaaaaaaaaaattatttcaccttctttccccccacacctcatttaaatggggggagtaaaaacatgatttcaatgtaaatgcctcattttattttagttttattttgatttttatttaatataaagaggccagaataaatacggagcatcttctcagaatagtattcctgtccaaaaatcaagccggacagtggaaactggacagctgtggggatattaagcacccccacttacaattcttaaattcagaatctcgtcccctcccttctcgttgaaggcaactgttctggtagctaactttctcctgtgtaatggcgggagggaacaccggcttcagtttttcatgtccccatgacttgcatacaaatggttcaactgtattaaaattaagtgcatttggccaataggtagtatctatacaataacaacaatctctaagaatttccataacttttcttatctgaaaggactcaagtcttccactgcagatacattggaggcttcacccacgttttctttccctttagtttgtttgctgtctggatggccaatgagcctgtctccttttctgtggccaatctgaaggccttcgttggaagtgttgttcacagtaatccttaccaagataacatactgtcctccagaataccaagtattaggtgacactagctcaagctgttgtcttcagagcagttaccaagaagctcggtgcacaggttttctctggttcttacaggaaccacctactctttcagttttctggcccaggagtggggtaaatcctttagttagtgcatttgaacttggtacctgtgcattcagttctgtgaatactgccctttttggcggggtttcctcatctccccagcctgaactgctcaactctaaacccaaattagtgtcagccgaaaggaggtttcaagatagtcctgtcagtatttgtggtgaccttcagattagacagtcttcatttccagccagtggagtcctggctccagagccatctctgagactccgtactactggatgttttaatatcagatcattacccaccatatgcctcccacaggccaagggaaaacagacaccagaacttgggttgagggcactaccagactgacatggccagtacagaggagaactagggaaggaatgatgttttgcaccttattgaaaagaaaattttaagtgcatacataatagttaagagcttttattgtgacaggagaacttttttccatatgcgtgcatactctctgtaattccagtgtaaaatattgtacttgcactagcttttttaaacaaatattaaaaaatggaagaattcatattctattttctaatcgtggtgtgtctatttgtaggatacactcgagtctgtttattgaattttatggtccctttctttgatggtgcttgcaggttttctaggtagaaattatttcattattataataaaacaatgtttgattcaaaatttgaacaaaattgttttaaataaattgtctgtataccagtacaagtttattgtttcagtatactcgtactaataaaataacagtgccaattgcaaaaaaaaaaaaaaaaaaaaaaaaaaaaaaaaaaaaaaaaaaaaaaaaaaaaaaaaa

SEQ ID NO: 834 - protein, 816 aa, Homo sapien
MKSNQERSNECLPPKKREIPATSRSSEEKAPTLPSDNHRVEGTAWLPGNPGGRGHGGGRHGPAGTSVELGLQQGIGLHKALSTGLDYSPPSAPRSVPVATTLPAAYATPQPGTPVSPVQYAHLPHTFQFIGSSQYSGTYASFIPSQLIPPTANPVTSAVASAAGATTPSQRSQLEAYSTLLANMGSLSQTPGHKAEQQQQQQQQQQQQHQHQQQQQQQQQQQQQQQHLSRAPGLITPGSPPPAQQNQYVHISSSPQNTGRTASPPAIPVHLHPHQTMIPHTLTLGPPSQVVMQYADSGSHFVPREATKKAESSRLQQAIQAKEVLNGEMEKSRRYGAPSSADLGLGKAGGKSVPHPYESRHVVVHPSPSDYSSRDPSGVRASVMVLPNSNTPAADLEVQQATHREASPSTLNDKSGLHLGKPGHRSYALSPHTVIQTTHSASEPLPVGLPATAFYAGTQPPVIGYLSGQQQAITYAGSLPQHLVIPGTQPLLIPVGSTDMEASGAAPAIVTSSPQFAAVPHTFVTTALPKSENFNPEALVTQAAYPAMVQAQIHLPVVQSVASPAAAPPTLPPYFMKGSIIQLANGELKKVEDLKTEDFIQSAEISNDLKIDSSTVERIEDSHSPGVAVIQFAVGEHRAQVSVEVLVEYPFFVFGQGWSSCCPERTSQLFDLPCSKLSVGDVCISLTLKNLKNGSVKKGQPVDPASVLLKHSKADGLAGSRHRYAEQENGINQGSAQMLSENGELKFPEKMGLPAAPFLTKIEPSKPAATRKRRWSAPESRKLEKSEDEPPLTLPKPSLIPQEVKICIEGRSNVGK

SEQ ID NO: 835 - DNA, 10660 bp, Homo sapien; identical to SEQ ID NO: 833

SEQ ID NO: 836 - protein, 816 aa, Homo sapien; identical to SEQ ID NO: 834

SEQ ID NO: 837 - DNA, 3597 bp, Homo sapien
ggcgaatggagcaggggcgcgcagataattaaagatttacacacagctggaagaaatcatagagaagccgggcgtggtggctcatgcctataatcccagcacttttggaggctgaggcgggcagatcacttgagatcaggagttcgagaccagcctggtgccttggcatctcccaatggggtggctttgctctgggctcctgttccctgtgagctgcctggtcctgctgcaggtggcaagctctgggaacatgaaggtcttgcaggagcccacctgcgtctccgactacatgagcatctctacttgcgagtggaagatgaatggtcccaccaattgcagcaccgagctccgcctgttgtaccagctggtttttctgctctccgaagcccacacgtgtatccctgagaacaacggaggcgcggggtgcgtgtgccacctgctcatggatgacgtggtcagtgcggataactatacactggacctgtgggctgggcagcagctgctgtggaagggctccttcaagcccagcgagcatgtgaaacccagggccccaggaaacctgacagttcacaccaatgtctccgacactctgctgctgacctggagcaacccgtatccccctgacaattacctgtataatcatctcacctatgcagtcaacatttggagtgaaaacgacccggcagatttcagaatctataacgtgacctacctagaaccctccctccgcatcgcagccagcaccctgaagtctgggatttcctacagggcacgggtgagggcctgggctcagtgctataacaccacctggagtgagtggagccccagcaccaagtggcacaactcctacagggagcccttcgagcagcacctcctgctgggcgtcagcgtttcctgcattgtcatcctggccgtctgcctgttgtgctatgtcagcatcaccaagattaagaaagaatggtgggatcagattcccaacccagcccgcagccgcctcgtggctataataatccaggatgctcaggggtcacagtgggagaagcggtcccgaggccaggaaccagccaagtgcccacactggaagaattgtcttaccaagctcttgccctgttttctggagcacaacatgaaaagggatgaagatcctcacaaggctgccaaagagatgcctttccagggctctggaaaatcagcatggtgcccagtggagatcagcaagacagtcctctggccagagagcatcagcgtggtgcgatgtgtggagttgtttgaggccccggtggagtgtgaggaggaggaggaggtagaggaagaaaaagggagcttctgtgcatcgcctgagagcagcagggatgacttccaggagggaagggagggcattgtggcccggctaacagagagcctgttcctggacctgctcggagaggagaatgggggcttttgccagcaggacatgggggagtcatgccttcttccaccttcgggaagtacgagtgctcacatgccctgggatgagttcccaagtgcagggcccaaggaggcacctccctggggcaaggagcagcctctccacctggagccaagtcctcctgccagcccgacccagagtccagacaacctgacttgcacagagacgcccctcgtcatcgcaggcaaccctgcttaccgcagcttcagcaactccctgagccagtcaccgtgtcccagagagctgggtccagacccactgctggccagacacctggaggaagtagaacccgagatgccctgtgtcccccagctctctgagccaaccactgtgccccaacctgagccagaaacctgggagcagatcctccgccgaaatgtcctccagcatggggcagctgcagcccccgtctcggcccccaccagtggctatcaggagtttgtacatgcggtggagcagggtggcacccaggccagtgcggtggtgggcttgggtcccccaggagaggctggttacaaggccttctcaagcctgcttgccagcagtgctgtgtccccagagaaatgtgggtttggggctagcagtggggaagaggggtataagcctttccaagacctcattcctggctgccctggggaccctgccccagtccctgtccccttgttcacctttggactggacagggagccacctcgcagtccgcagagctcacatctcccaagcagctccccagagcacctgggtctggagccgggggaaaaggtagaggacatgccaaagcccccacttccccaggagcaggccacagacccccttgtggacagcctgggcagtggcattgtctactcagcccttacctgccacctgtgcggccacctgaaacagtgtcatggccaggaggatggtggccagacccctgtcatggccagtccttgctgtggctgctgctgtggagacaggtcctcgccccctacaacccccctgagggccccagacccctctccaggtggggttccactggaggccagtctgtgtccggcctccctggcaccctcgggcatctcagagaagagtaaatcctcatcatccttccatcctgcccctggcaatgctcagagctcaagccagacccccaaaatcgtgaactttgtctccgtgggacccacatacatgagggtctcttaggtgcatgtcctcttgttgctgagtctgcagatgaggactagggcttatccatgcctgggaaatgccacctcctggaaggcagccaggctggcagatttccaaaagacttgaagaaccatggtatgaaggtgattggccccactgacgttggcctaacactgggctgcagagactggaccccgcccagcattgggctgggctcgccacatcccatgagagtagagggcactgggtcgccgtgccccacggcaggcccctgcaggaaaactgaggcccttgggcacctcgacttgtgaacgagttgttggctgctccctccacagcttctgcagcagactgtccctgttgtaactgcccaaggcatgttttgcccaccagatcatggcccacgtggaggcccacctgcctctgtctcactgaactagaagccgagcctagaaactaacacagccatcaagggaatgacttgggcggccttgggaaatcgatgagaaattgaacttcagggagggtggtcattgcctagaggtgctcattcatttaacagagcttccttaggttgatgctggaggcagaatcccggctgtcaaggggtgttcagttaaggggagcaacagaggacatgaaaaattgctatgactaaagcagggacaatttgctgccaaacacccatgcccagctgtatggctgggggctcctcgtatgcatggaacccccagaataaatatgctcagccaccctgtgggccgggcaatccagacagcaggcataaggcaccagttaccctgcatgttggcccagacctcaggtgctagggaaggcgggaaccttgggttgagtaatgctcgtctgtgtgttttagtttcatcacctgttatctgtgtttgctgaggagagtggaacagaaggggtggagttttgtataaataaagtttctttgtctc

SEQ ID NO: 838 - protein, 825 aa, Homo sapien
MGWLCSGLLFPVSCLVLLQVASSGNMKVLQEPTCVSDYMSISTCEWKMNGPTNCSTELRLLYQLVFLLSEAHTCIPENNGGAGCVCHLLMDDVVSADNYTLDLWAGQQLLWKGSFKPSEHVKPRAPGNLTVHTNVSDTLLLTWSNPYPPDNYLYNHLTYAVNIWSENDPADFRIYNVTYLEPSLRIAASTLKSGISYRARVRAWAQCYNTTWSEWSPSTKWHNSYREPFEQHLLLGVSVSCIVILAVCLLCYVSITKIKKEWWDQIPNPARSRLVAIIIQDAQGSQWEKRSRGQEPAKCPHWKNCLTKLLPCFLEHNMKRDEDPHKAAKEMPFQGSGKSAWCPVEISKTVLWPESISVVRCVELFEAPVECEEEEEVEEEKGSFCASPESSRDDFQEGREGIVARLTESLFLDLLGEENGGFCQQDMGESCLLPPSGSTSAHMPWDEFPSAGPKEAPPWGKEQPLHLEPSPPASPTQSPDNLTCTETPLVIAGNPAYRSFSNSLSQSPCPRELGPDPLLARHLEEVEPEMPCVPQLSEPTTVPQPEPETWEQILRRNVLQHGAAAAPVSAPTSGYQEFVHAVEQGGTQASAVVGLGPPGEAGYKAFSSLLASSAVSPEKCGFGASSGEEGYKPFQDLIPGCPGDPAPVPVPLFTFGLDREPPRSPQSSHLPSSSPEHLGLEPGEKVEDMPKPPLPQEQATDPLVDSLGSGIVYSALTCHLCGHLKQCHGQEDGGQTPVMASPCCGCCCGDRSSPPTTPLRAPDPSPGGVPLEASLCPASLAPSGISEKSKSSSSFHPAPGNAQSSSQTPKIVNFVSVGPTYMRVS

SEQ ID NO: 839 - DNA, 3287 bp, Homo sapien
agactgaggcggaggcagccccgcgccgcgccggacccgagcatatttcattttctgtcattggactttgagccattagaaccatgagcaactacagtgtgtcactggttggcccagctccttggggtttccggctgcagggcggtaaggatttcaacatgcctctgacaatctctagtctaaaagatggcggcaaggcagcccaggcaaatgtaagaataggcgatgtggttctcagcattgatggaataaatgcacaaggaatgactcatcttgaagcccagaataagattaagggttgtacaggctctttgaatatgactctgcaaagagcatctgctgcacccaagcctgagccggttcctgttcaaaagggagaacctaaagaagtagttaaacctgtgcccattacatctcctgctgtgtccaaagtcacttccacaaacaacatggcctacaataaggcaccacggccttttggttctgtgtcttcaccaaaagtcacatccatcccatcaccatcgtctgccttcaccccagcccatgcgaccacctcatcacatgcttccccttcacccgtggctgccgtcactcctcccctgttcgctgcatctggactgcatgctaatgccaatcttagtgctgaccagtctccatctgcactgagcgctggtaaaactgcagttaatgtcccacggcagcccacagtcaccagcgtgtgttccgagacttctcaggagctagcagagggacagagaagaggatcccagggtgacagtaaacagcaaaatggcccaccaagaaaacacattgtggagcgctatacagagttttatcatgtacccactcacagtgatgccagcaagaagagactgattgaggatactgaagactggcgtccaagaactggaacaactcagtctcgctctttccgaatccttgcccagatcactgggactgaacatttgaaagaatctgaagccgataatacaaagaaggcaaataactctcaggagccttctccgcagttggcttccttggtagcttccacacggagcatgcccgagagcctggacagcccaacctctggcagaccaggggttaccagcctcacaactgcagctgccttcaagcctgtaggatccactggcgtcatcaagtcaccaagctggcaacggccaaaccaaggagtaccttccactggaagaatctcaaacagcgctacttactcaggatcagtggcaccagccaactcagctttgggacaaacccagccaagtgaccaggacactttagtgcaaagagctgagcacattccagcagggaaacgaactccgatgtgcgcccattgtaaccaggtcatcagaggaccattcttagtggcactggggaaatcttggcacccagaagaattcaactgcgctcactgcaaaaatacaatggcctacattggatttgtagaggagaaaggagccctgtattgtgagctgtgctatgagaaattctttgcccctgaatgtggtcgatgccaaaggaagatccttggagaagtcatcaatgcgttgaaacaaacttggcatgtttcctgttttgtgtgtgtagcctgtggaaagcccattcggaacaatgtttttcacttggaggatggtgaaccctactgtgagactgattattatgccctctttggtactatatgccatggatgtgaatttcccatagaagctggtgacatgttcctggaagctctgggctacacctggcatgacacttgctttgtatgctcagtgtgttgtgaaagtttggaaggtcagacctttttctccaagaaggacaagcccctgtgtaagaaacatgctcattctgtgaatttttgaaagtcaacagttcaggagaagagaaggaatttgaagagaaaaaggaaaattaaaattactaattaatttttagattcaatatttatatggagttttgaaaaataatagtggccctgaaggaataaattccagctttaaaaaccaagtctgaggaaatatttggcttcataaagtaaagagacggtttggcatttattattactttttcctgtattttatgcccataaaataagctttataaaaaccaatttcctgatggactattaaattcatcttagaataaattagtgaagaatttaattttagaataaataatccaatctgaaataattataccttctttccttgttaggtagttatgagtaaatctgcaaaaggcaatgaaaatgccttaaattttatcaataacagaattattgtatttaaaaaaaaactaatacttatctttaaaatagtaaataggattttaaacagagaattttatcagtaataggtgtcagtttttaaaaaattgcttgtaggctgagcgcggtggctcacgcctgtaatcccagcactttgggaggccaaggtgggtggaccacatgaggtcaggagtttgagatcagcctggccaacatggtgaaaccccatctctactaaaaatacaaaaattagccggacgcagtggcacgcgcctgtaatcccagctactcaagaggctgaggcacgagaatcacttgaacccgggagggagaggttgcagtgagccaagatcgtaccactgcactccagcctgggtgacagagtgagactccgtctccaaaaaaaaactttgcttgtatattatttttgccttacagtggatcattctagtaggaaaggacaataagattttttatcaaaatgtgtcatgccagtaagagatgttatattcttttcttatttcttccccacccaaaaataagctaccatatagcttataagtctcaaatttttgccttttactaaaatgtgattgtttctgttcattgtgtatgcttcatcacctatattaggcaaattccattttttcccttgcgctaaggtaaagatttaattaaataattttggcctctcatagttttctctctctttaaagagaataaatagagggccaggtgtggtggctcacgcctgtgatcccagcactttgggaggccaagacgggcggatcatgaggtcaagagatcaagatcatcctggccaacatggtgaaaccctgtctctactaaaaatacaaaaatgagctgggcatggtggggcgtgcctgtagtcccatgtacttgggaggctgaggcaggaaaattcttgaacccaggagacggaagttgcagtgagctgagatcacaccactgcactccagcctggtgacagagcaagactccggctctt

SEQ ID NO: 840 - protein, 596 aa, Homo sapien
MSNYSVSLVGPAPWGFRLQGGKDFNMPLTISSLKDGGKAAQANVRIGDVVLSIDGINAQGMTHLEAQNKIKGCTGSLNMTLQRASAAPKPEPVPVQKGEPKEVVKPVPITSPAVSKVTSTNNMAYNKAPRPFGSVSSPKVTSIPSPSSAFTPAHATTSSHASPSPVAAVTPPLFAASGLHANANLSADQSPSALSAGKTAVNVPRQPTVTSVCSETSQELAEGQRRGSQGDSKQQNGPPRKHIVERYTEFYHVPTHSDASKKRLIEDTEDWRPRTGTTQSRSFRILAQITGTEHLKESEADNTKKANNSQEPSPQLASLVASTRSMPESLDSPTSGRPGVTSLTTAAAFKPVGSTGVIKSPSWQRPNQGVPSTGRISNSATYSGSVAPANSALGQTQPSDQDTLVQRAEHIPAGKRTPMCAHCNQVIRGPFLVALGKSWHPEEFNCAHCKNTMAYIGFVEEKGALYCELCYEKFFAPECGRCQRKILGEVINALKQTWHVSCFVCVACGKPIRNNVFHLEDGEPYCETDYYALFGTICHGCEFPIEAGDMFLEALGYTWHDTCFVCSVCCESLEGQTFFSKKDKPLCKKHAHSVNF

SEQ ID NO: 841 - DNA, 3287 bp, Homo sapien; identical to SEQ ID NO: 839

SEQ ID NO: 842 - protein, 596 aa, Homo sapien; identical to SEQ ID NO: 840

SEQ ID NO: 843 - DNA, 1000 bp, Homo sapien
aattcgccagcggcgcggtggacagtcatggcggcccggcgcggggctctcatagtgctggagggcgtggaccgcgccgggaagagcacgcagagccgcaagctggtggaagcgctgtcgcgcgggccaccgcccgaactgctccggttcccggaaagatcaactgaaatcggcaaacttctgagttcctacttgcaaaagaaaagtgacgtggaggatcactcggtgcacctgcttttttctgcaaatcgctgggaacaagtgccgttaattaaggaaaagttgagccagggcgtgaccctcgtcgtggacagatacgcattttctggtgtggccttcaccggtgccaaggagaatttttccctagactggtgtaaacagccagacgtgggccttcccaaacccgacctggtcctgttcctccagttacagctggcggatgctgccaagcggggagcgtttggccatgagcgctatgagaacggggctttccaggagcgggcgctccggtgtttccaccagctcatgaaagacacgactttgaactggaagatggtggatgcttccaaaagactcgaagctgtccatgaggaactccgcgtgctctctgaggacgccatccgcactgccacagagaagccgctgggggagctatggaagtgacccaaggctgcccactggagacgcctctccctgcagtcccccgagaggtgggagactcgcggaaggccccgtccccagcggagtccagaccccacaacttcaggagctctttcccggcagcagagatctgcaggctgcctcttctgccccggagctggggtgcactggggacccccgtggtggggaccttggcagtgtggacatgagcagagcgatggagcagtctcctgccctctcccctgtcctgatggcactctgttgtattttcttactgaagttcagtgataactctgagcagtttcattgtgatcactgtaaatggtaatcagttggaatt

SEQ ID NO: 844 - protein, 211 aa, Homo sapien
MAARRGALIVLEGVDRAGKSTQSRKLVEALSRGPPPELLRFPERSTEIGKLLSSYLQKKSDVEDHSVHLLFSANRWEQVPLIKEKLSQGVTLVVDRYAFSGVAFTGAKENFSLDWCKQPDVGLPKPDLVLFLQLQLADAAKRGAFGHERYENGAFQERALRCFHQLMKDTTLNWKMVDASKRLEAVHEELRVLSEDAIRTATEKPLGELWK

SEQ ID NO: 845 - DNA, 3301 bp, Homo sapien; identical to SEQ ID NO: 13

SEQ ID NO: 846 - protein, 1011 aa, Homo sapien; identical to SEQ ID NO: 14

SEQ ID NO: 847 - DNA, 2764 bp, Homo sapien
ctctaaagcttagagccaagatggcgggatccaggcaaaggggtctccgggccagagttcggccgctgttctgcgccttgctgctgtcactcggtcgcttcgtccggggcgacggcgtgggaggagaccccgcggtcgcgttgccacatcgccgtttcgagtacaaatacagcttcaaggggccgcacctggtgcagagcgacgggaccgtgcccttctgggcccacgcggggaatgctattccaagttcagatcaaattcgagtagcaccatctttaaaaagccaaagaggctcagtgtggacaaagacaaaagcggcctttgagaactgggaagttgaggtgacatttcgagtgactggaagaggtcgaattggagctgatggcctagcaatttggtatgcagaaaatcaaggcttggagggccctgtgtttggatcagctgatctgtggaatggtgttggaatattttttgattcttttgacaatgatggaaagaaaaataatcctgctatagtaattataggcaacaatggacaaatccattatgaccatcaaaatgacggggctagtcaagctttggcaagttgccagagggacttccgcaacaaaccctatcctgtccgagcaaagattacctattaccagaacacactgacagtaatgatcaataatggctttacaccagataaaaatgattatgaattttgtgccaaagtggaaaatatgattatccctgcacaagggcattttggaatatctgctgcaactggaggtcttgcagatgaccatgatgtcctttcttttctgactttccagttgactgaacctggaaaagagccgcccacaccagataaagaaatttcggaaaaggaaaaagaaaagtatcaggaggaatttgagcactttcaacaagaattggataaaaaaaaagaggaattccagaagggccaccccgacctccaagggcagcctgcggaggaaatatttgagagtgtaggagatcgagagctaagacaagtctttgaaggacagaatcgtattcatcttgaaatcaagcagctgaaccggcagttagatatgattcttgatgaacagagaagatatgtctcttccttaacagaggaaatctctaaaagaggagcaggaatgcctgggcagcatgggcagattactcaacaagaactggatactgttgtgaaaactcagcatgagattctgagacaagtaaatgaaatgaaaaattccatgagtgaaaccgtcagactggtcagtggaatgcagcaccctggctctgctggaggcgtctatgagacaacacagcacttcattgacatcaaagagcacctgcacatagtaaagagggacatagataacttagtgcagcgaaatatgccatcaaatgaaaagccgaaatgcccagaactaccaccatttccatcatgtttgtctacggtccacttcattatatttgttgtggtgcaaactgtattattcattggttatatcatgtataggtctcagcaagaagcagctgccaaaaaattcttttgactaccattttcctgtgtacttcatctatttgtgtacaaaatgatgtcgttttgagggaatttaagtatttaaattgcttcatagtctaaattattaattttcttaataaaataactgtttaaacattgatttgcagttaagaataaaccttaaagcaaagacaaccacattttaatttgttcacagtatgtaaatctgtctaaatttcagtgaatttctggtcagtatgatgcagcctctgagcagatattgaccagtaagagggtaaataaagtgggggcaacccctggatatgaatgttaccccctaagtctccaatattgcaggtttccctgtataacgtaaacacacttgccctcatgcctcccagaatatgaggtctaattaagaagtcccatcaggtttattttgtaaccaaagtcttttttagaggtcagacttcctaatcaaaggcctgggcctgcagtcctttcatcttaatgcaacttcctttgaaatcaaagaatattttgtctgagagctttaaggatctggtaatagacttcaaaatgttaagtgaaattttttttcctctatttatcaatgatatatttcacttttaaaggaaattttggaggaaaatatagctgctttttgcctaaaaaaccttgtgggtggaaatattcctctgagaatggcttttataggtattttgcctggtaatgtattcattcatgattgcccatattcttgaatgtttcttcattccaatggggtcaggtcaatattatgaaaataatttttatatttatatttgtaactaagaatttatttctccctttactacacgatgtaaattcacgtcaaattcgatgatctgaggatttaaattcacaaaacctgccactacattctggtttacattagttacttcatgctggctggggttagtgaccatttgcatactcttttaaatcaaggaggctgtagtagaggcagttttaagattcttgaaggcaaaatttgaaaaacagtgaatacttctaattgtttccttttagtgccagaactaagacattgtgaagcacttgttagtaaacttaaccttgaaatgtcagactggaaggagtttttatgtctttgtgcatacttctgggtattacagaaacagtctgtaaataacattttaagatgcaaatttaattctgttcacagctgatttatactgattt

SEQ ID NO: 848 - protein, 510 aa, Homo sapien
MAGSRQRGLRARVRPLFCALLLSLGRFVRGDGVGGDPAVALPHRRFEYKYSFKGPHLVQSDGTVPFWAHAGNAIPSSDQIRVAPSLKSQRGSVWTKTKAAFENWEVEVTFRVTGRGRIGADGLAIWYAENQGLEGPVFGSADLWNGVGIFFDSFDNDGKKNNPAIVIIGNNGQIHYDHQNDGASQALASCQRDFRNKPYPVRAKITYYQNTLTVMINNGFTPDKNDYEFCAKVENMIIPAQGHFGISAATGGLADDHDVLSFLTFQLTEPGKEPPTPDKEISEKEKEKYQEEFEHFQQELDKKKEEFQKGHPDLQGQPAEEIFESVGDRELRQVFEGQNRIHLEIKQLNRQLDMILDEQRRYVSSLTEEISKRGAGMPGQHGQITQQELDTVVKTQHEILRQVNEMKNSMSETVRLVSGMQHPGSAGGVYETTQHFIDIKEHLHIVKRDIDNLVQRNMPSNEKPKCPELPPFPSCLSTVHFIIFVVVQTVLFIGYIMYRSQQEAAAKKFF

SEQ ID NO: 849 - DNA, 2764 bp, Homo sapien; identical to SEQ ID NO: 847

SEQ ID NO: 850 - protein, 510 aa, Homo sapien; identical to SEQ ID NO: 848

SEQ ID NO: 851 - DNA, 2156 bp, Homo sapien
ggaggccagtgcgcggccgcggtgctctaccggcgtgtcgctccgccccagggagagccggcgctaccatggaggagtaccatcgccactgcgacgaggttggcttcaatgctgaggaagcccacaatattgtcaaagagtgtgtagatggggttttaggtggtgaagattataatcacaacaacatcaaccagtggactgcaagcatagtggaacaatccttaacacacctggttaagttgggaaaagcctataaatatattgtgacctgtgcagtggtccagaagagcgcatatggctttcacacagccagctcctgtttttgggataccacatctgatggaacctgtaccgtaagatgggagaaccggaccatgaactgtattgtcaacgtttttgccattgctattgttctttaactgactaaaaatgttgggctaaagccattaacttaagaatttgtcagtgtatcctttccaaaaagagtaatagttgtttactagtgtgctagatgaaaagcgtgcaatatgctttaaagctatcaacaaaaactgaatattataagcaagcaatatcatagtaattggcagattagctcatattctatacagcatcgtttaaataggaaaaatttaatgctagcaaaaaataaatttagaatatggcatgacatgaaaatacaatcttatatttacaccagcttttcactaatattttgtacctaaggtgatggggaactccattcagataataaaattctctttcagctagagaagttaacaggaataaatatatgaacaaaaaagctgcaaggataaatgtggagaaaatgatgagaattagctaacatttttaagtttttttaaactttcttcccctcagttgtacttaatatttagtggaaagtaataatttttttattttctatcaactaatagtatagtaacaactatgattaacttgtttactttttctgaggattagtaaatcaattttttttaatttcaaattttggatttacacttgagggtaaattaaatctggtaaactgaatttcctagttaaataaaattagttgcagtatatgatgaacagtgtatgactcaaacagctgccttacaattcactcattccatgtggaacaaacatttatcagatgcctattatgggcatatgtctctgctaagcaccatagttgtcaatgtgctgtgcaaatgctaagttccttttagcaattgttcagttggaagacgtattaatatttggggaaggaaaagaaagtagttgttttacaagggaggaaaaaagtgaatctggttacacatatggaagtaagcaaaatgaaaagcacttattgctttctgacagaattatagatgtaattttaagagttgctcctagcaagttaaaagtgcatataaaatatgcaactcttagttaaaggccttattatcagtcttacctatacaagtagtaaattttgtcattgctttagttacaaccatctgtaaataacttaaaagacttattatgtggggttcaaattgagtggaataaagtatagattaaaagtatacaatccttagcacgttatctcagggcttatgaaatgtaattaaatttattaagaaaatagatgaaaaattagggtacacagctggccaccaaatgcgaagtcaatctgctacttaaccctgaaaacaaaatcagttttgcatattaccactaacactaatacatatagagagcggaaccataactcattgaattttggagaggaataagcttagcgttaatattgacaatattaaggcaatattcttgtaggaatactatgtgcatgtttgatattttgccaaataacaataattaataattgttcaatgtttaagaataatattaacaaaataaaggagtttaatgcagtgatctttgtttttggcacatcaaaaattctcagtcattattcatgtttcttttatgctgctggcttttgtgccctggaagatcataatagtgaccaaaatatacatgcagacttgttttttattattgttgtttaagcataatttaagaaaaaaaatttttacctggtgaacttgctatctgctctgtttctagttaaaatataataaatattatcttcctgtgctgta

SEQ ID NO: 852 - protein, 116 aa, Homo sapien
MEEYHRHCDEVGFNAEEAHNIVKECVDGVLGGEDYNHNNINQWTASIVEQSLTHLVKLGKAYKYIVTCAVVQKSAYGFHTASSCFWDTTSDGTCTVRWENRTMNCIVNVFAIAIVL

SEQ ID NO: 853 - DNA, 2076 bp, Homo sapien
acattctttcagacccggcccgctgcggggcgttcctggggggtagcctcaaggccagcggggttccttcggctgcgtttctgtgggaggccctgaaacgcgcggagcttccctctgcctccaggctttcccagcgagagtgaaattaaacttgaaactcggatcaactggcagtcgttgttggtagaacgccctaaggacccctccccgcgggacggagggaggactcgggacagggaattggccctgggagaaaacgcgcggggggcgtccgagacgccccgtgaaagccgtgccgacccttgggaggactgacaggtctagagacacgcgctgtctgttgtggtgggcctcccgggaataagtgaggggctctgtgtttcgaggatggttctagcgcagagccgggtgtctgccggggtgggctccccgcattgttcgggctccggcgggggcggctctgattcctttccatggcccgcctcccaccccgggaatccccagtgctccttttccacggcttttctggcgtccccccgactctcccgcggcactttggcctaccttcccccagcgccgtggtcctccctggcgaccccctctgcgctcctggggtcctcctgcgccccccctcctccaccggcgcgctgcccacagccgcgtgccctctccccggagctggggaccaaggctgggccccgccggccgcatcggtgggaacttccgcggtccccatcccagggcgcacagggtccagctcctcggcgccgactcctggaaacaatgaaaggtattgttgcagcatctggcagtgagactgaggatgaggacagcatggacattcccttggacctttcttcatccgctggctcaggcaagagaaggagaaggggcaacctacccaaggagtctgtgcagattcttcgggattggctgtatgagcaccgttacaatgcctatccttcagagcaagaaaaagcgttgctgtcccagcaaacacacctgtctacgctacaggtctgtaactggttcatcaacgcccgccgcaggctcctccctgacatgctgagaaaggatggcaaagatccaaatcagttcacaatttcccgccgtggggccaagatttctgaaacgagctctgtggagtccgtgatgggcatcaaaaacttcatgccagctctagaggagaccccatttcattcctgtacagctgggccaaacccaaccctagggaggccactgtctcctaagccgtcatccccgggatcagttttggctcgtccatcagtgatctgccataccactgtgactgcattgaaagatgtccctttctctctctgccagtcggtcggtgtgggacaaaacacagatatacagcagatagcggccaaaaacttcacagacacctctctcatgtacccagaggacacttgtaaatctggaccaagtacgaatacacagagtggtcttttcaacactcctccccctactccaccggacctcaaccaggacttcagtggatttcagcttctagtggatgttgcactcaaacgggctgcagagatggagcttcaggcaaaacttacagcttaacccattttcaagcaaaacagttctcagaaatgtcatgattgccggggtgaaggcaagagatgaattgcattattttatatattttttattaatatttgcacatgggattgctaaaacagcttcctgttactgagatgtcttcaatggaatacagtcattccaagaactataaacttaaagctactgtagaaacaaagggttttcttttttaaatgtttcttggtagattattcataatgtgagatggttcccaatatcatgtgattttttttttcctccccttccctttttttgttattttttcagactgtgcaatacttagagaacctatagcatcttctcattcccatgtggaacaggatgcccacatactgtctaattaataaattttccattttttttcaaacaagtatgaatctagttggttgatgccttttttttcatgacataataaagtattttctttaaaaaaaaaaaaaaaaa

SEQ ID NO: 854 - protein, 401 aa, Homo sapien
MVLAQSRVSAGVGSPHCSGSGGGGSDSFPWPASHPGNPQCSFSTAFLASPRLSRGTLAYLPPAPWSSLATPSALLGSSCAPPPPPARCPQPRALSQELGTKAGPRRPHRWELPRSPSQGAQGPAPRRRLLETMKGIVAASGSETEDEDSMDIPLDLSSSAGSGKRRRRGNLPKESVQILRDWLYEHRYNAYPSEQEKALLSQQTHLSTLQVCNWFINARRRLLPDMLRKDGKDPNQFTISRRGAKISETSSVESVMGIKNFMPALEETPFHSCTAGPNPTLGRPLSPKPSSPGSVLARPSVICHTTVTALKDVPFSLCQSVGVGQNTDIQQIAAKNFTDTSLMYPEDTCKSGPSTNTQSGLFNTPPPTPPDLNQDFSGFQLLVDVALKRAAEMELQAKLTA

SEQ ID NO: 855 - DNA, 500 bp, Homo sapien
gctctcagaggcagcgtgcgggtgtgctctttgtgaaattccaccatggcgtaccgtggccagggtcagaaagtgcagaaggttatggtgcagcccatcaacctcatcttcagatacttacaaaatagatcgcggattcaggtgtggctctatgagcaagtgaatatgcggatagaaggctgtatcattggttttgatgagtatatgaaccttgtattagatgatgcagaagagattcattctaaaacaaagtcaagaaaacaactgggtcggatcatgctaaaaggagataatattactctgctacaaagtgtctccaactagaaatgatcaatgaagtgagaaattgttgagaaggatacagtttgtttttagatgtcctttgtccaatgtgaacatttattcatattgttttgattaccctcgtgttactacaagatggcaataaatactatgggattgtttgtattaaaaaatttacattgcttcttaaaaaaaaa

SEQ ID NO: 856 - protein, 92 aa, Homo sapien
MAYRGQGQKVQKVMVQPINLIFRYLQNRSRIQVWLYEQVNMRIEGCIIGFDEYMNLVLDDAEEIHSKTKSRKQLGRIMLKGDNITLLQSVSN

SEQ ID NO: 857 - DNA, 4906 bp, Homo sapien
gttgctgtcgccgttgctgtcggccgaggccaccaagaggcaacgggcggcaggttgcagtggaggggcctccgctcccctcggtggtgtgtgggtcctgggggtgcctgccggcccagccgaggaggcccacgcccaccatggtcccctgctggaaccatggcaacatcacccgctccaaggcggaggagctgctttccaggacaggcaaggacgggagcttcctcgtgcgtgccagcgagtccatctcccgggcatacgcgctctgcgtgctgtatcggaattgcgtttacacttacagaattctgcccaatgaagatgataaattcactgttcaggcatccgaaggcgtctccatgaggttcttcaccaagctggaccagctcatcgagttttacaagaaggaaaacatggggctggtgacccatctgcaataccctgtgccgctggaggaagaggacacaggcgacgaccctgaggaggacacagaaagtgtcgtgtctccacccgagctgcccccaagaaacatcccgctgactgccagctcctgtgaggccaaggaggttcctttttcaaacgagaatccccgagcgaccgagaccagccggccgagcctctccgagacattgttccagcgactgcaaagcatggacaccagtgggcttccagaagagcatcttaaggccatccaagattatttaagcactcagctcgcccaggactctgaatttgtgaagacagggtccagcagtcttcctcacctgaagaaactgaccacactgctctgcaaggagctctatggagaagtcatccggaccctcccatccctggagtctctgcagaggttatttgaccagcagctctccccgggcctccgtccacgtcctcaggttcctggtgaggccaatcccatcaacatggtgtccaagctcagccaactgacaagcctgttgtcgtccattgaagacaaggtcaaggccttgctgcacgagggtcctgagtctccgcaccggccctcccttatccctccagtcacctttgaggtgaaggcagagtctctggggattcctcagaaaatgcagctcaaagtcgacgttgagtctgggaaactgatcattaagaagtccaaggatggttctgaggacaagttctacagccacaagaaaatcctgcagctgattaagtcacagaaatttctgaataagttggtgatcttggtggaaacggagaaggagaagatcctgcggaaggaatatgtttttgctgactccaaaaagagagaaggcttctgccagctcctgcagcagatgaagaacaagcactcagagcagccggagcccgacatgatcaccatcttcatcggcacctggaacatgggtaacgccccccctcccaagaagatcacgtcctggtttctctccaaggggcagggaaagacgcgggacgactctgcggactacatcccccatgacatttacgtgatcggcacccaagaggaccccctgagtgagaaggagtggctggagatcctcaaacactccctgcaagaaatcaccagtgtgacttttaaaacagtcgccatccacacgctctggaacatccgcatcgtggtgctggccaagcctgagcacgagaaccggatcagccacatctgtactgacaacgtgaagacaggcattgcaaacacactggggaacaagggagccgtgggggtgtcgttcatgttcaatggaacctccttagggttcgtcaacagccacttgacttcaggaagtgaaaagaaactcaggcgaaaccaaaactatatgaacattctccggttcctggccctgggcgacaagaagctgagtccctttaacatcactcaccgcttcacgcacctcttctggtttggggatcttaactaccgtgtggatctgcctacctgggaggcagaaaccatcatccagaaaatcaagcagcagcagtacgcagacctcctgtcccacgaccagctgctcacagagaggagggagcagaaggtcttcctacacttcgaggaggaagaaatcacgtttgccccaacctaccgttttgagagactgactcgggacaaatacgcctacaccaagcagaaagcgacagggatgaagtacaacttgccttcctggtgtgaccgagtcctctggaagtcttatcccctggtgcacgtggtgtgtcagtcttatggcagtaccagcgacatcatgacgagtgaccacagccctgtctttgccacatttgaggcaggagtcacttcccagtttgtctccaagaacggtcccgggactgttgacagccaaggacagattgagtttctcaggtgctatgccacattgaagaccaagtcccagaccaaattctacctggagttccactcgagctgcttggagagttttgtcaagagtcaggaaggagaaaatgaagaaggaagtgagggggagctggtggtgaagtttggtgagactcttccaaagctgaagcccattatctctgaccctgagtacctgctagaccagcacatcctcatcagcatcaagtcctctgacagcgacgaatcctatggcgagggctgcattgcccttcggttagaggccacagaaacgcagctgcccatctacacgcctctcacccaccatggggagttgacaggccacttccagggggagatcaagctgcagacctctcagggcaagacgagggagaagctctatgactttgtgaagacggagcgtgatgaatccagtgggccaaagaccctgaagagcctcaccagccacgaccccatgaagcagtgggaagtcactagcagggcccctccgtgcagtggctccagcatcactgaaatcatcaaccccaactacatgggagtggggccctttgggccaccaatgcccctgcacgtgaagcagaccttgtcccctgaccagcagcccacagcctggagctacgaccagccgcccaaggactccccgctggggccctgcaggggagaaagtcctccgacacctcccggccagccgcccatatcacccaagaagtttttaccctcaacagcaaaccggggtctccctcccaggacacaggagtcaaggcccagtgacctggggaagaacgcaggggacacgctgcctcaggaggacctgccgctgacgaagcccgagatgtttgagaaccccctgtatgggtccctgagttccttccctaagcctgctcccaggaaggaccaggaatcccccaaaatgccgcggaaggaacccccgccctgcccggaacccggcatcttgtcgcccagcatcgtgctcaccaaagcccaggaggctgatcgcggcgaggggcccggcaagcaggtgcccgcgccccggctgcgctccttcacgtgctcatcctctgccgagggcagggcggccggcggggacaagagccaagggaagcccaagaccccggtcagctcccaggccccggtgccggccaagaggcccatcaagccttccagatcggaaatcaaccagcagaccccgcccaccccgacgccgcggccgccgctgccagtcaagagcccggcggtgctgcacctccagcactccaagggccgcgactaccgcgacaacaccgagctcccgtatcacggcaagcaccggccggaggaggggccaccagggcctctaggcaggactgccatgcagtgaagccctcagtgagctgccactgagtcgggagcccagaggaacggcgtgaagccactggaccctctcccgggacctcctgctggctcctcctgcccagcttcctatgcaaggctttgtgttttcaggaaagggcctagcttctgtgtggcccacagagttcactgcctgtgagacttagcaccaagtgctgaggctggaagaaaaacgcacaccagacgggcaacaaacagtctgggtccccagctcgctcttggtacttgggaccccagtgccttgttgagggcgccattctgaagaaaggaactgcagcgccgatttgagggtggagatatagataataataatattaataataataatggccacatggatcgaacactcatggtgtgccaagtgctgtgctaagtgctttacgaacattcgtcatatcaggatgacctcgagagctgaggctctagcacctaaaaccacgtgcccaaacccaccagtttaaaacggtgtgtgttcggaggggtgaaagcattaagaagcccagtgccctcctggagtgagacaagggctcggccttaaggagctgaagagtctgggtagcttgtttagggtacaagaagcctgttctgtccagcttcagtgacacaagctgctttagctaaagtcccgcgggttccggcatggctaggctgagagcagggatctacctggcttctcagttctttggttggaaggagcaggaaatcagctcctattctccagtggagagatctggcctcagcttgggctagagatgccaaggcctgtgccaggttccctgtgccctcctcgaggtgggcagccatcaccagccacagttaagccaagccccccaacatgtattccatcgtgctggtagaagagtctttgctgttgctcccgaaagccgtgctctccagcctggctgccagggagggtgggcctcttggttccaggctcttgaaatagtgcagccttttcttcctatctctgtggctttcagctctgcttccttggttattaggagaatagatgggtgatgtctttccttatgttgctttttcaacatagcagaattaatgtagggagctaaatccagtggtgtgtgtgaatgcagaagggaatgcaccccacattcccatgatggaagtctgcgtaaccaataaattgtgcctttctcactcaaaacc

SEQ ID NO: 858 - protein, 1188 aa, Homo sapien
MVPCWNHGNITRSKAEELLSRTGKDGSFLVRASESISRAYALCVLYRNCVYTYRILPNEDDKFTVQASEGVSMRFFTKLDQLIEFYKKENMGLVTHLQYPVPLEEEDTGDDPEEDTESVVSPPELPPRNIPLTASSCEAKEVPFSNENPRATETSRPSLSETLFQRLQSMDTSGLPEEHLKAIQDYLSTQLAQDSEFVKTGSSSLPHLKKLTTLLCKELYGEVIRTLPSLESLQRLFDQQLSPGLRPRPQVPGEANPINMVSKLSQLTSLLSSIEDKVKALLHEGPESPHRPSLIPPVTFEVKAESLGIPQKMQLKVDVESGKLIIKKSKDGSEDKFYSHKKILQLIKSQKFLNKLVILVETEKEKILRKEYVFADSKKREGFCQLLQQMKNKHSEQPEPDMITIFIGTWNMGNAPPPKKITSWFLSKGQGKTRDDSADYIPHDIYVIGTQEDPLSEKEWLEILKHSLQEITSVTFKTVAIHTLWNIRIVVLAKPEHENRISHICTDNVKTGIANTLGNKGAVGVSFMFNGTSLGFVNSHLTSGSEKKLRRNQNYMNILRFLALGDKKLSPFNITHRFTHLFWFGDLNYRVDLPTWEAETIIQKIKQQQYADLLSHDQLLTERREQKVFLHFEEEEITFAPTYRFERLTRDKYAYTKQKATGMKYNLPSWCDRVLWKSYPLVHVVCQSYGSTSDIMTSDHSPVFATFEAGVTSQFVSKNGPGTVDSQGQIEFLRCYATLKTKSQTKFYLEFHSSCLESFVKSQEGENEEGSEGELVVKFGETLPKLKPIISDPEYLLDQHILISIKSSDSDESYGEGCIALRLEATETQLPIYTPLTHHGELTGHFQGEIKLQTSQGKTREKLYDFVKTERDESSGPKTLKSLTSHDPMKQWEVTSRAPPCSGSSITEIINPNYMGVGPFGPPMPLHVKQTLSPDQQPTAWSYDQPPKDSPLGPCRGESPPTPPGQPPISPKKFLPSTANRGLPPRTQESRPSDLGKNAGDTLPQEDLPLTKPEMFENPLYGSLSSFPKPAPRKDQESPKMPRKEPPPCPEPGILSPSIVLTKAQEADRGEGPGKQVPAPRLRSFTCSSSAEGRAAGGDKSQGKPKTPVSSQAPVPAKRPIKPSRSEINQQTPPTPTPRPPLPVKSPAVLHLQHSKGRDYRDNTELPYHGKHRPEEGPPGPLGRTAMQ

SEQ ID NO: 859 - DNA, 4906 bp, Homo sapien; identical to SEQ ID NO: 857

SEQ ID NO: 860 - protein, 1188 aa, Homo sapien; identical to SEQ ID NO: 858

SEQ ID NO: 861 - DNA, 2997 bp, Homo sapien
caagaggtgcagagcaagcgcatgcgtcgtgacggcccggcttaggcgactctgggcgggtctgggccgctccagtgttttggggcacagaagctgtgggaggagctggaggcttcaccgtggtaaccacagcgccgctgctgccccgccttgcaggcctcaggactgtcatcgcctctgggtgtgagggtactttggccaccgtccccggaaataaccgcgcctgcctctcaagataccccatcctctccacgccgctgccgctgccgccatgcaaggggaggacgccagatacctcaaaaggaaagttaaaggagggaatatagatgtacatccatcagaaaaagcactcattgttcactatgaagtggaagctaccattcttggagaaatgggggaccccatgttgggagaacgaaaagaatgtcaaaaaatcattcgacttaagagtctcaatgccaacacagatataacttccctggcaaggaaggtggttgaagaatgtaaactcattcatccttcaaaactaaatgaggtagaacagctgttgtactatctacagaaccgccgtgattcattgtcaggaaaagagaaaaaagaaaaatcaagcaagcctaaagatccacctccttttgaaggaatggagattgatgaagttgctaacattaatgacatggatgaatatattgagttattatatgaagatattcctgacaaagttcggggttctgctttgatcctgcagcttgctcgaaatcctgataacttggaagaactactattgaatgaaactgcccttggtgcattagcaagggtcctgagagaagactggaagcaaagtgtcgagttagctacaaacataatttacatctttttttgtttctccagcttttctcaatttcatggacttattactcactataaaattggagctctgtgtatgaatattattgatcatgagttaaaaagacatgagctttggcaagaagaactctcaaagaagaagaaagctgttgatgaagaccctgaaaaccaaaccttgagaaaggattatgaaaaaacctttaaaaagtaccaggggcttgtggtaaaacaggaacagctattacgagttgctctttatttgcttctgaatcttgctgaggatactcgtaccgaactgaaaatgaggaacaagaacatagttcacatgttggtgaaagcccttgatcgggacaattttgagctgctaattttagttgtgtcattcttgaagaaactcagcatttttatggagaataaaaatgatatggtggaaatggatattgttgaaaaactggtgaaaatgataccttgtgagcatgaagacctgctgaatatcaccctccgacttttactaaacctatcctttgacacaggactgaggaataagatggtacaagttggactgcttcccaagctcactgcactcctaggcaatgacaactacaaacaaatagcaatgtgtgttctttaccacataagcatggatgaccgctttaaatcaatgtttgcatacactgactgtataccacagttaatgaagatgctgtttgaatgttcagatgaacgaattgacttggaactcatttctttctgcattaatcttgctgctaacaaaagaaatgtacagcttatctgtgaaggaaatgggctgaagatgctcatgaagagggctctgaagtttaaggatccattgctgatgaaaatgattagaaacatttctcagcatgatggaccaactaaaaatctgtttattgattatgttggggaccttgcagcccagatctctaatgatgaagaagaggagtttgtgattgaatgtttgggaactcttgcaaacttgaccattccagacttagactgggaattggttcttaaagaatataagttggttccatacctcaaggataaactaaaaccaggtgctgcagaagatgatcttgttttagaagtggttataatgattggaactgtatccatggatgactcttgtgctgcattgctagccaaatctggcataatccctgcactcattgaattgctaaatgctcaacaagaagatgatgaatttgtgtgtcagataatttatgtcttctaccagatggttttccaccaagccacaagagacgtcataatcaaggaaacacaggctccagcatatctcatagacctaatgcatgataagaataatgaaatccgaaaggtctgtgataatacattagatattatagcggaatatgatgaagaatgggctaagaaaattcagagtgaaaagtttcgctggcataactctcagtggctggagatggtagagagtcgtcagatggatgagagtgagcagtacttgtatggtgatgatcgaattgagccatacattcatgaaggagatattctcgaaagacctgaccttttctacaactcagatggattaattgcctctgaaggagccataagtcccgatttcttcaatgattaccaccttcaaaatggagatgttgttgggcagcattcatttcctggcagccttggaatggatggctttggccaaccagttggcattcttggacgccctgccacagcatatggattccgccctgatgaaccttactactatggctatggatcttgataaagtatctgtttccatgtgtaatctcagcttagaagaaatctgtgtgggttgggttaattttggatctttgcctaataatgcatgttgatgttattgtgggtctgtgtttgtttttatttttatatgttgttagctgcagattaaccccagcccctctgtcttctgttaagtacagttgatactgacattgttcactcatcaaaccacatcttgatgctaagtaacatttcccatgagcctcaaaactgaatgctgaaaagctactagactggaaaacaaacactgcattatgtatgttaagtgactaatttaatttcaattaaaaagcgtaaagtgaaaatgaa

SEQ ID NO: 862 - protein, 792 aa, Homo sapien
MQGEDARYLKRKVKGGNIDVHPSEKALIVHYEVEATILGEMGDPMLGERKECQKIIRLKSLNANTDITSLARKVVEECKLIHPSKLNEVEQLLYYLQNRRDSLSGKEKKEKSSKPKDPPPFEGMEIDEVANINDMDEYIELLYEDIPDKVRGSALILQLARNPDNLEELLLNETALGALARVLREDWKQSVELATNIIYIFFCFSSFSQFHGLITHYKIGALCMNIIDHELKRHELWQEELSKKKKAVDEDPENQTLRKDYEKTFKKYQGLVVKQEQLLRVALYLLLNLAEDTRTELKMRNKNIVHMLVKALDRDNFELLILVVSFLKKLSIFMENKNDMVEMDIVEKLVKMIPCEHEDLLNITLRLLLNLSFDTGLRNKMVQVGLLPKLTALLGNDNYKQIAMCVLYHISMDDRFKSMFAYTDCIPQLMKMLFECSDERIDLELISFCINLAANKRNVQLICEGNGLKMLMKRALKFKDPLLMKMIRNISQHDGPTKNLFIDYVGDLAAQISNDEEEEFVIECLGTLANLTIPDLDWELVLKEYKLVPYLKDKLKPGAAEDDLVLEVVIMIGTVSMDDSCAALLAKSGIIPALIELLNAQQEDDEFVCQIIYVFYQMVFHQATRDVIIKETQAPAYLIDLMHDKNNEIRKVCDNTLDIIAEYDEEWAKKIQSEKFRWHNSQWLEMVESRQMDESEQYLYGDDRIEPYIHEGDILERPDLFYNSDGLIASEGAISPDFFNDYHLQNGDVVGQHSFPGSLGMDGFGQPVGILGRPATAYGFRPDEPYYYGYGS

SEQ ID NO: 863 - DNA, 1390 bp, Homo sapien
gggaagtgctgttggagccgctgtggttgctgtccgcggagtggaagcgcgtgcttttgtttgtgtccctggccatggcgctgcagctctcccgggagcagggaatcaccctgcgcgggagcgccgaaatcgtggccgagttcttctcattcggcatcaacagcattttatatcagcgtggcatatatccatctgaaacctttactcgagtgcagaaatacggactcaccttgcttgtaactactgatcttgagctcataaaatacctaaataatgtggtggaacaactgaaagattggttatacaagtgttcagttcagaaactggttgtagttatctcaaatattgaaagtggtgaggtcctggaaagatggcagtttgatattgagtgtgacaagactgcaaaagatgacagtgcacccagagaaaagtctcagaaagctatccaggatgaaatccgttcagtgatcagacagatcacagctacggtgacatttctgccactgttggaagtttcttgttcatttgatctgctgatttatacagacaaagatttggttgtacctgaaaaatgggaagagtcgggaccacagtttattaccaattctgaggaagtccgccttcgttcatttactactacaatccacaaagtaaatagcatggtggcctacaaaattcctgtcaatgactgaggatgacatgaggaaaataatgtaattgtaattttgaaatgtggttttcctgaaatcaggtcatctatagttgatatgttttatttcattggttaatttttacatggagaaaaccaaaatgatacttactgaactgtgtgtaattgttcctttatttttttggtacctatttgacttaccatggagttaacatcatgaatttattgcacattgttcaaaaggaaccaggaggtttttttgtcaacattgtgatgtatattcctttgaagatagtaactgtagatggaaaaacttgtgctataaagctagatgctttcctaaatcagatgttttggtcaagtagtttgactcagtataggtagggagatatttaagtataaaatacaacaaaggaagtctaaatattcagaatctttgttaaggtcctgaaagtaactcataatctataaacaatgaaatattgctgtatagctccttttgaccttcatttcatgtatagttttccctattgaatcagtttccaattatttgactttaatttatgtaacttgaacctatgaagcaatggatatttgtactgtttaatgttctgtgatacagaactcttaaaaatgttttttcatgtgttttataaaatcaagttttaagtgaaagtgaggaaataaagttaagtttgttttaaaaaaaaaaaaaaaaaa

SEQ ID NO: 864 - protein, 205 aa, Homo sapien
MALQLSREQGITLRGSAEIVAEFFSFGINSILYQRGIYPSETFTRVQKYGLTLLVTTDLELIKYLNNVVEQLKDWLYKCSVQKLVVVISNIESGEVLERWQFDIECDKTAKDDSAPREKSQKAIQDEIRSVIRQITATVTFLPLLEVSCSFDLLIYTDKDLVVPEKWEESGPQFITNSEEVRLRSFTTTIHKVNSMVAYKIPVND

SEQ ID NO: 865 - DNA, 1471 bp, Homo sapien
gtggccgcgcaggaggacggagccctaaccgcaacccgcgccgcgccgcgccgatttgatttgtatccactgtcaccagcactgctcacttaggactttctggatccagacccaggcagcgcacactggactcttgaggaagaaggagactctaattttggattccttggtggaggaaaataaaacactctggtcttgccgccaacgatgcaagtgtgactgctggcgtcttcatgagctccagaggtcacagcacgctaccaaggactctcatggcccctcggatgatttccgagggagacataggaggcattgctcaaatcacctcctctctattcctgggcagaggcagtgtggcctccaatcggcacctcctccaggctcgtggcatcacctgcattgttaatgctaccattgagatccctaatttcaactggccccaatttgagtatgttaaagtgcctctggctgacatgccgcatgcccccattggactgtactttgacaccgtggctgacaagatccacagtgtgagcaggaagcacggggccaccttggtgcactgtgctgcaggggtgagccgctcagccacgctgtgtatcgcgtacctgatgaaattccacaacgtgtgcctgctggaggcatacaactgggtgaaagcccggcgacctgtcatcaggcccaacgtaggcttctggaggcaactgatagactacgagcgccagctctttgggaagtcgacagttaaaatggtacagacaccttatggcatagttcccgacgtctatgagaaggagtcccgacacctgatgccttactgggggatttagtgccactgaagcctgcgtcagcagcccgagcggggccggcatctgctccccgccgtctgctccctctccactctcttctcaaatggctgacttctggttctccctcaagtgttttttacactgggtgttcaaatttattttaagagatagggagggaggggacataaagggaatgcatacattgctagtcacatttttaaaattaacattttggaatagtgtttatggaaatctttagcttttaatcatttttaccaatttgaacagtttaataaactggttctgctctcttctgaatctcatgcctttggcaccttggtaggtgcaggaggagctcagtgcaaaaatcactttggggcctcattaaccctttagagacaagctttgccccaggctgcggaccagacagatgcttagggaaggttgataccagcttcagtctctactggattagccctactctttcctttcccctccattatttagtgactctgtaagtaagttaaatacacccttattatttagctgttaagtaactataatgaaatctgctgcaaaatctctcttggaatccatgtgcccaggattatattagcattatttttaataaatctatatgcttaaaaaaaaaaaaaaaaaaa

SEQ ID NO: 866 - protein, 198 aa, Homo sapien
MSSRGHSTLPRTLMAPRMISEGDIGGIAQITSSLFLGRGSVASNRHLLQARGITCIVNATIEIPNFNWPQFEYVKVPLADMPHAPIGLYFDTVADKIHSVSRKHGATLVHCAAGVSRSATLCIAYLMKFHNVCLLEAYNWVKARRPVIRPNVGFWRQLIDYERQLFGKSTVKMVQTPYGIVPDVYEKESRHLMPYWGI

SEQ ID NO: 867 - DNA, 2564 bp, Homo sapien
ggggcggtcgcagctgaagcaggcctaccctctgaagaggtccaagcaacggaagtactactacgaagctgcctttctggccatccttgagaaaaatagacagatggccaaggagaggggcctaataagccccagtgattttgcccagctgcaaaaatacatggaatactccaccaaaaaggtcagtgatgtcctaaagctcttcgaggatggcgagatggctaaatatgtccaaggagatgccattgggtacgagggattccagcaattcctgaaaatctatctcgaagtggataatgttcccagacacctaagcctggcactgtttcaatcctttgagactggtcactgcttaaatgagacaaatgtgacaaaagatgtggtgtgtctcaatgatgtttcctgctacttttcccttctggagggtggtcggccagaagacaagttagaattcaccttcaagctgtacgacacggacagaaatgggatcctggacagctcagaagtggacaaaattatcctacagatgatgcgagtggctgaatacctggattgggatgtgtctgagctgaggccgattcttcaggagatgatgaaagagattgactatgatggcagtggctctgtctctcaagctgagtgggtccgggctggggccaccaccgtgccactgctagtgctgctgggtctggagatgactctgaaggacgacggacagcacatgtggaggcccaagaggttccccagaccagtctactgcaatctgtgcgagtcaagcattggtcttggcaaacagggactgagctgtaacctctgtaagtacactgttcacgaccagtgtgccatgaaagccctgccttgtgaagtcagcacctatgccaagtctcggaaggacattggtgtccaatcacatgtgtgggtgcgaggaggctgtgagtccgggcgctgcgaccgctgtcagaaaaagatccggatctaccacagtctgaccgggctgcattgtgtatggtgccacctagagatccacgatgactgcctgcaagcggtgggccatgagtgtgactgtgggctgctccgggatcacatcctgcctccatcttccatctatcccagtgtcctggcctctggaccggatcgtaaaaatagcaaaacaagccagaagaccatggatgatttaaatttgagcacctctgaggctctgcggattgaccctgttcctaacacccacccacttctcgtctttgtcaatcctaagagtggcgggaagcaggggcagagggtgctctggaagttccagtatatattaaaccctcgacaggtgttcaacctcctaaaggatggtcctgagatagggctccgattattcaaggatgttcctgatagccggattttggtgtgtggtggagacggcacagtaggctggattctagagaccattgacaaagctaacttgccagttttgcctcctgttgctgtgttgcccctgggtactggaaatgatctggctcgatgcctaagatggggaggaggttatgaaggacagaatctggcaaagatcctcaaggatttagagatgagtaaagtggtacatatggatcgatggtctgtggaggtgatacctcaacaaactgaagaaaaaagtgacccagtcccctttcaaatcatcaataactacttctctattggcgtggatgcctctattgctcatcgattccacatcatgcgagagaaatatccggagaagttcaacagcagaatgaagaacaagctatggtacttcgaatttgccacatctgaatccatcttctcaacatgcaaaaagctggaggagtctttgacagttgagatctgtgggaaaccgctggatctgagcaacctgtccctagaaggcatcgcagtgctaaacatccctagcatgcatggtggctccaacctctggggtgataccaggagaccccatggggatatctatgggatcaaccaggccttaggtgctacagctaaagtcatcaccgaccctgatatcctgaaaacctgtgtaccagacctaagtgacaagagactggaagtggttgggctggagggtgcaattgagatgggccaaatctataccaagctcaagaatgctggacgtcggctggccaagtgctctgagatcaccttccacaccacaaaaacccttcccatgcaaattgacgtagaaccctggatgcagacgccctgtacaatcaagatcacccacaagaaccagatgcccatgctcatgggcccacccccccgctccaccaatttctttggcttcttgagctaagggggacacccttggcctccaagccagccttgaacccacctccctgtccctggactctactcccgaggctctgtacattgctgccacatactcctgccagcttgggggagtgttccttcaccctcacagtatttattatcctgcaccacctcactgttccccatgcgcacacacatacacacaccccaaaacacatacattgaaagtgcctcatctgaataaaatgacttgtgtttccctttgggatctgctg

SEQ ID NO: 868 - protein, 735 aa, Homo sapien
MAKERGLISPSDFAQLQKYMEYSTKKVSDVLKLFEDGEMAKYVQGDAIGYEGFQQFLKIYLEVDNVPRHLSLALFQSFETGHCLNETNVTKDVVCLNDVSCYFSLLEGGRPEDKLEFTFKLYDTDRNGILDSSEVDKIILQMMRVAEYLDWDVSELRPILQEMMKEIDYDGSGSVSQAEWVRAGATTVPLLVLLGLEMTLKDDGQHMWRPKRFPRPVYCNLCESSIGLGKQGLSCNLCKYTVHDQCAMKALPCEVSTYAKSRKDIGVQSHVWVRGGCESGRCDRCQKKIRIYHSLTGLHCVWCHLEIHDDCLQAVGHECDCGLLRDHILPPSSIYPSVLASGPDRKNSKTSQKTMDDLNLSTSEALRIDPVPNTHPLLVFVNPKSGGKQGQRVLWKFQYILNPRQVFNLLKDGPEIGLRLFKDVPDSRILVCGGDGTVGWILETIDKANLPVLPPVAVLPLGTGNDLARCLRWGGGYEGQNLAKILKDLEMSKVVHMDRWSVEVIPQQTEEKSDPVPFQIINNYFSIGVDASIAHRFHIMREKYPEKFNSRMKNKLWYFEFATSESIFSTCKKLEESLTVEICGKPLDLSNLSLEGIAVLNIPSMHGGSNLWGDTRRPHGDIYGINQALGATAKVITDPDILKTCVPDLSDKRLEVVGLEGAIEMGQIYTKLKNAGRRLAKCSEITFHTTKTLPMQIDVEPWMQTPCTIKITHKNQMPMLMGPPPRSTNFFGFLS

SEQ ID NO: 869 - DNA, 6430 bp, Homo sapien
gcggccgcggggaccctcggcgtggtcctctgaccctgcaaacccgcgacggaggaaggggaggtcctgcccgaggcgccagcccgaggaggaggatgcccatttaacccgccctcgcctgccgggcgcttgcctcggtgcccgccgccggagcctccgagccgcgcccgtggaagtgctgcatggggcagggctgctgaagcgcggagttcggggtcgcgccgctcccaggcaggcgcgggagcccggtgcggcagttggcacagtttcggcggcgccttctgcgcgggagtggggggcgcggtgcgcccggcacggcctccgcggtgccctggtgaggcgagagttatggagccgcccagctgcattcaggatgagccgttcccgcaccccctggagcccgagccgggcgtctcagctcagcccggcccggggaagccaagcgataagcggttccggctgtggtacgttggggggtcgtgcctggaccacaggaccacgctgcctatgctgccctggctcatggccgagatccgcaggcgcagccagaagcccgaggcgggcggctgcggggcgccggcggcccgagaggtgatcctggtgctcagcgcgcccttcctgcgttgcgtccccgcgccgggcgctggggcctcggggggcactagtccgtcggccacgcagcccaacccggcggtattcatcttcgagcacaaggcgcagcatatctcgcgcttcatccacaacagccacgacctcacctactttgcctacctgatcaaggcgcagcccgacgaccccgagtcgcagatggcctgccacgttttccgcgccacagaccccagccaggttcctgatgttattagcagccataaggcaattatctaaagcggccatgaaagaggatgccaaacccagcaaagataatgaggacgccttttacaactctcagaagttcgaagtcctgtactgtggaaaggtgaccgtgacccacaagaaggccccctcaagcctcatcgatgactgcatggagaagttcagcctgcacgaacagcagcgcctgaagatccaaggcgagcagcgcggtccggacccaggagaggacctggctgacttggaggtggtggtgcccgggtcccccggagactgcctgccggaggaggctgacggcaccgacacccaccttggcttacctgccggggccagccagcctgccctgaccagctctcgggtctgcttccctgagcggattttggaagattctggctttgatgagcagcaggagtttcggtctcggtgcagcagtgtcaccggcgtgcaacggagagttcacgagggcagccagaaatcccagccgcgacggagacacgcgagcgcacccagtcacgtccagccctcggactcggagaagaacaggaccatgctcttccaggttgggcgatttgagattaaccttatcagtccagacactaaatcagttgtgctagaaaagaattttaaagatatctcctcttgttctcagggtataaagcatgtggatcactttggctttatctgccgggagtctccagagcctggacttagccagtatatttgttatgtattccagtgtgccagcgaatctctggttgatgaggtaatgctgactctgaaacaggccttcagtacggcggctgccctgcagagtgccaagacgcagattaaactgtgtgaggcctgcccgatgcactctttgcataagctctgtgaaaggattgaaggtctctacccaccaagagccaagctggtgatacagaggcatctctcatcactgacagataatgagcaagctgacatctttgaaagagttcagaaaatgaagccagtcagtgaccaggaagaaaatgaacttgtgattttacacctgaggcagctgtgtgaagccaagcagaagacacacgtgcacatcggggaaggcccttctactatttcaaatagtacaatcccagaaaatgcaacaagcagtggaaggttcaaacttgacattctgaaaaataaagctaagagatccttaactagctccctggaaaatatcttctcaaggggagctaacagaatgagaggtcggcttggaagtgtggacagttttgaacggtccaacagtcttgcttcagagaaggactactcaccaggggattctccaccagggacaccgccagcgtccccaccgtcctcagcttggcaaacgtttcccgaagaggattccgactccccgcagtttcgaagacgggcacacacgttcagccacccaccttcaagcacaaagagaaagctgaatttgcaggatgggagggctcagggtgtgcgttcccctctgctgaggcagagctccagtgaacagtgcagcaatctttcgtcagttcgacgcatgtacaaggagagtaattcttcctccagtcttccaagtcttcacacttccttctctgccccttccttcactgccccctctttcctgaaaagcttttaccagaattcaggtagactgtccccacagtatgaaaatgaaatcagacaagacactgcttcagaatcaagtgatggagaagggagaaaaaggacctcatctacctgcagcaatgagtccctaagtgtgggaggaacctctgtcactcctcgccggatctcctggcggcagcgcattttcctcagggttgcttctcccatgaacaaatctccctcagcaatgcaacagcaagatggattggacaggaacgagctgctgccactgtcccccctctctccaaccatggaggaggaaccgctggttatattcctgtctggggaggatgacccagaaaagattgaagaaagaaagaaatcaaaagaactgaggagcttgtggagaaaagctatacaccaacaaatcttgttacttcgaatggaaaaagaaaaccagaaacttgaagcaagcagagatgaactccagtccagaaaagttaaattagactatgaagaagttggtgcatgtcagaaagaggtcttaataacttgggataagaagttgttaaactgcagagctaaaatcagatgtgatatggaagatattcatactcttcttaaagaaggagttcccaaaagtcgacgaggagaaatttggcagtttctggctttacagtaccgactcagacacagattgcctaataaacaacagcctcctgacatatcctataaggaacttttgaagcagctcactgctcagcagcatgcgattctcgtggatttaggaaggacgtttcctactcacccttacttttcagtacagcttgggccaggacagctgtcactgtttaacctcctgaaagcctattctttgctggacaaagaagtgggatactgtcaggggatcagctttgtggctggagtcctgcttctgcacatgagtgaagagcaagcctttgaaatgctgaaattcctcatgtatgacctcggcttccgcaagcagtacagacctgacatgatgtcgctgcagattcaaatgtaccagctgtccaggctccttcatgactatcacagagatctctacaatcaccttgaagaaaatgaaatcagccccagtctttatgctgccccctggttcctcacattgtttgcctctcagttttcattaggatttgtagccagagtttttgatattatttttcttcagggaactgaagttatattcaaggttgcactcagcctactgagcagccaagagacacttataatggaatgtgagagctttgaaaatattgttgagtttcttaaaaacacgctacctgatatgaatacctctgaaatggaaaaaattattacccaggtttttgagatggatatttctaagcagttgcatgcctatgaggtggaatatcatgtgctacaggatgagcttcaggaatcttcatattcctgtgaggatagtgaaactttggagaagctggagagggccaatagccaactgaaaagacaaaacatggacctcctagaaaaattacaggtagctcatactaaaatccaggccttggaatcaaacctggaaaatcttttgacgagagagaccaaaatgaagtctttaatccggaccctggaacaagaaaaaatggcttatcaaaagacagtggagcaactccggaagctgctgcccgcggatgctctagtcaattgtgacctgttgctgagagacctaaactgcaaccctaacaacaaagccaagataggaaataagccataattgaagaggcacggcctcagcagaaagtgctccttagaatactacagagaggaagagcctgcatgtcgctggcccaaggctggaccctgaagctgatggaaccacctaatactggtgctgagctcctagtcacagcaggtggacctcgtgctcatcagagcatgccaatcctaagccattggacatatgtagactggtttttgttgttgctatgtacgtataaatatatatataaaatgaacatagttcatgctttcagataaaatgagtagatgtatatttagattaatttttttagtcagaacttcatgaaatccacaccaaaggaaaggtaaactgaaatttcccttggacatatgtgaaatctttttgtctttatagtgaaacaaagccagagcatctttgtatattgcaatatacttgaaaaaaatgaatgtatttttttctccaaagaacagcatgtttcactcaatggtgaaaaggtggaaacatttatgtaactttatgtgtatctgtcttgatatctactgacattgtctatatgaggaaaatgattactggtcatgctcctgtgagttttttgggaaggtagggtcatttctccctgcctgctttgtgccaactagcatgttgcatctacatgcattatgagtctggttaggcattactttaaacatacataaagagacagtaggacattgtggctgagtctacccagctcaaggtaaaggagaatgttgctaattttttagcaaactagaccagcattattactcaaactaaaaatatcacacctgaaaaatttaatttaggacctaaaatgtctagattagctttctgctttttttatttgaataactcattcagttgtgaatgaattcctctttatttggtgccacagtcaccaaatgacaaggatttgccactttcccaccaaattgtgagtgcttgtaatttaggtctctctaccttaaattcaatataaggaaacgtaattatgattgattttttccaaagatgacaagctgtgttgaaatacattttttcttttgaccaattgacagaatctaataagctttaataatcttccccttttatgtgaaaagttttgagaactgtgaaatgtttaggaacaaactgttgaaatccattggaagggaaaaaagaaagtggtaccagtgttaccagctcaactaaaacctgcaattctgcatttcaactcttcacttcctcagcctacaaatagctcattagatgacattcacgcatgctgggtataggcaaggaaagtaattttcaaagtacatttgcagttctctttttcagagatgattctatgatagtgcctctgaaagttgatgcagcatttttgcctttccaaaaagtatttatcctcactgctttttgcagtacttgtattttcacagatggattatctggggtaattttcttcaaagggagtttgttatacacagtgaaaatgtattatagagtagaatagtaaagctctaggggtttcagaaagctttgatgaacagatgacaaacatctgaaaccccctccgcactgttacccagtgtgtatataatgacttgttatagctcagtgtgcccttgaatccatacagtttcttaaaagacaataaaatcttattaataaagttaatgtaacttctaagttctagaaaatgctgattctgtctgccccattcaattgggggctactaattgatttgttgcttggatttcctgagaatttctctatttgtaggaggggttttttctttttacggtctgttgatgacaattactttatgggtgtgatgcaccgatggtagccaaggaatctgttggggaagttcggaaagaaaccttttctttcttttattcagtttaaagtaaactttatcctggatgtttagaatcaacattaagagttatattatggtgttcagagattaagctgacttggatacaatattttcttttgaaaatgaattttctttttcatttgtgatttttaaaaaatgttgcaccagttatgcttcatgcatcgttacatcttcatcaggttaatgtaatgtctagttcctttgcaataaatatattgctgcagcttcaaaaaaatctatgtcgggtgcggagaaagaggtaatgaaatggcaggaattcgatatcagcttat

SEQ ID NO: 870 - protein, 1117 aa, Homo sapien
MKEDAKPSKDNEDAFYNSQKFEVLYCGKVTVTHKKAPSSLIDDCMEKFSLHEQQRLKIQGEQRGPDPGEDLADLEVVVPGSPGDCLPEEADGTDTHLGLPAGASQPALTSSRVCFPERILEDSGFDEQQEFRSRCSSVTGVQRRVHEGSQKSQPRRRHASAPSHVQPSDSEKNRTMLFQVGRFEINLISPDTKSVVLEKNFKDISSCSQGIKHVDHFGFICRESPEPGLSQYICYVFQCASESLVDEVMLTLKQAFSTAAALQSAKTQIKLCEACPMHSLHKLCERIEGLYPPRAKLVIQRHLSSLTDNEQADIFERVQKMKPVSDQEENELVILHLRQLCEAKQKTHVHIGEGPSTISNSTIPENATSSGRFKLDILKNKAKRSLTSSLENIFSRGANRMRGRLGSVDSFERSNSLASEKDYSPGDSPPGTPPASPPSSAWQTFPEEDSDSPQFRRRAHTFSHPPSSTKRKLNLQDGRAQGVRSPLLRQSSSEQCSNLSSVRRMYKESNSSSSLPSLHTSFSAPSFTAPSFLKSFYQNSGRLSPQYENEIRQDTASESSDGEGRKRTSSTCSNESLSVGGTSVTPRRISWRQRIFLRVASPMNKSPSAMQQQDGLDRNELLPLSPLSPTMEEEPLVIFLSGEDDPEKIEERKKSKELRSLWRKAIHQQILLLRMEKENQKLEASRDELQSRKVKLDYEEVGACQKEVLITWDKKLLNCRAKIRCDMEDIHTLLKEGVPKSRRGEIWQFLALQYRLRHRLPNKQQPPDISYKELLKQLTAQQHAILVDLGRTFPTHPYFSVQLGPGQLSLFNLLKAYSLLDKEVGYCQGISFVAGVLLLHMSEEQAFEMLKFLMYDLGFRKQYRPDMMSLQIQMYQLSRLLHDYHRDLYNHLEENEISPSLYAAPWFLTLFASQFSLGFVARVFDIIFLQGTEVIFKVALSLLSSQETLIMECESFENIVEFLKNTLPDMNTSEMEKIITQVFEMDISKQLHAYEVEYHVLQDELQESSYSCEDSETLEKLERANSQLKRQNMDLLEKLQVAHTKIQALESNLENLLTRETKMKSLIRTLEQEKMAYQKTVEQLRKLLPADALVNCDLLLRDLNCNPNNKAKIGNKP

SEQ ID NO: 871 - DNA, 5922 bp, Homo sapien
gcggccgcggggaccctcggcgtggtcctctgaccctgcaaacccgcgacggaggaaggggaggtcctgcccgaggcgccagcccgaggaggaggatgcccatttaacccgccctcgcctgccgggcgcttgcctcggtgcccgccgccggagcctccgagccgcgcccgtggaagtgctgcatggggcagggctgctgaagcgcggagttcggggtcgcgccgctcccaggcaggcgcgggagcccggtgcggcagttggcacagtttcggcggcgccttctgcgcgggagtggggggcgcggtgcgcccggccggcctccgcggtgccctggtgaggcgagagttatggagccgcccagctgcattcaggatgagccgttcccgcaccccctggagcccgagccgggcgtctcagctcagcccggccccgggaagccaagcgataagcggttccggctgtggtacgttggggggtcgtgcctggaccacaggaccacgctgcctatgctgccctggctcatggccgagatccgcaggcgcagccagaagcccgaggcgggcggctgcggggcgccggcggcccgagaggtgatcctggtgctcagcgcgcccttcctgcgttgcgtccccgcgccgggcgctggggcctcggggggcactagtccgtcggccacgcagcccaacccggcggtattcatcttcgagcacaaggcgcagcatatctcgcgcttcatccacaacagccacgacctcacctactttgcctacctgatcaaggcgcagcccgacgaccccgagtcgcagatggcctgccacgttttccgcgccacagaccccagccaggttcctgatgttattagcagcataaggcaattatctaaagcggccatgaaagaggatgccaaacccagcaaagataatgaggacgccttttacaactctcagaagttcgaagtcctgtactgtggaaaggtgaccgtgacccacaagaaggccccctcaagcctcatcgatgactgcatggagaagttcagcctgcacgaacagcagcgcctgaagatccaaggcgagcagcgcggtccggacccaggagaggacctggctgacttggaggtggtggtgcccgggtcccccggagactgcctgccggaggaggctgacggcaccgacacccaccttggcttacctgccggggccagccagcctgccctgaccagctctcgggtctgcttccctgagcggattttggaagattctggctttgatgagcagcaggagtttcggtctcggtgcagcagtgtcaccggcgtgcaacggagagttcacgagggcagccagaaatcccagccgcgacggagacacgcgagcgcacccagtcacgtccagccctcggactcggagaagaacaggaccatgctcttccaggttgggcgatttgagattaaccttatcagtccagacactaaatcagttgtgctagaaaagaattttaaagatatctcctcttgttctcagggtataaagcatgtggatcactttggctttatctgccgggagtctccagagcctggacttagccagtatatttgttatgtattccagtgtgccagcgaatctctggttgatgaggtaatgctgactctgaaacaggccttcagtacggcggctgccctgcagagtgccaagacgcagattaaactgtgtgaggcctgcccgatgcactctttgcataagctctgtgaaaggattgaaggtctctacccaccaagagccaagctggtgatacagaggcatctctcatcactgacagataatgagcaagctgacatctttgaaagagttcagaaaatgaagccagtcagtgaccaggaagaaaatgaacttgtgattttacacctgaggcagctgtgtgaagccaagcagaagacacacgtgcacatcggggaaggcccttctactatttcaaatagtacaatcccagaaaatgcaacaagcagtggaaggttcaaacttgacattctgaaaaataaagctaagagatccttaactagctccctggaaaatatcttctcaaggggagctaacagaatgagaggtcggcttggaagtgtggacagttttgaacggtccaacagtcttgcttcagagaaggactactcaccaggggattctccaccagggacaccgccagcgtccccaccgtcctcagcttggcaaacgtttcccgaagaggattccgactccccgcagtttcgaagacgggcacacacgttcagccacccaccttcaagcacaaagagaaagctgaatttgcaggatgggagggctcagggtgtgcgttcccctctgctgaggcagagctccagtgaacagtgcagcaatctttcgtcagttcgacgcatgtacaaggagagtaattcttcctccagtcttccaagtcttcacacttccttctctgccccttccttcactgccccctctttcctgaaaagcttttaccagaattcaggtagactgtccccacagtatgaaaatgaaatcagacaagacactgcttcagaatcaagtgatggagaagggagaaaaaggacctcatctacctgcagcaatgagtccctaagtgtgggaggaacctctgtcactcctcgccggatctcctggcggcagcgcattttcctcagggttgcttctcccatgaacaaatctccctcagcaatgcaacagcaagatggattggacaggaacgagctgctgccactgtcccccctctctccaaccatggaggaggaaccgctggttatattcctgtctggggaggatgacccagaaaagattgaagaaagaaagaaatcaaaagaactgaggagcttgtggagaaaagctatacaccaacaaatcttgttacttcgaatggaaaaagaaaaccagaaacttgaaggagcaagcagagatgaactccagtccagaaaagttaaattagactatgaagaagttggtgcatgtcagaaagaggtcttaataacttgggataagaagttgttaaactgcagagctaaaatcagatgtgatatggaagatattcatactcttcttaaagaaggagttcccaaaagtcgacgaggagaaatttggcagtttctggctttacagtaccgactcagacacagattgcctaataaacaacagcctcctgacatatcctataaggaacttttgaagcagctcactgctcagcagcatgcgattctcgtggatttaggaaggacgtttcctactcacccttacttttcagtacagcttgggccaggacagctgtcactgtttaacctcctgaaagcctattctttgctggacaaagaagtgggatactgtcaggggatcagctttgtggctggagtcctgcttctgcacatgagtgaagagcaagcctttgaaatgctgaaattcctcatgtatgacctcggcttccgcaagcagtacagacctgacatgatgtcgctgcagattcaaatgtaccagctgtccaggctccttcatgactatcacagagatctctacaatcaccttgaagaaaatgaaatcagccccagtctttatgctgccccctggttcctcacattgtttgcctctcagttttcattaggatttgtagccagagtttttgatattatttttcttcagggaactgaagttatattcaaggttgcactcagcctactgagcagccaagagacacttataatggaatgtgagagctttgaaaatattgttgagtttcttaaaaacacgctacctgatatgaatacctctgaaatggaaaaaattattacccaggtttttgagatggatatttctaagcagttgcatgcctatgaggtggaatatcatgtgctacaggatgagcttcaggaatcttcatattcctgtgaggatagtgaaactttggagaagctggagagggccaatagccaactgaaaagacaaaacatggacctcctagaaaaattacaggtagctcatactaaaatccaggccttggaatcaaacctggaaaatcttttgacgagagagaccaaaatgaagtctttaatccggaccctggaacaagaaaaaatggcttatcaaaagacagtggagcaactccggaagctgctgcccgcggatgctctagccaattgtgacctgttgctgagagacctaaactgcaaccctaacaacaaagccaagataggaaataagccataattgaagaggcacggcctcagcagaaagtgctccttagaatactacagagaggaagagcctgcatgtcgctggcccaaggctggaccctgaagctgatggaaccacctaatactggtgctgagctcctagtcacagcaggtggacctcgtgctcatcagagcatgccaatcctaagccattggacatatgtagactggtttttgttgttgctatgtacatataaatatatatataaaatgaacatagttcatgctttcagataaaatgagtagatgtatatttagattaatttttttagtcagaacttcatgaaatccacaccaaaggaaaggtaaactgaaatttcccttggacatatgtgaaatctttttgtctttatagtgaaacaaagccagagcatctttgtatattgcaatatacttgaaaaaaatgaatgtatttttttctccaaagaacagcatgtttcactcaatggtgaaaaggtggaaacatttatgtaactttatgtgtatctgtcttgatatctactgacattgtctatatgaggaaaatgattactggtcatgctcctgtgagttttttgggaaggtagggtcatttctccctgcctgctttgtgccaactagcatgttgcatctacatgcattatgagtctggttaggcattactttaaacatacataaagagacagtaggacattgtggctgagtctacccagctcaaggtaaaggagaatgttgctaattttttagcaaactagaccagcattattactcaaactaaaaatatcacacctgaaaaatttaatttaggacctaaaatgtctagattagctttctgctttttttatttgaataactcattcagttgtgaatgaattcctctttatttggtgccacagtcaccaaatgacaaggatttgccactttcccaccaaattgtgagtgcttgtaatttaggtctctctaccttaaattcagtataaggaaacgtaattatgattgattttttccaaagatgacaagctgtgttgaaatacattttttcttttgaccaattgacagaatctaataagctttaataatcttccccttttatgtgaaaagttttgagaactgtgaaatgtttaggaacaaactgttgaaatccattggaagggaaaaaagaaagtggtaccagtgttaccagctcaactaaaacctgcaattctgcatttcaactcttcacttcctcagcctacaaatagctcattagatgacattcacgcatgctgggtataggcaaggaaagtaattttcaaagtacatttgcagttctctttttcagagatgattctatgatagtgcctctgaaagttgatgcagcatttttgcctttccaaaaagtatttatcctcactgctttttgcagtacttgtattttcacagatggattatctggggtaattttcttcaaagggagtttgttatacacagtgaaaatgtattatagagtagaatagtaaagctctaggggtttcagaaagctttgatgaacagatgacaaacatctgaaaccccctccgcactgttacccagtgtgtatataatgacttgttatagctcagtgtgcccttgaatccatacagtttcttaaaagacaataaaatcttattaataaagttaatgtaacttct

SEQ ID NO: 872 - protein, 1299 aa, Homo sapien
MEPPSCIQDEPFPHPLEPEPGVSAQPGPGKPSDKRFRLWYVGGSCLDHRTTLPMLPWLMAEIRRRSQKPEAGGCGAPAAREVILVLSAPFLRCVPAPGAGASGGTSPSATQPNPAVFIFEHKAQHISRFIHNSHDLTYFAYLIKAQPDDPESQMACHVFRATDPSQVPDVISSIRQLSKAAMKEDAKPSKDNEDAFYNSQKFEVLYCGKVTVTHKKAPSSLIDDCMEKFSLHEQQRLKIQGEQRGPDPGEDLADLEVVVPGSPGDCLPEEADGTDTHLGLPAGASQPALTSSRVCFPERILEDSGFDEQQEFRSRCSSVTGVQRRVHEGSQKSQPRRRHASAPSHVQPSDSEKNRTMLFQVGRFEINLISPDTKSVVLEKNFKDISSCSQGIKHVDHFGFICRESPEPGLSQYICYVFQCASESLVDEVMLTLKQAFSTAAALQSAKTQIKLCEACPMHSLHKLCERIEGLYPPRAKLVIQRHLSSLTDNEQADIFERVQKMKPVSDQEENELVILHLRQLCEAKQKTHVHIGEGPSTISNSTIPENATSSGRFKLDILKNKAKRSLTSSLENIFSRGANRMRGRLGSVDSFERSNSLASEKDYSPGDSPPGTPPASPPSSAWQTFPEEDSDSPQFRRRAHTFSHPPSSTKRKLNLQDGRAQGVRSPLLRQSSSEQCSNLSSVRRMYKESNSSSSLPSLHTSFSAPSFTAPSFLKSFYQNSGRLSPQYENEIRQDTASESSDGEGRKRTSSTCSNESLSVGGTSVTPRRISWRQRIFLRVASPMNKSPSAMQQQDGLDRNELLPLSPLSPTMEEEPLVIFLSGEDDPEKIEERKKSKELRSLWRKAIHQQILLLRMEKENQKLEGASRDELQSRKVKLDYEEVGACQKEVLITWDKKLLNCRAKIRCDMEDIHTLLKEGVPKSRRGEIWQFLALQYRLRHRLPNKQQPPDISYKELLKQLTAQQHAILVDLGRTFPTHPYFSVQLGPGQLSLFNLLKAYSLLDKEVGYCQGISFVAGVLLLHMSEEQAFEMLKFLMYDLGFRKQYRPDMMSLQIQMYQLSRLLHDYHRDLYNHLEENEISPSLYAAPWFLTLFASQFSLGFVARVFDIIFLQGTEVIFKVALSLLSSQETLIMECESFENIVEFLKNTLPDMNTSEMEKIITQVFEMDISKQLHAYEVEYHVLQDELQESSYSCEDSETLEKLERANSQLKRQNMDLLEKLQVAHTKIQALESNLENLLTRETKMKSLIRTLEQEKMAYQKTVEQLRKLLPADALANCDLLLRDLNCNPNNKAKIGNKP

SEQ ID NO: 873 - DNA, 1941 bp, Homo sapien
aatgtccccgcgtgtctgctaggagagggcgggcagcgccgcggcgcgcgcgatccggctgacgcatctggccccggttccccaagaccagagcggggccgggagggagggggaagaggcgagagcgcggagggcgcgcgtgcgcattggcgcggggaggagcagggatcttggcagcgggcgaggaggctgcgagcgagccgcgaaccgagcgggcggcgggcgcgcgcaccatgggggagaaacccgggaccagggtcttcaagaagtcgagccctaactgcaagctcaccgtgtacttgggcaagcgggacttcgtagatcacctggacaaagtggaccctgtagatggcgtggtgcttgtggaccctgactacctgaaggaccgcaaagtgtttgtgaccctcacctgcgccttccgctatggccgtgaagacctggatgtgctgggcttgtccttccgcaaagacctgttcatcgccacctaccaggccttccccccggtgcccaacccaccccggccccccacccgcctgcaggaccggctgctgaggaagctgggccagcatgcccaccccttcttcttcaccataccccagaatcttccatgctccgtcacactgcagccaggcccagaggatacaggaaaggcctgcggcgtagactttgagattcgagccttctgtgctaaatcactagaagagaaaagccacaaaaggaactctgtgcggctggtgatccgaaaggtgcagttcgccccggagaaacccggcccccagccttcagccgaaaccacacgccacttcctcatgtctgaccggtccctgcacctcgaggcttccctggacaaggagctgtactaccatggggagcccctcaatgtaaatgtccacgtcaccaacaactccaccaagaccgtcaagaagatcaaagtctctgtgagacagtacgccgacatctgcctcttcagcaccgcccagtacaagtgtcctgtggctcaactcgaacaagatgaccaggtatctcccagctccacattctgtaaggtgtacaccataaccccactgctcagtgacaaccgggagaagcggggtctcgccctggatgggaaactcaagcacgaggacaccaacctggcttccagcaccatcgtgaaggagggtgccaacaaggaggtgctgggaatcctggtgtcctacagggtcaaggtgaagctggtggtgtctcgaggcggggatgtctctgtggagctgccttttgttcttatgcaccccaagccccacgaccacatccccctccccagaccccagtcagccgctccggagacagatgtccctgtggacaccaacctcattgaatttgataccaactatgccacagatgatgacattgtgtttgaggactttgcccggcttcggctgaaggggatgaaggatgacgactatgatgatcaactctgctaggaagcggggtgggaagaagggaggggatggggttgggagaggtgagggcaggattaagatccccactgtcaatgggggattgtcccagcccctcttcccttcccctcacctggaagcttcttcaaccaatcccttcacactctctcccccatccccccaagatacacactggaccctctcttgctgaatgtgggcattaattttttgactgcagttctgcttctccagccccgccgtgggtggcaagctgtgttcatacctaaattttctggaaggggacagtgaaaagaggagtgacaggagggaaagggggagacaaaactcctactctcaacctcacaccaacacctcccattatcactctctctgcccccattccttcaagaggagaccctttggggacaaggccgtttctttgtttctgagcataaagaagaaaataaatcttttactaagcatgaaaaaaaaaaaaaaaaaa

SEQ ID NO: 874 - protein, 409 aa, Homo sapien
MGEKPGTRVFKKSSPNCKLTVYLGKRDFVDHLDKVDPVDGVVLVDPDYLKDRKVFVTLTCAFRYGREDLDVLGLSFRKDLFIATYQAFPPVPNPPRPPTRLQDRLLRKLGQHAHPFFFTIPQNLPCSVTLQPGPEDTGKACGVDFEIRAFCAKSLEEKSHKRNSVRLVIRKVQFAPEKPGPQPSAETTRHFLMSDRSLHLEASLDKELYYHGEPLNVNVHVTNNSTKTVKKIKVSVRQYADICLFSTAQYKCPVAQLEQDDQVSPSSTFCKVYTITPLLSDNREKRGLALDGKLKHEDTNLASSTIVKEGANKEVLGILVSYRVKVKLVVSRGGDVSVELPFVLMHPKPHDHIPLPRPQSAAPETDVPVDTNLIEFDTNYATDDDIVFEDFARLRLKGMKDDDYDDQLC

SEQ ID NO: 875 - DNA, 550 bp, Homo sapien
ggccggggttgactccgggggcgcggcgaggagagacatgaggctgagctggttccgggtcctgacagtactgtccatctgcctgagcgccgtggccagcacggggaccgagggcaaaaggaagctgcagatcggggtcaagaagcgggtggaccactgtcccatcaaatcgcgcaaaggggatgtcctgcacatgcactacacggggaagctggaagatgggacagagtttgacagcagcctgccccagaaccagccctttgtcttctcccttggcacaggccaggtcatcaagggctgggaccaggggctgctggggatgtatgagggggaaaagcgcaagctggtgatcccatccgagctagggtatggagagcggggagctcccccaaagattccaggcggtgcaaccctggtgttcgaggtggagctgctcaaaatagagcgacgaactgagctgtaaccagactgggaggggcaggggagaggcccccatcaggaccagactgttccaaaaaaaaaaaaacaaaaaacaaacaaaaaaacactt

SEQ ID NO: 876 - protein, 141 aa, Homo sapien
MRLSWFRVLTVLSICLSAVASTGTEGKRKLQIGVKKRVDHCPIKSRKGDVLHMHYTGKLEDGTEFDSSLPQNQPFVFSLGTGQVIKGWDQGLLGMYEGEKRKLVIPSELGYGERGAPPKIPGGATLVFEVELLKIERRTEL

SEQ ID NO: 877 - DNA, 3874 bp, Homo sapien
atggctcacctaaagcgactagtaaaattacacattaaaagacattaccataaaaagttctggaagcttggtgcagtaatttttttctttataatagttttggttttaatgcaaagagaagtaagtgttcaatattccaaagaggaatcaaggatggaaaggaacatgaaaaacaaaaacaagatgttggatttaatgctagaagctgtaaacaatattaaggatgccatgccaaaaatgcaaataggagcacctgtcaggcaaaacattgatgctggtgagagaccttgtttgcaaggatattatacagcagcagaattgaagcctgtccttgaccgtccacctcaggattcaaatgcacctggtgcttctggtaaagcattcaagacaaccaatttaagtgttgaagagcaaaaggaaaaggaacgtggggaagctaaacactgctttaatgctttcgcaagtgacaggatttctttgcaccgagatcttggaccagacactcgacctcctgaatgtattgaacaaaaatttaagcgctgccctcccctgcccaccaccagtgtcataatagtttttcataatgaagcgtggtccacgttgcttagaactgtccacagtgtgctctattcttcacctgcaatactgctgaaggaaatcattttggtggatgatgctagtgtagatgagtacttacatgataaactagatgaatatgtaaaacaattttctatagtaaaaatagtcagacaaagagaaagaaaaggtctgatcactgctcggttgctaggagcaacagtcgcaacagctgaaacgctcacatttttagatgctcactgtgagtgtttctatggttggctagaacctctgttggccagaatagctgagaactacacggctgtcgtaagtccagatattgcatccatagatctgaacacgtttgaattcaacaaaccttctccttatggaagtaaccataaccgtggaaattttgactggagtctttcatttggctgggagtcgcttcctgatcatgagaagcaaagaaggaaagatgaaacctacccaattaaaacacccacttttgcaggaggacttttttccatatcaaaagaatattttgagtatattggaagctatgatgaagaaatggaaatctggggaggtgaaaatatagaaatgtctttcagagtatggcaatgtggtgggcagttggagattatgccttgctctgttgttggacatgtttttcgcagcaaaagccctcatagctttccaaaaggcactcaggtgattgctagaaaccaagttcgccttgcagaagtctggatggatgaatacaaggaaatattttataggagaaatacagatgcagcaaaaattgttaaacaaaaagcatttggtgatctttcaaaaagatttgaaataaaacaccgtcttcggtgtaaaaattttacatggtatctgaacaacatttatccagaggtgtatgtgccagaccttaatcctgttatatctggatacattaaaagcgttggtcagcctctatgtctggatgttggagaaaacaatcaaggaggcaaaccattaattatgtatacatgtcatggacttgggggaaaccagtactttgaatactctgctcaacatgaaattcggcacaacatccagaaggaattatgtcttcatgctgctcaaggtctcgttcagctgaaggcatgtacctacaaaggtcacaagacagttgtcactggagagcagatatgggagatccagaaggatcaacttctatacaatccattcttaaaaatgtgcctttcagcaaatggagagcatccaagtttagtgtcatgcaacccatcagatccactccaaaaatggatacttagccaaaatgattaagtgttccttaaaattaagttgaaaaaggaaatattctttctcataaaactgtgactaggcatacactgtagtttttgaaaattatgcaaaagcagctaaatgtaacttattccaagtgcatttttcttatttatatctttatgtagcactactacagaaattctgcaagtttctgtttcaaagcacaataactagtaataccaaagactatttcaaaatgtccagatgtaggggaagagatgtttacagtatgatgaaaataattttccaagtaaagtgatgtttgtgtgttttgtacacttagggatatatatatatagctacattcacacactcacaatttaaaatatttcccctagttttttggggggataggaagaaagatttgttactgtatttttttaactacataaaaatagatcaataaatgtcagcattggcctctgtgtacaaaccaagagcttttacagatccagaatttattagtttaaaatgcaggtgaacttttttttgcgtttggtttacttgtctgtcaaatgtttccttaaacatgaaactgaataaggagaagagtatttttaacacttaaatttcttggcaaattttaaaacattttttagtctgtaatacactccacttgaagcacttaagtcttccttaaatgacttttcttaagtaatgatactgtgtgttttcccaaagcacttttaaaaaaatttttataaattactatctgttgaaaaggtgtccttttcctttcttctagtattttttttcttaccaaaattcactaatcttgaatgtttgtgatattaaatttcaaatgcagaatacttgactcatttaaagctaaattttgttactgattcaattataattgtaatggatttttgactttgtaatggattcttttcatcaaaaagccttattattttttatctatgtggaaaacacaataaaaaatcctcaacactattgtaatcatttggttaagtgcttattcctcttttgggtaaaatctgtaattgataataggtgggggaaaatgaattttgtatgctgaatttctaagcgcctattgtttgtaaaaccatcagatatttcttatggcacaaaaaatgaggaatagcaaaattcctgtgttcaatatttagaaaattttgtattaatttctgataaagttccttaagcatctgatagaatgatgttttaaaaaaatttgacgcttgcttaggagatttaccactttttttttttgtttttcgtcattttatatttagatctcctgtattcttgttcccgaagtaaaatacgatcggtttcatattttaaatctggcagagcctcagctgtacgaaaaagagcatatactggttattgaccctatcttctcattgtttgtttgtaagtttgaatttgtattaaaaagcctgcattctgagctggacatggtggctcagcttctaatcccagcactttggtaggcaaaggtgggaggatcatttgagctcaggagttccagaccagcctgggcaacatagcaaaatctcatctctacaaaaagtaaaaattaaaaaatgaaattaaaaataaaattacctaggtgtggtggcacgcatctgtagttccagctatacaggaaggtgaggcagaagcattgcttgagcttgggagatcgaggctacagtgagctatgattacaccactgcacttcagtctgtgtgactgagcaagactctttcaaaaaaaaaaaaaagcctacattctccagttgattatttccaactaatgtgtattatgtgcctaattttctatcagaagttgtattaagcccgttttcacactgctgttaaagacatacctgagactgggtaatttataaagaaaaataggttcaatggacccacaggtccgcgtggctggggaagcttcacaatcatggcggaaggtgaaagcatgtcttacgtggaag

SEQ ID NO: 878 - protein, 633 aa, Homo sapien
MAHLKRLVKLHIKRHYHKKFWKLGAVIFFFIIVLVLMQREVSVQYSKEESRMERNMKNKNKMLDLMLEAVNNIKDAMPKMQIGAPVRQNIDAGERPCLQGYYTAAELKPVLDRPPQDSNAPGASGKAFKTTNLSVEEQKEKERGEAKHCFNAFASDRISLHRDLGPDTRPPECIEQKFKRCPPLPTTSVIIVFHNEAWSTLLRTVHSVLYSSPAILLKEIILVDDASVDEYLHDKLDEYVKQFSIVKIVRQRERKGLITARLLGATVATAETLTFLDAHCECFYGWLEPLLARIAENYTAVVSPDIASIDLNTFEFNKPSPYGSNHNRGNFDWSLSFGWESLPDHEKQRRKDETYPIKTPTFAGGLFSISKEYFEYIGSYDEEMEIWGGENIEMSFRVWQCGGQLEIMPCSVVGHVFRSKSPHSFPKGTQVIARNQVRLAEVWMDEYKEIFYRRNTDAAKIVKQKAFGDLSKRFEIKHRLRCKNFTWYLNNIYPEVYVPDLNPVISGYIKSVGQPLCLDVGENNQGGKPLIMYTCHGLGGNQYFEYSAQHEIRHNIQKELCLHAAQGLVQLKACTYKGHKTVVTGEQIWEIQKDQLLYNPFLKMCLSANGEHPSLVSCNPSDPLQKWILSQND

SEQ ID NO: 879 - DNA, 1820 bp, Homo sapien
gagctccaagctggtttgaacaagccctgggcatgtttggcgggaagttggcttagctcggctacctgtggccccgcagttttgtagtccccgccttgtttctccccagaggcctctcaatcctccctccatgatcttcgcatagagcacagtaccccttcacacggaggacgcgatggctcccaagaaacgcccagaaacccagaagacctccgagattgtattacgccccaggaacaagaggagcaggagtcccctggagctggagcccgaggccaagaagctctgtgcgaagggctccggtcctagcagaagatgtgactcagactgcctctgggtggggctggctggcccacagatcctgccaccatgccgcagcatcgtcaggaccctccaccagcataagctgggcagagcttcctggccatctgtccagcaggggctccagcagtcctttttgcacactctggattcttaccggatattacaaaaggctgccccctttgacaggagggctacatccttggcgtggcacccaactcaccccagcaccgtggctgtgggttccaaagggggagatatcatgctctggaattttggcatcaaggacaaacccaccttcatcaaagggattggagctggagggagcatcactgggctgaagtttaaccctctcaataccaaccagttttacgcctcctcaatggagggaacaactaggctgcaagactttaaaggcaacattctacgagtttttgccagctcagacaccatcaacatctggttttgtagcctggatgtgtctgctagtagccgaatggtggtcacaggagacaacgtggggaacgtgatcctgctgaacatggacggcaaagagctttggaatctcagaatgcacaaaaagaaagtgacgcatgtggccctgaacccatgctgtgattggttcctggccacagcctccgtagatcaaacagtgaaaatttgggacctgcgccaggttagagggaaagccagcttcctctactcgctgccgcacaggcatcctgtcaacgcagcttgtttcagtcccgatggagcccggctcctgaccacggaccagaagagcgagatccgagtttactctgcttcccagtgggactgccccctgggcctgatcccgcaccctcaccgtcacttccagcacctcacacccatcaaggcagcctggcatcctcgctacaacctcattgttgtgggccgatacccagatcctaatttcaaaagttgtaccccttatgaattgaggacgatcgacgtgttcgatggaaactcagggaagatgatgtgtcagctctatgacccagaatcttctggcatcagttcgcttaatgaattcaatcccatgggggacacgctggcctctgcaatgggttaccacattctcatctggagccaggaggaagccaggacacggaagtgagagacactaaagaaggtgtgggccagacaaggccttggagcccacacatgggatcaagtcctgcaagcagaggtggtgatttgttaaagggccaaaagtatccaaggttagggttggagcaggggtgctgggacctggggcactgtgggactgggacacttttatgttaatgctctggacttgcctccagagactgctccagagttggtgacacagctgtcccaagggcccctctgtatctagcctggaaccaaggttatcttggaactaaatgacttttctcctctcagtgggtggtagcagagggatcaagcagttatttgatttgtgctcttttgatatggccaataaaaccataccg

SEQ ID NO: 880 - protein, 427 aa, Homo sapien
MAPKKRPETQKTSEIVLRPRNKRSRSPLELEPEAKKLCAKGSGPSRRCDSDCLWVGLAGPQILPPCRSIVRTLHQHKLGRASWPSVQQGLQQSFLHTLDSYRILQKAAPFDRRATSLAWHPTHPSTVAVGSKGGDIMLWNFGIKDKPTFIKGIGAGGSITGLKFNPLNTNQFYASSMEGTTRLQDFKGNILRVFASSDTINIWFCSLDVSASSRMVVTGDNVGNVILLNMDGKELWNLRMHKKKVTHVALNPCCDWFLATASVDQTVKIWDLRQVRGKASFLYSLPHRHPVNAACFSPDGARLLTTDQKSEIRVYSASQWDCPLGLIPHPHRHFQHLTPIKAAWHPRYNLIVVGRYPDPNFKSCTPYELRTIDVFDGNSGKMMCQLYDPESSGISSLNEFNPMGDTLASAMGYHILIWSQEEARTRK

SEQ ID NO: 881 - DNA, 3181 bp, Homo sapien
actcagtgttcgcgggagcgccgcacctacaccagccaacccagatcccgaggtccgacagcgcccggcccagatccccacgcctgccaggagcaagccgagagccagccggccggcgcactccgactccgagcagtctctgtccttcgacccgagccccgcgccctttccgggacccctgccccgcgggcagcgctgccaacctgccggccatggagaccccgtcccagcggcgcgccacccgcagcggggcgcaggccagctccactccgctgtcgcccacccgcatcacccggctgcaggagaaggaggacctgcaggagctcaatgatcgcttggcggtctacatcgaccgtgtgcgctcgctggaaacggagaacgcagggctgcgccttcgcatcaccgagtctgaagaggtggtcagccgcgaggtgtccggcatcaaggccgcctacgaggccgagctcggggatgcccgcaagacccttgactcagtagccaaggagcgcgcccgcctgcagctggagctgagcaaagtgcgtgaggagtttaaggagctgaaagcgcgcaataccaagaaggagggtgacctgatagctgctcaggctcggctgaaggacctggaggctctgctgaactccaaggaggccgcactgagcactgctctcagtgagaagcgcacgctggagggcgagctgcatgatctgcggggccaggtggccaagcttgaggcagccctaggtgaggccaagaagcaacttcaggatgagatgctgcggcgggtggatgctgagaacaggctgcagaccatgaaggaggaactggacttccagaagaacatctacagtgaggagctgcgtgagaccaagcgccgtcatgagacccgactggtggagattgacaatgggaagcagcgtgagtttgagagccggctggcggatgcgctgcaggaactgcgggcccagcatgaggaccaggtggagcagtataagaaggagctggagaagacttattctgccaagctggacaatgccaggcagtctgctgagaggaacagcaacctggtgggggctgcccacgaggagctgcagcagtcgcgcatccgcatcgacagcctctctgcccagctcagccagctccagaagcagctggcagccaaggaggcgaagcttcgagacctggaggactcactggcccgtgagcgggacaccagccggcggctgctggcggaaaaggagcgggagatggccgagatgcgggcaaggatgcagcagcagctggacgagtaccaggagcttctggacatcaagctggccctggacatggagatccacgcctaccgcaagctcttggagggcgaggaggagaggctacgcctgtcccccagccctacctcgcagcgcagccgtggccgtgcttcctctcactcatcccagacacagggtgggggcagcgtcaccaaaaagcgcaaactggagtccactgagagccgcagcagcttctcacagcacgcacgcactagcgggcgcgtggccgtggaggaggtggatgaggagggcaagtttgtccggctgcgcaacaagtccaatgaggaccagtccatgggcaattggcagatcaagcgccagaatggagatgatcccttgctgacttaccggttcccaccaaagttcaccctgaaggctgggcaggtggtgacgatctgggctgcaggagctggggccacccacagcccccctaccgacctggtgtggaaggcacagaacacctggggctgcgggaacagcctgcgtacggctctcatcaactccactggggaagaagtggccatgcgcaagctggtgcgctcagtgactgtggttgaggacgacgaggatgaggatggagatgacctgctccatcaccaccacggctcccactgcagcagctcgggggaccccgctgagtacaacctgcgctcgcgcaccgtgctgtgcgggacctgcgggcagcctgccgacaaggcatctgccagcggctcaggagcccaggtgggcggacccatctcctctggctcttctgcctccagtgtcacggtcactcgcagctaccgcagtgtggggggcagtgggggtggcagcttcggggacaatctggtcacccgctcctacctcctgggcaactccagcccccgaacccagagcccccagaactgcagcatcatgtaatctgggacctgccaggcaggggtgggggtggaggcttcctgcgtcctcctcacctcatgcccaccccctgccctgcacgtcatgggagggggcttgaagccaaagaaaaataaccctttggtttttttcttctgtatttttttttctaagagaagttattttctacagtggttttatactgaaggaaaaacacaagcaaaaaaaaaaaaaagcatctatctcatctatctcaatcctaatttctcctcccttccttttccctgcttccaggaaactccacatctgccttaaaaccaaagagggcttcctctagaagccaagggaaaggggtgcttttatagaggctagcttctgcttttctgccctggctgctgcccccaccccggggaccctgtgacatggtgcctgagaggcaggcatagaggcttctccgccagcctcctctggacggcaggctcactgccaggccagcctccgagagggagagagagagagagaggacagcttgagccgggcccctgggcttggcctgctgtgattccactacacctggctgaggttcctctgcctgccccgcccccagtccccacccctgcccccagccccggggtgagtccattctcccaggtaccagctgcgcttgcttttctgtattttatttagacaagagatgggaatgaggtgggaggtggaagaagggagaagaaaggtgagtttgagctgccttccctagctttagaccctgggtgggctctgtgcagtcactggaggttgaagccaagtggggtgctgggaggagggagagggaggtcactggaaaggggagagcctgctggcacccaccgtggaggaggaaggcaagagggggtggaggggtgtggcagtggttttggcaaacgctaaagagcccttgcctccccatttcccatctgcaccccttctctcctccccaaatcaatacactagttgtttct

SEQ ID NO: 882 - protein, 664 aa, Homo sapien
METPSQRRATRSGAQASSTPLSPTRITRLQEKEDLQELNDRLAVYIDRVRSLETENAGLRLRITESEEVVSREVSGIKAAYEAELGDARKTLDSVAKERARLQLELSKVREEFKELKARNTKKEGDLIAAQARLKDLEALLNSKEAALSTALSEKRTLEGELHDLRGQVAKLEAALGEAKKQLQDEMLRRVDAENRLQTMKEELDFQKNIYSEELRETKRRHETRLVEIDNGKQREFESRLADALQELRAQHEDQVEQYKKELEKTYSAKLDNARQSAERNSNLVGAAHEELQQSRIRIDSLSAQLSQLQKQLAAKEAKLRDLEDSLARERDTSRRLLAEKEREMAEMRARMQQQLDEYQELLDIKLALDMEIHAYRKLLEGEEERLRLSPSPTSQRSRGRASSHSSQTQGGGSVTKKRKLESTESRSSFSQHARTSGRVAVEEVDEEGKFVRLRNKSNEDQSMGNWQIKRQNGDDPLLTYRFPPKFTLKAGQVVTIWAAGAGATHSPPTDLVWKAQNTWGCGNSLRTALINSTGEEVAMRKLVRSVTVVEDDEDEDGDDLLHHHHGSHCSSSGDPAEYNLRSRTVLCGTCGQPADKASASGSGAQVGGPISSGSSASSVTVTRSYRSVGGSGGGSFGDNLVTRSYLLGNSSPRTQSPQNCSIM

SEQ ID NO: 883 - DNA, 3198 bp, Homo sapien
ttgggaggagcagtctctccgctcgtctcccggagctttctccattgtctctgcctttacaacagagggagacgatggactgagctgatccgcaccatggagtctcgggtcttactgagaacattctgtttgatcttcggtctcggagcagtttgggggcttggtgtggacccttccctacagattgacgtcttaacagagttagaacttggggagtccacgaccggagtgcgtcaggtcccggggctgcataatgggacgaaagcctttctctttcaagatactcccagaagcataaaagcatccactgctacagctgaacagttttttcagaagctgagaaataaacatgaatttactattttggtgaccctaaaacagacccacttaaattcaggagttattctctcaattcaccacttggatcacaggtacctggaactggaaagtagtggccatcggaatgaagtcagactgcattaccgctcaggcagtcaccgccctcacacagaagtgtttccttacattttggctgatgacaagtggcacaagctctccttagccatcagtgcttcccatttgattttacacattgactgcaataaaatttatgaaagggtagtagaaaagccctccacagacttgcctctaggcacaacattttggctaggacagagaaataatgcgcatggatattttaagggtataatgcaagatgtccaattacttgtcatgccccagggatttattgctcagtgcccagatcttaatcgcacctgtccaacttgcaatgacttccatggacttgtgcagaaaatcatggagctacaggatattttagccaaaacatcagccaagctgtctcgagctgaacagcgaatgaatagattggatcagtgctattgtgaaaggacttgcaccatgaagggaaccacctaccgagaatttgagtcctggatagacggctgtaagaactgcacatgcctgaatggaaccatccagtgtgaaactctaatctgcccaaatcctgactgcccacttaagtcggctcttgcgtatgtggatggcaaatgctgtaaggaatgcaaatcgatatgccaatttcaaggacgaacctactttgaaggagaaagaaatacagtctattcctcttctggagtatgtgttctctatgagtgcaaggaccagaccatgaaacttgttgagagttcaggctgtccagctttggattgtccagagtctcatcagataaccttgtctcacagctgttgcaaagtttgtaaaggttatgacttttgttctgaaaggcataactgcatggagaattccatctgcagaaatctgaatgacagggctgtttgtagctgtcgagatggttttagggctcttcgagaggataatgcctactgtgaagacatcgatgagtgtgctgaagggcgccattactgtcgtgaaaatacaatgtgtgtcaacaccccgggttcttttatgtgcatctgcaaaactggatacatcagaattgatgattattcatgtacagaacatgatgagtgtatcacaaatcagcacaactgtgatgaaaatgctttatgcttcaacactgttggaggacacaactgtgtttgcaagccgggctatacagggaatggaacgacatgcaaagcattttgcaaagatggctgtaggaatggaggagcctgtattgccgctaatgtgtgtgcctgcccacaaggcttcactggacccagctgtgaaacggacattgatgaatgctctgatggttttgttcaatgtgacagtcgtgctaattgcattaacctgcctggatggtaccactgtgagtgcagagatggctaccatgacaatgggatgttttcaccaagtggagaatcgtgtgaagatattgatgagtgtgggaccgggaggcacagctgtgccaatgataccatttgcttcaatttggatggcggatatgattgtcgatgtcctcatggaaagaattgcacaggggactgcatccatgatggaaaagttaagcacaatggtcagatttgggtgttggaaaatgacaggtgctctgtgtgctcatgtcagaatggattcgttatgtgtcgacggatggtctgtgactgtgagaatcccacagttgatcttttttgctgccctgaatgtgacccaaggcttagtagtcagtgcctccatcaaaatggggaaactttgtataacagtggtgacacctgggtccagaattgtcaacagtgccgctgcttgcaaggggaagttgattgttggcccctgccttgcccagatgtggagtgtgaattcagcattctcccagagaatgagtgctgcccgcgctgtgtcacagacccttgccaggctgacaccatccgcaatgacatcaccaagacttgcctggacgaaatgaatgtggttcgcttcaccgggtcctcttggatcaaacatggcactgagtgtactctctgccagtgcaagaatggccacatctgttgctcagtggatccacagtgccttcaggaactgtgaagttaactgtctcatgggagatttctgttaaaagaatgttctttcattaaaagaccaaaaagaagttaaaacttaaattgggtgatttgtgggcagctaaatgcagctttgttaatagctgagtgaactttcaattatgaaatttgtggagcttgacaaaatcacaaaaggaaaattactggggcaaaattagacctcaagtctgcctctactgtgtctcacatcaccatgtagaagaatgggcgtacagtatataccgtgacatcctgaaccctggatagaaagcctgagcccattggatctgtgaaagcctctagcttcactggtgcagaaaattttcctctagatcagaatcttcagaatcagttaggttcctcactgcaagaaataaaatgtcaggcagtgaatgaattatattttcagaagtaaagcaaagaagctataacatgttatgtacagtacactctgaaaagaaatctgaaacaagttattgtaatgataaaaataatgcacaggcatggttacttaatattttctaacaggaaaagtcatccctatttccttgttttactgcacttaatattatttggttgaatttgttcagtataagctcgttcttgtgcaaaattaaataaatatttctcttacctt

SEQ ID NO: 884 - protein, 816 aa, Homo sapien
MESRVLLRTFCLIFGLGAVWGLGVDPSLQIDVLTELELGESTTGVRQVPGLHNGTKAFLFQDTPRSIKASTATAEQFFQKLRNKHEFTILVTLKQTHLNSGVILSIHHLDHRYLELESSGHRNEVRLHYRSGSHRPHTEVFPYILADDKWHKLSLAISASHLILHIDCNKIYERVVEKPSTDLPLGTTFWLGQRNNAHGYFKGIMQDVQLLVMPQGFIAQCPDLNRTCPTCNDFHGLVQKIMELQDILAKTSAKLSRAEQRMNRLDQCYCERTCTMKGTTYREFESWIDGCKNCTCLNGTIQCETLICPNPDCPLKSALAYVDGKCCKECKSICQFQGRTYFEGERNTVYSSSGVCVLYECKDQTMKLVESSGCPALDCPESHQITLSHSCCKVCKGYDFCSERHNCMENSICRNLNDRAVCSCRDGFRALREDNAYCEDIDECAEGRHYCRENTMCVNTPGSFMCICKTGYIRIDDYSCTEHDECITNQHNCDENALCFNTVGGHNCVCKPGYTGNGTTCKAFCKDGCRNGGACIAANVCACPQGFTGPSCETDIDECSDGFVQCDSRANCINLPGWYHCECRDGYHDNGMFSPSGESCEDIDECGTGRHSCANDTICFNLDGGYDCRCPHGKNCTGDCIHDGKVKHNGQIWVLENDRCSVCSCQNGFVMCRRMVCDCENPTVDLFCCPECDPRLSSQCLHQNGETLYNSGDTWVQNCQQCRCLQGEVDCWPLPCPDVECEFSILPENECCPRCVTDPCQADTIRNDITKTCLDEMNVVRFTGSSWIKHGTECTLCQCKNGHICCSVDPQCLQEL

SEQ ID NO: 885 - DNA, 4695 bp, Homo sapien
gggggagggaaacggagcagtaacaagtatcccagagggtgctgctgaggcgacgatggccgaggggcccgaggaagcccgaggccaccctcccgggcaggacgatggcgggggggaccacgagcccgtcccttccctgagaggccctcctaccaccgccgtcccatgcccccgcgacgacccccaggccgaaccccaggccccgggccggcccacagccccgggcctcgcggctgccgccgcagccgacaaattggagccgccgcgcgagctcaggaagcgcggggaggcggcctccggctccggtgcagagctgcaggagcaggcgggctgcgaggcgcccgaagccgcggcgccacgagagagaccagctcggctgagcgcccgcgagtactcccggcaagtgcacgagtggctgtggcagtcctactgcggctacctcacctggcacagcggcctggccgccttcccagcctactgcagcccccagccctccccgcaaagcttcccttcgggcggcgctgcagtcccccaggccgcggcgccgccgcccccgcagctgggctattacaaccccttctacttcctgagccccggggccgcggggcctgacccgcggacagctgccggcatcagcacccctgctccagtcgcgggcctgggaccccgggctcctcacgtgcaggcgtcggtccgggccactccagtgacgagggtaggatccgcagccccttcgcgaagcccgagcgagaccgggcgacaggcaggcagagaatatgttattccatccttggcccacagatttatggcagagatggtggatttctttattctcttctttataaaagcaaccattgtcttaagcattatgcacctcagtgggataaaggatatctctaagtttgctatgcattatataatagaagaaatagatgaagacacatcaatggaagacttgcagaaaatgatggttgtggcacttatatacagattattagtttgtttctatgagataatttgcatttggggagcaggtggagctaccccagggaagttcctgctggggcttcgagttgtgacatgtgatacatcagtgcttattgcaccaagtcgggttttagtgattccttcctcaaatgttagcattacaacgtccactatccgagctttgatcaagaatttttcaattgcttcttttttccctgctttcatcacactgctgttttttcagcataatcgaacagcttatgacattgtagcaggaaccattgtggtaaaaagaaatggggtcagatgatgccccccaaaaccctgatttccacacactaagactaaattatgtatcaaggccatcagtatccctgggttacactaattgatgatttagaaattaaagcagtcactccagtgtgatgcaggtgactactctgaaagtattgattatacttgaatgccaaagaacttgtccagaagaaaaacctgttaaattcaagtattaaaatttttagatcaaaaaggcaaatgattttataaacaatggacaatatatactttcttaagatctaaggtactttcttaagatctaagaatttgctgaaagcattttcagctttgaaatctccaaatgaaactttaaaatttattttggtttatcccaaaataatggaaaatgtccagttgtgttttgtaaacacctatgtaactcatcttttagtttacacttcctggggaaattgtctttggtgtttagaggagggaatgagaacacaaattggataatccactgtctcccatcccaggaggtggtgagttggctacaagagaaagggacaagtgaggcaggcctagcagttcccttacctgaagttttcaaatccatactgcagttccctctcgtaatgatgtaactttacaactattcttaatgcttgaacatgtatttaggggcaagtttctcatgatgatgaaaaagtatcaagtcatattgctatgttaattggtttttttttttaaaaggtaagttagtgattactgttaatggtgggggagtaagttttcactgtaaattgaacttataatttatgtgcaagtgttttcagtgccctgaatcaaactataaatgtggggagaaatcacctccatcaaacagttgcatatttactgtaaaagtattcccagtatgtgtgcagcatgaagaaagtattagtgcttctcagtgttctcagtgtaaattctatttatatacagcatattcacatactactttccttatattttatatagttctatgactgttgaaacatcaaggagttaaaaaaatcttaatatttcatgattaactctaagtactattaatagcttgcgaaatattagcaattttcccattatggactatctctctaaagcaagagagactagcattcccagacatcattctagggtctttaagctcattttgggtctgctaaagtttggggggaaatgttacgcaaagtgatactgtgtatgttgccattttgctttattcttctgttgaagcaaaattgtggggttttattatgtgtgtgtgcttttcctagatgtcccagttagctgtgctgagatatacctgtactatttatggtttaagttttgattcttaggtattttctccagctctgacattgttttccaaagacacactaaactgcattgcacagttcaaaatttgattacttaagggatcaatctaggtggtgttcttggtcttaaatttaacagcaaacacagcacatatctattatcactatattaattttcaaaggtttttctgtgacgtttaaaactgtgacaacagatattcacatttgattatagaaacttaatgtctattaataattttagtacaaaatttcataaaccgtgtttttcaaaataagtttatgtcaaatccagcttcccagaaacactaataattaagtacatcaatgtactaaataaatcattcagttgcacccatggggaagattgtgttactgcccttcacagtgaaaaaaagaaaaatctttcatttttaaaattaggagatgttacgtaacttggcactttagtagtgtatacactagcattagtttatacaccacttttgccgctggggattcaagttgaaatgtccctcaatcatataggtctggaatacatctttcattcataatttctgctcagataattgaatagtttgccatcgagattattttcatttatactataaaacaaaagcaaactagtccagtttaattttttgtacttagaatattgcacattttctatatatgagttattcagattagtatctatgtaggttcagtcagatccaaccatggattcgaggtattatactgtataaccctacaaaatacatagaagtattatttgccttcataatagaacccaagagtctgtttcaatttatgaattcagtatttgcaccgagattttgattcccaaagtttggaaaaaaatgacaaaacaacgagggaagaaggaaccagaccttagtgccacatatttttctcttggggttgtaaggtagtctcctgctttccagaacactttattatatttcacttatagacctgattttctgtgtcaaagtataattctcatgctgaagctgtagcctaaaaagccaaaagaaagttgtcttcattgtacaaacatattcatcactttaacaataagggaacaaaatttagtattcaagctgagtgagaatactggttcaatggacatgtccctaagataaaccagaattggcagttaatttaggcgtctagaaaatctcagttcccaccagtaaaattatcctgagtagctaatgcaccttgagaaaaatctggcatactgaataagtaacattaacttgggagccaagagctgggtaagccttacctttagactactctgtgactacagaaataaagccagcacttttggaactaataagccttcacttgtcagtatcataaagagtattgcccaactgaactttgctcccactggtttaatagttacttatttctgcctaagcactcaccttccgattttacccaagtatatatataggatagaaaaaaatgcattatatttgagagctcacttcgcccgaattacaaaatgagtgtttttagattcaagtgacggtaaaaggatttgttcccttcagtgacttgagtgttttagttatgcataagtatttctagcaaaggaagggtagaaaggaattgaaaattaatttacactagttgctacttgggaataaagggctttttgaggggggtatggatattaaatgttttcgttatatacttatccctattaaaacaggcagttgtttctttgaatatgcctaaataacagtattcttaaaatctgacagacaagtaacatgtcaattacttgatattccttgtctccagtaccacaggccactcttgacatcccatgtttgcctggataaagttcctcatttcaaacagtatacatacttctttgcagttcattatagtaaggcttaacctgtaaacagtatctgatggcccacctataaataaaattcagcattctatttttaataatttgtatgccaccaatttgtattatttgtctcaataaatacttagtcatcgatgcaaaaaaaaaaaaaaaaaaaaaaaa

SEQ ID NO: 886 - protein, 413 aa, Homo sapien
MAEGPEEARGHPPGQDDGGGDHEPVPSLRGPPTTAVPCPRDDPQAEPQAPGRPTAPGLAAAAAADKLEPPRELRKRGEAASGSGAELQEQAGCEAPEAAAPRERPARLSAREYSRQVHEWLWQSYCGYLTWHSGLAAFPAYCSPQPSPQSFPSGGAAVPQAAAPPPPQLGYYNPFYFLSPGAAGPDPRTAAGISTPAPVAGLGPRAPHVQASVRATPVTRVGSAAPSRSPSETGRQAGREYVIPSLAHRFMAEMVDFFILFFIKATIVLSIMHLSGIKDISKFAMHYIIEEIDEDTSMEDLQKMMVVALIYRLLVCFYEIICIWGAGGATPGKFLLGLRVVTCDTSVLIAPSRVLVIPSSNVSITTSTIRALIKNFSIASFFPAFITLLFFQHNRTAYDIVAGTIVVKRNGVR

SEQ ID NO: 887 - DNA, 1060 bp, Homo sapien
cgcgggccgactggtgtttatccgtcactcgccgaggttccttgggtcatggtgccagcctgactgagaagaggacgctcccgggagacgaatgaggaaccacctcctcctactgttcaagtacaggggcctggtccgcaaagggaagaaaagcaaaagacgaaaatggctaaattcgtgatccgcccagccactgccgccgactgcagtgacatactgcggctgatcaaggagctggctaaatatgaatacatggaagaacaagtaatcttaactgaaaaagatctgctagaagatggttttggagagcaccccttttaccactgcctggttgcagaagtgccgaaagagcactggactccggaaggacacagcattgttggttttgccatgtactattttacctatgacccgtggattggcaagttattgtatcttgaggacttcttcgtgatgagtgattatagaggctttggcataggatcagaaattctgaagaatctaagccaggttgcaatgaggtgtcgctgcagcagcatgcacttcttggtagcagaatggaatgaaccatccatcaacttctataaaagaagaggtgcttctgatctgtccagtgaagagggttggagactgttcaagatcgacaaggagtacttgctaaaaatggcaacagaggagtgaggagtgctgctgtagatgacaacctccattctattttagaataaattcccaacttctcttgctttctatgctgtttgtagtgaaataatagaatgagcacccattccaaagctttattaccagtggcgttgttgcatgtttgaaatgaggtctgtttaaagtggcaatctcagatgcagtttggagagtcagatctttctccttgaatatctttcgataaacaacaaggtggtgtgatcttaatatatttgaaaaaaacttcattctcgtgagtcatttaaatgtgtacaatgtacacactggtacttagagtttctgtttgattcttttttaataaactactctttgatttaaaaaaaaaaaaaaaaaaaaaaaaaaa

SEQ ID NO: 888 - protein, 171 aa, Homo sapien
MAKFVIRPATAADCSDILRLIKELAKYEYMEEQVILTEKDLLEDGFGEHPFYHCLVAEVPKEHWTPEGHSIVGFAMYYFTYDPWIGKLLYLEDFFVMSDYRGFGIGSEILKNLSQVAMRCRCSSMHFLVAEWNEPSINFYKRRGASDLSSEEGWRLFKIDKEYLLKMATEE

SEQ ID NO: 889 - DNA, 2745 bp, Homo sapien
ggcccagctgctgagaggagttgcctgagagtgacctttgcatctgcctgtccagccagcatggaaccaaagcggatcagagagggctaccttgtgaagaaggggagcgtgttcaatacgtggaaacccatgtgggttgtattgttagaagatggaattgaattctataagaagaaaagtgacaacagccccaaaggaatgatcccgctgaaagggagcactctgactagcccttgtcaagactttggcaaaaggatgtttgtgtttaagatcactacgaccaaacagcaggaccacttcttccaggcagccttcctggaggagagagatgcctgggttcgggatatcaataaggccattaaatgcattgaaggaggccagaaatttgccaggaaatctaccaggaggtccattcgactgccagaaaccattgacttaggtgccttatatttgtccatgaaagacactgaaaaaggaataaaagaactgaatctagagaaggacaagaagatttttaatcactgcttcacaggtaactgcgtcattgattggctggtatccaaccagtctgttaggaatcgccaggaaggcctcatgattgcttcatcgctgctcaatgaggggtatctgcagcctgctggagacatgtccaagagtgcagtggatggaactgctgaaaaccctttcctggacaaccctgatgccttctactactttccagacagtgggttcttctgtgaagagaattccagtgatgatgatgtgattctgaaagaagaattcagaggggtcattatcaagcagggatgtttactgaagcaggggcatagaaggaaaaactggaaagtgaggaagttcatcttgagagaagaccctgcctacctgcactactatgaccctgctggggcagaagatcccctgggagcaattcacttgagaggctgtgtggtgacttcagtggagagcaactcaaatggcaggaagagtgaggaagagaacctttttgagatcatcacagcagatgaagtgcactatttcttgcaagcagccacccccaaggagcgcacagagtggatcaaagccatccagatggcctcccgaactgggaagtaaagagactcctgcattcctcctcccctcctgagggaagcccatggacaagctcagtccaggacctgtccacttctgtgacaaatcaacgggaaacagcccaggggtgggaagttttcatttgcaggggggtctgaatgtaactcaccatgtggtgtgcaaggttcccctgcattgtattgctcactgcagcccctctgcccctatccatgacccccaagcagatataacaagctgtgcagcctcagtaggctgcttgccctctccagcctcagggcctcttctggaaaatgaagaaattcaactagtagattcctgaggtccccctagcttaaaaaaaaaaaaatctgccccatgattctaacactcgcagtagtgatagtgtatctagttgttctgctggtgtccttccttggctaagtcttggccttcagttatcttcaaatgtaccagaacctgagccaacgcctccctgtgaaactgttgctgatctgtagtacagtaccaggaagaaacctcttttgttctctttagacatcttctacttgctcttggccttgagatcgtgtaacaaaatgaaggagggctctcttctttcttcctcatcctactcaaaaacttcccgagagcagtggtggttttgagggttttgacttctattacttttggcagcctggaaagttgtgtcttctgggaaagagacccggggaggccaggagtagctgagggtcctttctgtgcccttaaaccgcccagaggagccctattccactctggttttaggctgatctgagagggtctccctttgttcctttctggagcatttctctaacgtttattacaattaggagggggaccccacatctgtgagattctgtttcatttgaggtttacagaaaaaaaaaagtggccagatgtgttccccccatgggtgagaggcctgggcaactgcctggtgaatgtgtcttgcggcagctgcagcaagtggaggggctgaactactggccagctcactggatgatgggttaatacaacaactgcactgtaaggactcagagccacacagaacttctgagaggggctgttagcattgcgcagcatcttcagttctccagtaaatgatattgcgttcgtgcctcagctttaagcacaagtagcagcagctcctgcttgagttctgagggcatcatggccctatgattaaccagagtgatctaacctagactaaaattgggaacttatttgcaatttttgaccctgaccactaactagtgattcttctccaaaattgagaaagacagcacccattgaaacagatatgtgtgtgaaagtatatttttcaattccagatttttaattttaaggctccaggaaagaaaggagagtagaacatttttcctcattttatcaaatcctctcttgccctccctcaattcccctgtaacattcctgaagctgttcccactcccagatggttttatcaatagcctagaggtaaagaactgtctttttctctgattctttaataaattatctttatagaatatgcacaagtttttctacactcagtgttaaagtatttattaatgggaagtcaacttaatgttttgaaataaatatatgactctgtttaat

SEQ ID NO: 890 - protein, 350 aa, Homo sapien
MEPKRIREGYLVKKGSVFNTWKPMWVVLLEDGIEFYKKKSDNSPKGMIPLKGSTLTSPCQDFGKRMFVFKITTTKQQDHFFQAAFLEERDAWVRDINKAIKCIEGGQKFARKSTRRSIRLPETIDLGALYLSMKDTEKGIKELNLEKDKKIFNHCFTGNCVIDWLVSNQSVRNRQEGLMIASSLLNEGYLQPAGDMSKSAVDGTAENPFLDNPDAFYYFPDSGFFCEENSSDDDVILKEEFRGVIIKQGCLLKQGHRRKNWKVRKFILREDPAYLHYYDPAGAEDPLGAIHLRGCVVTSVESNSNGRKSEEENLFEIITADEVHYFLQAATPKERTEWIKAIQMASRTGK

SEQ ID NO: 891 - DNA, 3184 bp, Homo sapien
ctctgctgtgctgcctcaaacgcggagggctgcgtgcagtgggagcgggctccaggagcccgagcctccagccgtcctcagagcaaggcagcaccgaggcctggccacagcaatatccatctggaagctcttcccttcactcccaactctgaggttgcctaactctttattaaaaattcagaagggggaatgccagcccctagcatggactgtgatgtttccactctggttgcctgtgtggtggatgtcgaggtctttaccaatcaggaggttaaggaaaaatttgggggactgtttcggacttatgatgactgtgtgacgttccagctatttaagagtttcagacgtgtccgtataaacttcagcaatcctaaatctgcagcccgagctaggatagagcttcatgaaacccaattcagagggaaaaaattaaagctctactttgcacaggttcagactccagagacagatggagacaaactgcacttggctccaccccagcctgccaaacagtttctcatctcgcccccttcctccccacctgttagctggcagcccatcaacgatgccacgccagtcctcaactatgacctcctctatgctgtggccaaactaggaccaggagagaagtatgagctccatgcagggactgagtccaccccaagtgtcgtcgtgcacgtgtgcgacagtgacatagaggaagaagaggacccaaagacttccccaaagccaaaaatcatccaaactcggcgtcctggcctgccaccctccgtgtccaactgagctgcctgctccttctcgataatagccgtctcctctttatcatgctttttccccctgttgtttgtcaaaaaaaattgcctttaaattcctgggtgtttggttgtttgagattccttccttgttatcaagcctctcggacaaaagggctaggaaaaggtgatatgtctcctgatcatatcatacccattaagtataacccattatttagaaggttctagggaaaaaagtagtattttcttattaaacaatcagcacagcctatatctttgttctctcatgttgatccaagccagagacatcggtaacaaatagcacctgtgttgtttgtgaggtgtttcagtcccagtcctgatgtgtgtgcgttgttctctcctggccacttaaataggaccatatgtaaacttgactttgactgcatgagatatccctatctggtctcactcagtcctctgcatcccaacattcccaggacatgcatgatcaccagcatttattttcattatttgaggatatcttataactcacagattgtcagcatccagccatgtcctatctagattaggaaaatgatcagaatattccagctcaacaagtctgggtatactcactattgtgagtcaatacaccatagctctgttgaaattcctggaggcaaaattgaccttggccccaaagatattcctcaatagatttcaaacaccactcccctgtagaactctcccagcctcgttggggaggcttgtccagggtgatagagactgatttcagacaaacctatttattacaaaagtttcatggtgtctgaatgattgttttctctctttgtatatttgtacaaatgtttcagctgtgcttttaaaaaatctggatgttttttatttagtgattgttcgacaattagctgcttcaaaacataatgtgcattgcttatgaatgccttcatatactaatacagatactctgataatattacactctaataaggataatgctgaattttgaaaggacacaaaacatctaatgccaatatatacatggttagccaacatctttgctatcaagaccacttgttttaaataaagatgcaagtgtcagttgtagattattgggatgaagctaaatccccagaatgcagcagcagctgagcatgttaaaatggggaaggatgatagctacatgtatgccggtcctactcacgcgacacccgtgtgctcaaaaaagttacttgtttttgttacgtgtgattttcctatttctctagcccaaagtgcattacagaagatacacctatagaaccattaccttctgctatgtgtgccagggctcatctactcctgtacattaatggattactttagatgcaaatgcagattacaatggagtggggaagtactttcattacccaagcctcagaaaaacacacaagaacaataacacagcaaacagattgagggattgttgtggtttttgactaaggtgtatgttagtttcatcagaaacttaaaacatagactgatcactcagaaattaaagtccgttttactgtgaatatagcaatatagtactggacacagtactggtgaaactgaggagagcattgcttgtaaaatcctgagtttccataaggaaaatgaaaactccttttaaaaataaaatctgaggagtgtacaataagcatatgctttgactttcctttgctgtggaggtttttggtttttcattgatgataaacgactacagacttagtagtggagaaatggtgtcctctagtggaagaaatagtagctccgctattcagatgcagagcactgcagcatccagcctttcaaagctgactcttctcaatcatctgtgggtcatttgacttgattttttaagctaccctgaatttccagaatgcaggttctaaagaaatctagatgagagaaagtatttgaaaatgatttttaaatgttttttaaaagacacatctgacatttttaacaacttagtaaaagttgaaatgaccattctgtgtagtcataaaagaaacacaatgaagtgtatggcctctggagttagtcttagtaaaacttattgctctgtgtcaatgttaacctgtctcagatcaagtaattccttcactaggttgggtttggggaggggggaaaagaggggcttttcctaggagaacgataagaaatggaaagactccttgaagtgttgcaagggaacctcctagcactgtgaaagtcagaatcgcctcagcatttccatgacgcacattatgcaaatctctttagcactattttaaggttgaaaactttaacaatgaaggggaaggggaagatttccaccaactgaatcatttgtgcacgtgtatagctcaaagagcttagacttcaaatatatctggtgaatg

SEQ ID NO: 892 - protein, 192 aa, Homo sapien
MDCDVSTLVACVVDVEVFTNQEVKEKFGGLFRTYDDCVTFQLFKSFRRVRINFSNPKSAARARIELHETQFRGKKLKLYFAQVQTPETDGDKLHLAPPQPAKQFLISPPSSPPVSWQPINDATPVLNYDLLYAVAKLGPGEKYELHAGTESTPSVVVHVCDSDIEEEEDPKTSPKPKIIQTRRPGLPPSVSN

SEQ ID NO: 893 - DNA, 10412 bp, Homo sapien
gtaattgcgagcgagagtgagtggggccgggacccgcagagccgagccgacccttctctcccgggctgcggcagggcagggcggggagctccgcgcaccaacagagccggttctcagggcgctttgctccttgttttttccccggttctgttttctccccttctccggaaggcttgtcaaggggtaggagaaagagacgcaaacacaaaagtggaaaacagttaatgaccagccacggcgtccctgctgtgagctctggccgctgccttccagggctcccgagccacacgctgggggtgctggctgagggaacatggcttgttggcctcagctgaggttgctgctgtggaagaacctcactttcagaagaagacaaacatgtcagctgctgctggaagtggcctggcctctatttatcttcctgatcctgatctctgttcggctgagctacccaccctatgaacaacatgaatgccattttccaaataaagccatgccctctgcaggaacacttccttgggttcaggggattatctgtaatgccaacaacccctgtttccgttacccgactcctggggaggctcccggagttgttggaaactttaacaaatccattgtggctcgcctgttctcagatgctcggaggcttcttttatacagccagaaagacaccagcatgaaggacatgcgcaaagttctgagaacattacagcagatcaagaaatccagctcaaacttgaagcttcaagatttcctggtggacaatgaaaccttctctgggttcctgtatcacaacctctctctcccaaagtctactgtggacaagatgctgagggctgatgtcattctccacaaggtatttttgcaaggctaccagttacatttgacaagtctgtgcaatggatcaaaatcagaagagatgattcaacttggtgaccaagaagtttctgagctttgtggcctaccaagggagaaactggctgcagcagagcgagtacttcgttccaacatggacatcctgaagccaatcctgagaacactaaactctacatctcccttcccgagcaaggagctggctgaagccacaaaaacattgctgcatagtcttgggactctggcccaggagctgttcagcatgagaagctggagtgacatgcgacaggaggtgatgtttctgaccaatgtgaacagctccagctcctccacccaaatctaccaggctgtgtctcgtattgtctgcgggcatcccgagggaggggggctgaagatcaagtctctcaactggtatgaggacaacaactacaaagccctctttggaggcaatggcactgaggaagatgctgaaaccttctatgacaactctacaactccttactgcaatgatttgatgaagaatttggagtctagtcctctttcccgcattatctggaaagctctgaagccgctgctcgttgggaagatcctgtatacacctgacactccagccacaaggcaggtcatggctgaggtgaacaagaccttccaggaactggctgtgttccatgatctggaaggcatgtgggaggaactcagccccaagatctggaccttcatggagaacagccaagaaatggaccttgtccggatgctgttggacagcagggacaatgaccacttttgggaacagcagttggatggcttagattggacagcccaagacatcgtggcgtttttggccaagcacccagaggatgtccagtccagtaatggttctgtgtacacctggagagaagctttcaacgagactaaccaggcaatccggaccatatctcgcttcatggagtgtgtcaacctgaacaagctagaacccatagcaacagaagtctggctcatcaacaagtccatggagctgctggatgagaggaagttctgggctggtattgtgttcactggaattactccaggcagcattgagctgccccatcatgtcaagtacaagatccgaatggacattgacaatgtggagaggacaaataaaatcaaggatgggtactgggaccctggtcctcgagctgacccctttgaggacatgcggtacgtctgggggggcttcgcctacttgcaggatgtggtggagcaggcaatcatcagggtgctgacgggcaccgagaagaaaactggtgtctatatgcaacagatgccctatccctgttacgttgatgacatctttctgcgggtgatgagccggtcaatgcccctcttcatgacgctggcctggatttactcagtggctgtgatcatcaagggcatcgtgtatgagaaggaggcacggctgaaagagaccatgcggatcatgggcctggacaacagcatcctctggtttagctggttcattagtagcctcattcctcttcttgtgagcgctggcctgctagtggtcatcctgaagttaggaaacctgctgccctacagtgatcccagcgtggtgtttgtcttcctgtccgtgtttgctgtggtgacaatcctgcagtgcttcctgattagcacactcttctccagagccaacctggcagcagcctgtgggggcatcatctacttcacgctgtacctgccctacgtcctgtgtgtggcatggcaggactacgtgggcttcacactcaagatcttcgctagcctgctgtctcctgtggcttttgggtttggctgtgagtactttgccctttttgaggagcagggcattggagtgcagtgggacaacctgtttgagagtcctgtggaggaagatggcttcaatctcaccacttcggtctccatgatgctgtttgacaccttcctctatggggtgatgacctggtacattgaggctgtctttccaggccagtacggaattcccaggccctggtattttccttgcaccaagtcctactggtttggcgaggaaagtgatgagaagagccaccctggttccaaccagaagagaatatcagaaatctgcatggaggaggaacccacccacttgaagctgggcgtgtccattcagaacctggtaaaagtctaccgagatgggatgaaggtggctgtcgatggcctggcactgaatttttatgagggccagatcacctccttcctgggccacaatggagcggggaagacgaccaccatgtcaatcctgaccgggttgttccccccgacctcgggcaccgcctacatcctgggaaaagacattcgctctgagatgagcaccatccggcagaacctgggggtctgtccccagcataacgtgctgtttgacatgctgactgtcgaagaacacatctggttctatgcccgcttgaaagggctctctgagaagcacgtgaaggcggagatggagcagatggccctggatgttggtttgccatcaagcaagctgaaaagcaaaacaagccagctgtcaggtggaatgcagagaaagctatctgtggccttggcctttgtcgggggatctaaggttgtcattctggatgaacccacagctggtgtggacccttactcccgcaggggaatatgggagctgctgctgaaataccgacaaggccgcaccattattctctctacacaccacatggatgaagcggacgtcctgggggacaggattgccatcatctcccatgggaagctgtgctgtgtgggctcctccctgtttctgaagaaccagctgggaacaggctactacctgaccttggtcaagaaagatgtggaatcctccctcagttcctgcagaaacagtagtagcactgtgtcatacctgaaaaaggaggacagtgtttctcagagcagttctgatgctggcctgggcagcgaccatgagagtgacacgctgaccatcgatgtctctgctatctccaacctcatcaggaagcatgtgtctgaagcccggctggtggaagacatagggcatgagctgacctatgtgctgccatatgaagctgctaaggagggagcctttgtggaactctttcatgagattgatgaccggctctcagacctgggcatttctagttatggcatctcagagacgaccctggaagaaatattcctcaaggtggccgaagagagtggggtggatgctgagacctcagatggtaccttgccagcaagacgaaacaggcgggccttcggggacaagcagagctgtcttcgcccgttcactgaagatgatgctgctgatccaaatgattctgacatagacccagaatccagagagacagacttgctcagtgggatggatggcaaagggtcctaccaggtgaaaggctggaaacttacacagcaacagtttgtggcccttttgtggaagagactgctaattgccagacggagtcggaaaggattttttgctcagattgtcttgccagctgtgtttgtctgcattgcccttgtgttcagcctgatcgtgccaccctttggcaagtaccccagcctggaacttcagccctggatgtacaacgaacagtacacatttgtcagcaatgatgctcctgaggacacgggaaccctggaactcttaaacgccctcaccaaagaccctggcttcgggacccgctgtatggaaggaaacccaatcccagacacgccctgccaggcaggggaggaagagtggaccactgccccagttccccagaccatcatggacctcttccagaatgggaactggacaatgcagaacccttcacctgcatgccagtgtagcagcgacaaaatcaagaagatgctgcctgtgtgtcccccaggggcaggggggctgcctcctccacaaagaaaacaaaacactgcagatatccttcaggacctgacaggaagaaacatttcggattatctggtgaagacgtatgtgcagatcatagccaaaagcttaaagaacaagatctgggtgaatgagtttaggtatggcggcttttccctgggtgtcagtaatactcaagcacttcctccgagtcaagaagttaatgatgccatcaaacaaatgaagaaacacctaaagctggccaaggacagttctgcagatcgatttctcaacagcttgggaagatttatgacaggactggacaccaaaaataatgtcaaggtgtggttcaataacaagggctggcatgcaatcagctctttcctgaatgtcatcaacaatgccattctccgggccaacctgcaaaagggagagaaccctagccattatggaattactgctttcaatcatcccctgaatctcaccaagcagcagctctcagaggtggctctgatgaccacatcagtggatgtccttgtgtccatctgtgtcatctttgcaatgtccttcgtcccagccagctttgtcgtattcctgatccaggagcgggtcagcaaagcaaaacacctgcagttcatcagtggagtgaagcctgtcatctactggctctctaattttgtctgggatatgtgcaattacgttgtccctgccacactggtcattatcatcttcatctgcttccagcagaagtcctatgtgtcctccaccaatctgcctgtgctagcccttctacttttgctgtatgggtggtcaatcacacctctcatgtacccagcctcctttgtgttcaagatccccagcacagcctatgtggtgctcaccagcgtgaacctcttcattggcattaatggcagcgtggccacctttgtgctggagctgttcaccgacaataagctgaataatatcaatgatatcctgaagtccgtgttcttgatcttcccacatttttgcctgggacgagggctcatcgacatggtgaaaaaccaggcaatggctgatgccctggaaaggtttggggagaatcgctttgtgtcaccattatcttgggacttggtgggacgaaacctcttcgccatggccgtggaaggggtggtgttcttcctcattactgttctgatccagtacagattcttcatcaggcccagacctgtaaatgcaaagctatctcctctgaatgatgaagatgaagatgtgaggcgggaaagacagagaattcttgatggtggaggccagaatgacatcttagaaatcaaggagttgacgaagatatatagaaggaagcggaagcctgctgttgacaggatttgcgtgggcattcctcctggtgagtgctttgggctcctgggagttaatggggctggaaaatcatcaactttcaagatgttaacaggagataccactgttaccagaggagatgctttccttaacaaaaatagtatcttatcaaacatccatgaagtacatcagaacatgggctactgccctcagtttgatgccatcacagagctgttgactgggagagaacacgtggagttctttgcccttttgagaggagtcccagagaaagaagttggcaaggttggtgagtgggcgattcggaaactgggcctcgtgaagtatggagaaaaatatgctggtaactatagtggaggcaacaaacgcaagctctctacagccatggctttgatcggcgggcctcctgtggtgtttctggatgaacccaccacaggcatggatcccaaagcccggcggttcttgtggaattgtgccctaagtgttgtcaaggaggggagatcagtagtgcttacatctcatagtatggaagaatgtgaagctctttgcactaggatggcaatcatggtcaatggaaggttcaggtgccttggcagtgtccagcatctaaaaaataggtttggagatggttatacaatagttgtacgaatagcagggtccaacccggacctgaagcctgtccaggatttctttggacttgcatttcctggaagtgttctaaaagagaaacaccggaacatgctacaataccagcttccatcttcattatcttctctggccaggatattcagcatcctctcccagagcaaaaagcgactccacatagaagactactctgtttctcagacaacacttgaccaagtatttgtgaactttgccaaggaccaaagtgatgatgaccacttaaaagacctctcattacacaaaaaccagacagtagtggacgttgcagttctcacatcttttctacaggatgagaaagtgaaagaaagctatgtatgaagaatcctgttcatacggggtggctgaaagtaaagaggaactagactttcctttgcaccatgtgaagtgttgtggagaaaagagccagaagttgatgtgggaagaagtaaactggatactgtactgatactattcaatgcaatgcaattcaatgcaatgaaaacaaaattccattacaggggcagtgcctttgtagcctatgtcttgtatggctctcaagtgaaagacttgaatttagttttttacctatacctatgtgaaactctattatggaacccaatggacatatgggtttgaactcacacttttttttttttttttgttcctgtgtattctcattggggttgcaacaataattcatcaagtaatcatggccagcgattattgatcaaaatcaaaaggtaatgcacatcctcattcactaagccatgccatgcccaggagactggtttcccggtgacacatccattgctggcaatgagtgtgccagagttattagtgccaagtttttcagaaagtttgaagcaccatggtgtgtcatgctcacttttgtgaaagctgctctgctcagagtctatcaacattgaatatcagttgacagaatggtgccatgcgtggctaacatcctgctttgattccctctgataagctgttctggtggcagtaacatgcaacaaaaatgtgggtgtctccaggcacgggaaacttggttccattgttatattgtcctatgcttcgagccatgggtctacagggtcatccttatgagactcttaaatatacttagatcctggtaagaggcaaagaatcaacagccaaactgctggggctgcaagctgctgaagccagggcatgggattaaagagattgtgcgttcaaacctagggaagcctgtgcccatttgtcctgactgtctgctaacatggtacactgcatctcaagatgtttatctgacacaagtgtattatttctggctttttgaattaatctagaaaatgaaaagatggagttgtattttgacaaaaatgtttgtactttttaatgttatttggaattttaagttctatcagtgacttctgaatccttagaatggcctctttgtagaaccctgtggtatagaggagtatggccactgccccactatttttattttcttatgtaagtttgcatatcagtcatgactagtgcctagaaagcaatgtgatggtcaggatctcatgacattatatttgagtttctttcagatcatttaggatactcttaatctcacttcatcaatcaaatattttttgagtgtatgctgtagctgaaagagtatgtacgtacgtataagactagagagatattaagtctcagtacacttcctgtgccatgttattcagctcactggtttacaaatataggttgtcttgtggttgtaggagcccactgtaacaatactgggcagcctttttttttttttttttaattgcaacaatgcaaaagccaagaaagtataagggtcacaagtctaaacaatgaattcttcaacagggaaaacagctagcttgaaaacttgctgaaaaacacaacttgtgtttatggcatttagtaccttcaaataattggctttgcagatattggataccccattaaatctgacagtctcaaatttttcatctcttcaatcactagtcaagaaaaatataaaaacaacaaatacttccatatggagcatttttcagagttttctaacccagtcttatttttctagtcagtaaacatttgtaaaaatactgtttcactaatacttactgttaactgtcttgagagaaaagaaaaatatgagagaactattgtttggggaagttcaagtgatctttcaatatcattactaacttcttccactttttccagaatttgaatattaacgctaaaggtgtaagacttcagatttcaaattaatctttctatattttttaaatttacagaatattatataacccactgctgaaaaagaaaaaaatgattgttttagaagttaaagtcaatattgattttaaatataagtaatgaaggcatatttccaataactagtgatatggcatcgttgcattttacagtatcttcaaaaatacagaatttatagaataatttctcctcatttaatatttttcaaaatcaaagttatggtttcctcattttactaaaatcgtattctaattcttcattatagtaaatctatgagcaactccttacttcggttcctctgatttcaaggccatattttaaaaaatcaaaaggcactgtgaactattttgaagaaaacacaacattttaatacagattgaaaggacctcttctgaagctagaaacaatctatagttatacatcttcattaatactgtgttaccttttaaaatagtaattttttacattttcctgtgtaaacctaattgtggtagaaatttttaccaactctatactcaatcaagcaaaatttctgtatattccctgtggaatgtacctatgtgagtttcagaaattctcaaaatacgtgttcaaaaatttctgcttttgcatctttgggacacctcagaaaacttattaacaactgtgaatatgagaaatacagaagaaaataataagccctctatacataaatgcccagcacaattcattgttaaaaaacaaccaaacctcacactactgtatttcattatctgtactgaaagcaaatgctttgtgactattaaatgttgcacatcattcattcactgtatagtaatcattgactaaagccatttgtctgtgttttcttcttgtggttgtatatatcaggtaaaatattttccaaagagccatgtgtcatgtaatactgaaccactttgatattgagacattaatttgtacccttgttattatctactagtaataatgtaatactgtagaaatattgctctaattcttttcaaaattgttgcatcccccttagaatgtttctatttccataaggatttaggtatgctattatcccttcttataccctaagatgaagctgtttttgtgctctttgttcatcattggccctcattccaagcactttacgctgtctgtaatgggatctatttttgcactggaatatctgagaattgcaaaactagacaaaagtttcacaacagatttctaagttaaatcattttcattaaaaggaaaaaagaaaaaaaattttgtatgtcaataactttatatgaagtattaaaatgcatatttctatgttgtaatataatgagtcacaaaataaagctgtgacagttctgttggtctacagaaa

SEQ ID NO: 894 - protein, 2000 aa, Homo sapien
MACWPQLRLLLWKNLTFRRRQTCQLLLEVAWPLFIFLILISVRLSYPPYEQHECHFPNKAMPSAGTLPWVQGIICNANNPCFRYPTPGEAPGVVGNFNKSIVARLFSDARRLLLYSQKDTSMKDMRKVLRTLQQIKKSSSNLKLQDFLVDNETFSGFLYHNLSLPKSTVDKMLRADVILHKVFLQGYQLHLTSLCNGSKSEEMIQLGDQEVSELCGLPREKLAAAERVLRSNMDILKPILRTLNSTSPFPSKELAEATKTLLHSLGTLAQELFSMRSWSDMRQEVMFLTNVNSSSSSTQIYQAVSRIVCGHPEGGGLKIKSLNWYEDNNYKALFGGNGTEEDAETFYDNSTTPYCNDLMKNLESSPLSRIIWKALKPLLVGKILYTPDTPATRQVMAEVNKTFQELAVFHDLEGMWEELSPKIWTFMENSQEMDLVRMLLDSRDNDHFWEQQLDGLDWTAQDIVAFLAKHPEDVQSSNGSVYTWREAFNETNQAIRTISRFMECVNLNKLEPIATEVWLINKSMELLDERKFWAGIVFTGITPGSIELPHHVKYKIRMDIDNVERTNKIKDGYWDPGPRADPFEDMRYVWGGFAYLQDVVEQAIIRVLTGTEKKTGVYMQQMPYPCYVDDIFLRVMSRSMPLFMTLAWIYSVAVIIKGIVYEKEARLKETMRIMGLDNSILWFSWFISSLIPLLVSAGLLVVILKLGNLLPYSDPSVVFVFLSVFAVVTILQCFLISTLFSRANLAAACGGIIYFTLYLPYVLCVAWQDYVGFTLKIFASLLSPVAFGFGCEYFALFEEQGIGVQWDNLFESPVEEDGFNLTTSVSMMLFDTFLYGVMTWYIEAVFPGQYGIPRPWYFPCTKSYWFGEESDEKSHPGSNQKRISEICMEEEPTHLKLGVSIQNLVKVYRDGMKVAVDGLALNFYEGQITSFLGHNGAGKTTTMSILTGLFPPTSGTAYILGKDIRSEMSTIRQNLGVCPQHNVLFDMLTVEEHIWFYARLKGLSEKHVKAEMEQMALDVGLPSSKLKSKTSQLSGGMQRKLSVALAFVGGSKVVILDEPTAGVDPYSRRGIWELLLKYRQGRTIILSTHHMDEADVLGDRIAIISHGKLCCVGSSLFLKNQLGTGYYLTLVKKDVESSLSSCRNSSSTVSYLKKEDSVSQSSSDAGLGSDHESDTLTIDVSAISNLIRKHVSEARLVEDIGHELTYVLPYEAAKEGAFVELFHEIDDRLSDLGISSYGISETTLEEIFLKVAEESGVDAETSDGTLPARRNRRAFGDKQSCLRPFTEDDAADPNDSDIDPESRETDLLSGMDGKGSYQVKGWKLTQQQFVALLWKRLLIARRSRKGFFAQIVLPAVFVCIALVFSLIVPPFGKYPSLELQPWMYNEQYTFVSNDAPEDTGTLELLNALTKDPGFGTRCMEGNPIPDTPCQAGEEEWTTAPVPQTIMDLFQNGNWTMQNPSPACQCSSDKIKKMLPVCPPGAGGLPPPQRKQNTADILQDLTGRNISDYLVKTYVQIIAKSLKNKIWVNEFRYGGFSLGVSNTQALPPSQEVNDAIKQMKKHLKLAKDSSADRFLNSLGRFMTGLDTKNNVKVWFNNKGWHAISSFLNVINNAILRANLQKGENPSHYGITAFNHPLNLTKQQLSEVALMTTSVDVLVSICVIFAMSFVPASFVVFLIQERVSKAKHLQFISGVKPVIYWLSNFVWDMCNYVVPATLVIIIFICFQQKSYVSSTNLPVLALLLLLYGWSITPLMYPASFVFKIPSTAYVVLTSVNLFIGINGSVATFVLELFTDNKLNNINDILKSVFLIFPHFCLGRGLIDMVKNQAMADALERFGENRFVSPLSWDLVGRNLFAMAVEGVVFFLITVLIQYRFFIRPRPVNAKLSPLNDEDEDVRRERQRILDGGGQNDILEIKELTKIYRRKRKPAVDRICVGIPPGECFGLLGVNGAGKSSTFKMLTGDTTVTRGDAFLNKNSILSNIHEVHQNMGYCPQFDAITEL

SEQ ID NO: 895 - DNA, 10442 bp, Homo sapien
  Unsure 9881, 9884, 9999, 10046: Unknown base
ggccgggacccgcagagccgagccgacccttctctcccgggctgcggcagggcagggcggggagctccgcgcaccaacagagccggttctcagggcgctttgctccttgttttttccccggttctgttttctccccttctccggaaggcttgtcaaggggtaggagaaagagacgcaaacacaaaagtggaaaacagttaatgaccagccacgggcgtccctgctgtgagctctggccgctgccttccagggctcccgagccacacgctgggcgtgctggctgagggaacatggcttgttggcctcagctgaggttgctgctgtggaagaacctcactttcagaagaagacaaacatgtcagctgttactggaagtggcctggcctctatttatcttcctgatcctgatctctgttcggctgagctacccaccctatgaacaacatgaatgccattttccaaataaagccatgccctctgcaggaacacttccttgggttcaggggattatctgtaatgccaacaacccctgtttccgttacccgactcctggggaggctcccggagttgttggaaactttaacaaatccattgtggctcgcctgttctcagatgctcggaggcttcttttatacagccagaaagacaccagcatgaaggacatgcgcaaagttctgagaacattacagcagatcaagaaatccagctcaaacttgaagcttcaagatttcctggtggacaatgaaaccttctctgggttcctatatcacaacctctctctcccaaagtctactgtggacaagatgctgagggctgatgtcattctccacaaggtatttttgcaaggctaccagttacatttgacaagtctgtgcaatggatcaaaatcagaagagatgattcaacttggtgaccaagaagtttctgagctttgtggcctaccaaaggagaaactggctgcagcagagcgagtacttcgttccaacatggacatcctgaagccaatcctgagaacactaaactctacatctcccttcccgagcaaggagctggctgaagccacaaaaacattgctgcatagtcttgggactctggcccaggagctgttcagcatgagaagctggagtgacatgcgacaggaggtgatgtttctgaccaatgtgaacagctccagctcctccacccaaatctaccaggctgtgtctcgtattgtctgcgggcatcccgagggaggggggctgaagatcaagtctctcaactggtatgaggacaacaactacaaagccctctttggaggcaatggcactgaggaagatgctgaaaccttctatgacaactctacaactccttactgcaatgatttgatgaagaatttggagtctagtcctctttcccgcattatctggaaagctctgaagccgctgctcgttgggaagatcctgtatacacctgacactccagccacaaggcaggtcatggctgaggtgaacaagaccttccaggaactggctgtgttccatgatctggaaggcatgtgggaggaactcagccccaagatctggaccttcatggagaacagccaagaaatggaccttgtccggatgctgttggacagcagggacaatgaccacttttgggaacagcagttggatggcttagattggacagcccaagacatcgtggcgtttttggccaagcacccagaggatgtccagtccagtaatggttctgtgtacacctggagagaagctttcaacgagactaaccaggcaatccggaccatatctcgcttcatggagtgtgtcaacctgaacaagctagaacccatagcaacagaagtctggctcatcaacaagtccatggagctgctggatgagaggaagttctgggctggtattgtgttcactggaattactccaggcagcattgagctgccccatcatgtcaagtacaagatccgaatggacattgacaatgtggagaggacaaataaaatcaaggatgggtactgggaccctggtcctcgagctgacccctttgaggacatgcggtacgtctgggggggcttcgcctacttgcaggatgtggtggagcaggcaatcatcagggtgctgacgggcaccgagaagaaaactggtgtctatatgcaacagatgccctatccctgttacgttgatgacatctttctgcgggtgatgagccggtcaatgcccctcttcatgacgctggcctggatttactcagtggctgtgatcatcaagggcatcgtgtatgagaaggaggcacggctgaaagagaccatgcggatcatgggcctggacaacagcatactctggtttagctggttcattagtagcctcattcctcttcttgtgagcgctggcctgctagtggtcatcctgaagttaggaaacctgctgccctacagtgatcccagcgtggtgtttgtcttcctgtccgtgtttgctgtggtgacaatcctgcagtgcttcctgattagcacactcttctccagagccaacctggcagcagcctgtgggggcatcatctacttcacgctgtacctgccctacgtcctgtgtgtggcatggcaggactacgtgggcttcacactcaagatcttcgctagcctgctgtctcctgtggcttttgggtttggctgtgagtactttgccctttttgaggagcagggcattggagtgcagtgggacaacctgtttgagagtcctgtggaggaagatggcttcaatctcaccacttcgatctccatgatgctgtttgacaccttcctctatggggtgatgacctggtacattgaggctgtctttccaggccagtacggaattcccaggccctggtattttccttgcaccaagtcctactggtttggcgaggaaagtgatgagaagagccaccctggttccaaccagaagagaatgtcagaaatctgcatggaggaggaacccacccacttgaagctgggcgtgtccattcagaacctggtaaaagtctaccgagatgggatgaaggtggctgtcgatggcctggcactgaatttttatgagggccagatcacctccttcctgggccacaatggagcggggaagacgaccaccatgtcaatcctgaccgggttgttccccccgacctcgggcaccgcctacatcctgggaaaagacattcgctctgagatgagcaccatccggcagaacctgggggtctgtccccagcataacgtgctgtttgacatgctgactgtcgaagaacacatctggttctatgcccgcttgaaagggctctctgagaagcacgtgaaggcggagatggagcagatggccctggatgttggtttgccatcaagcaagctgaaaagcaaaacaagccagctgtcaggtggaatgcagagaaagctatctgtggccttggcctttgtcgggggatctaaggttgtcattctggatgaacccacagctggtgtggacccttactcccgcaggggaatatgggagctgctgctgaaataccgacaaggccgcaccattattctctctacacaccacatggatgaagcggacgtcctgggggacaggattgccatcatctcccatgggaagctgtgctgtgtgggctcctccctgtttctgaagaaccagctgggaacaggctactacctgaccttggtcaagaaagatgtggaatcctccctcagttcctgcagaaacagtagtagcactgtgtcatacctgaaaaaggaggacagtgtttctcagagcagttctgatgctggcctgggcagcgaccatgagagtgacacgctgaccatcgatgtctctgctatctccaacctcatcaggaagcatgtgtctgaagcccggctggtggaagacatagggcatgagctgacctatgtgctgccatatgaagctgctaaggagggagcctttgtggaactctttcatgagattgatgaccggctctcagacctgggcatttctagttatggcatctcagagacgaccctggaagaaatattcctcaaggtggccgaagagagtggggtggatgctgagacctcagatggtaccttgccagcaagacgaaacaggcgggccttcggggacaagcagagctgtcttcgcccgttcactgaagatgatgctgctgatccaaatgattctgacatagacccagaatccagagagacagacttgctcagtgggatggatggcaaagggtcctaccaggtgaaaggctggaaacttacacagcaacagtttgtggcccttttgtggaagagactgctaattgccagacggagtcggaaaggattttttgctcagattgtcttgccagctgtgtttgtctgcattgcccttgtgttcagcctgatcgtgccaccctttggcaagtaccccagcctggaacttcagccctggatgtacaacgaacagtacacatttgtcagcaatgatgctcctgaggacacgggaaccctggaactcttaaacgccctcaccaaagaccctggcttcgggacccgctgtatggaaggaaacccaatcccagacacgccctgccaggcaggggaggaagagtggaccactgccccagttccccagaccatcatggacctcttccagaatgggaactggacaatgcagaacccttcacctgcatgccagtgtagcagcgacaaaatcaagaagatgctgcctgtgtgtcccccaggggcaggggggctgcctcctccacaaagaaaacaaaacactgcagatatccttcaggacctgacaggaagaaacatttcggattatctggtgaagacgtatgtgcagatcatagccaaaagcttaaagaacaagatctgggtgaatgagtttaggtatggcggcttttccctgggtgtcagtaatactcaagcacttcctccgagtcaagaagttaatgatgccatcaaacaaatgaagaaacacctaaagctggccaaggacagttctgcagatcgatttctcaacagcttgggaagatttatgacaggactggacaccagaaataatgtcaaggtgtggttcaataacaagggctggcatgcaatcagctctttcctgaatgtcatcaacaatgccattctccgggccaacctgcaaaagggagagaaccctagccattatggaattactgctttcaatcatcccctgaatctcaccaagcagcagctctcagaggtggctctgatgaccacatcagtggatgtccttgtgtccatctgtgtcatctttgcaatgtccttcgtcccagccagctttgtcgtattcctgatccaggagcgggtcagcaaagcaaaacacctgcagttcatcagtggagtgaagcctgtcatctactggctctctaattttgtctgggatatgtgcaattacgttgtccctgccacactggtcattatcatcttcatctgcttccagcagaagtcctatgtgtcctccaccaatctgcctgtgctagcccttctacttttgctgtatgggtggtcaatcacacctctcatgtacccagcctcctttgtgttcaagatccccagcacagcctatgtggtgctcaccagcgtgaacctcttcattggcattaatggcagcgtggccacctttgtgctggagctgttcaccgacaataagctgaataatatcaatgatatcctgaagtccgtgttcttgatcttcccacatttttgcctgggacgagggctcatcgacatggtgaaaaaccaggcaatggctgatgccctggaaaggtttggggagaatcgctttgtgtcaccattatcttgggacttggtgggacgaaacctcttcgccatggccgtggaaggggtggtgttcttcctcattactgttctgatccagtacagattcttcatcaggcccagacctgtaaatgcaaagctatctcctctgaatgatgaagatgaagatgtgaggcgggaaagacagagaattcttgatggtggaggccagaatgacatcttagaaatcaaggagttgacgaagatatatagaaggaagcggaagcctgctgttgacaggatttgcgtgggcattcctcctggtgagtgctttgggctcctgggagttaatggggctggaaaatcatcaactttcaagatgttaacaggagataccactgttaccagaggagatgctttccttaacaaaaatagtatcttatcaaacatccatgaagtacatcagaacatgggctactgccctcagtttgatgccatcacagagctgttgactgggagagaacacgtggagttctttgcccttttgagaggagtcccagagaaagaagttggcaaggttggtgagtgggcgattcggaaactgggcctcgtgaagtatggagaaaaatatgctggtaactatagtggaggcaacaaacgcaagctctctacagccatggctttgatcggcgggcctcctgtggtgtttctggatgaacccaccacaggcatggatcccaaagcccggcggttcttgtggaattgtgccctaagtgttgtcaaggaggggagatcagtagtgcttacatctcatagtatggaagaatgtgaagctctttgcactaggatggcaatcatggtcaatggaaggttcaggtgccttggcagtgtccagcatctaaaaaataggtttggagatggttatacaatagttgtacgaatagcagggtccaacccggacctgaagcctgtccaggatttctttggacttgcatttcctggaagtgttctaaaagagaaacaccggaacatgctacaataccagcttccatcttcattatcttctctggccaggatattcagcatcctctcccagagcaaaaagcgactccacatagaagactactctgtttctcagacaacacttgaccaagtatttgtgaactttgccaaggaccaaagtgatgatgaccacttaaaagacctctcattacacaaaaaccagacagtagtggacgttgcagttctcacatcttttctacaggatgagaaagtgaaagaaagctatgtatgaagaatcctgttcatacggggtggctgaaagtaaagaggaactagactttcctttgcaccatgtgaagtgttgtggagaaaagagccagaagttgatgtgggaagaagtaaactggatactgtactgatactattcaatgcaatgcaattcaatgcaatgaaaacaaaattccattacaggggcagtgcctttgtagcctatgtcttgtatggctctcaagtgaaagacttgaatttagttttttacctatacctatgtgaaactctattatggaacccaatggacatatgggtttgaactcacactttttttttttttttgttcctgtgtattctcattggggttgcaacaataattcatcaagtaatcatggccagcgattattgatcaaaatcaaaaggtaatgcacatcctcattcactaagccatgccatgcccaggagactggtttcccggtgacacatccattgctggcaatgagtgtgccagagttattagtgccaagtttttcagaaagtttgaagcaccatggtgtgtcatgctcacttttgtgaaagctgctctgctcagagtctatcaacattgaatatcagttgacagaatggtgccatgcgtggctaacatcctgctttgattccctctgataagctgttctggtggcagtaacatgcaacaaaaatgtgggtgtctctaggcacgggaaacttggttccattgttatattgtcctatgcttcgagccatgggtctacagggtcatccttatgagactcttaaatatacttagatcctggtaagaggcaaagaatcaacagccaaactgctggggctgcaagctgctgaagccagggcatgggattaaagagattgtgcgttcaaacctagggaagcctgtgcccatttgtcctgactgtctgctaacatggtacactgcatctcaagatgtttatctgacacaagtgtattatttctggctttttgaattaatctagaaaatgaaaagatggagttgtattttgacaaaaatgtttgtactttttaatgttatttggaattttaagttctatcagtgacttctgaatccttagaatggcctctttgtagaaccctgtggtatagaggagtatggccactgccccactatttttattttcttatgtaagtttgcatatcagtcatgactagtgcctagaaagcaatgtgatggtcaggatctcatgacattatatttgagtttctttcagatcatttaggatactcttaatctcacttcatcaatcaaatattttttgagtgtatgctgtagctgaaagagtatgtacgtacgtataagactagagagatattaagtctcagtacacttcctgtgccatgttattcagctcactggtttacaaatataggttgtcttgtggttgtaggagcccactgtaacaatattgggcagccttttttttttttttttaattgcaacaatgcaaaagccaagaaagtataagggtcacaagtttaaacaatgaattcttcaacagggaaaacagctagcttgaaaacttgctgaaaaacacaacttgtgtttatggcatttagtaccttcaaataattggctttgcagatattggataccccattaaatctgacagtctcaaatttttcatctcttcaatcactagtcaagaaaaatataaaaacaacaaatacttccatatggagcatttttcagagttttctaacccagtcttatttttctagtcagtaaacatttgtaaaaatactgtttcactaatacttactgttaactgtcttgagagaaaagaaaaatatgagagaactattgtttggggaagttcaagtgatctttcaatatcattactaacttcttccactttttccaaaatttgaatattaacgctaaaggtgtaagacttcagatttcaaattaatctttctatattttttaaatttacagaatattatataacccactgctgaaaaagaaaaaaatgattgttttagaagttaaagtcaatattgattttaaatataagtaatgaaggcatatttccaataactagtgatatggcatcgttgcaatttacagtatcttcaaaaatacagaatttatagaataatttctcctcatttaatatttttcaaaatcaaagttatggtttcctcattttactaaaatcgtattctaattcttcattatagtaaatctatgagcaactccttacttcggttcctctgatttcaaggccatattttaaaaaatcaaaaggcactgtgaactattttgaagaaaacacgacattttaatacagattgaaaggacctcttctgaagctagaaacaatctatagttatacatcttcattaatactgtgttaccttttaaaatagtaattttttacattttcctgtgtaaacctaattgtggtagaaatttttaccaactctatactcaatcaagcaaaatttctgtatattccctgtggaatgtacctatgtgagtttcagaaattctcaaaatacgtgttcaaaaatttctgcttttgcatctttgggacacctcagaaaacttattaacaactgtgaatatgagaaatacagaagaaaataataagccctctatacataaatgcccagcacaattcattgttaaaaaacaaccaaacctcacactactgtatttcattatctgtactgaaagcaaatgctttgtgactattaaatgttgcacatcattcattcactgtatagtaatcattgactaaagccatttgctgtgttttcttcttgtggntgnatatatcaggtaaaatattttccaaagagccatgtgtcatgtaatactgaaccctttgatattgagacattaatttggacccttggtattatctactagaataatgtaatactgnagaaatattgctctaattctttcaaaatggtgcatcccccttaaaangttctatttccataaggatttagcttgcttatcccttcttataccctaagatgaagctgtttttgtgctctttgttcatcattggccctcattccaagcactttacgctgtctgtaatgggatctatttttgcactggaatatctgagaattgcaaaactagacaaaagtttcacaacagatttctaagttaaatcattttcattaaaaggaaaaaagaaaaaaaattttgtatgtcaataactttatatgaagtattaaaatgcatatttctatgttgtaatataatgagtcacaaaataaagctgtgacagttctgttaaaaaaaaaaaaaaaaaaaaaaaaaaaaaaaaaaaaaaaaaaaaaaaaaaaaaaaaaaaaaaaaaaaaaaaaaaaa

SEQ ID NO: 896 - protein, 2261 aa, Homo sapien [sequence omitted]

SEQ ID NO: 897 - DNA, 3682 bp, Homo sapien
gcgagcgcagcggagcctggagagaaggcgctgggctgcgagggcgcgagggcgcgagggcagggggcaaccggaccccgcccgcacccatggcgcccgtcgccgtctgggccgcgctggccgtcggactggagctctgggctgcggcgcacgccttgcccgcccaggtggcatttacaccctacgccccggagcccgggagcacatgccggctcagagaatactatgaccagacagctcagatgtgctgcagcaaatgctcgccgggccaacatgcaaaagtcttctgtaccaagacctcggacaccgtgtgtgactcctgtgaggacagcacatacacccagctctggaactgggttcccgagtgcttgagctgtggctcccgctgtagctctgaccaggtggaaactcaagcctgcactcgggaacagaaccgcatctgcacctgcaggcccggctggtactgcgcgctgagcaagcaggaggggtgccggctgtgcgcgccgctgcgcaagtgccgcccgggcttcggcgtggccagaccaggaactgaaacatcagacgtggtgtgcaagccctgtgccccggggacgttctccaacacgacttcatccacggatatttgcaggccccaccagatctgtaacgtggtggccatccctgggaatgcaagcatggatgcagtctgcacgtccacgtcccccacccggagtatggccccaggggcagtacacttaccccagccagtgtccacacgatcccaacacacgcagccaactccagaacccagcactgctccaagcacctccttcctgctcccaatgggccccagccccccagctgaagggagcactggcgacttcgctcttccagttggactgattgtgggtgtgacagccttgggtctactaataataggagtggtgaactgtgtcatcatgacccaggtgaaaaagaagcccttgtgcctgcagagagaagccaaggtgcctcacttgcctgccgataaggcccggggtacacagggccccgagcagcagcacctgctgatcacagcgccgagctccagcagcagctccctggagagctcggccagtgcgttggacagaagggcgcccactcggaaccagccacaggcaccaggcgtggaggccagtggggccggggaggcccgggccagcaccgggagctcagattcttcccctggtggccatgggacccaggtcaatgtcacctgcatcgtgaacgtctgtagcagctctgaccacagctcacagtgctcctcccaagccagctccacaatgggagacacagattccagcccctcggagtccccgaaggacgagcaggtccccttctccaaggaggaatgtgcctttcggtcacagctggagacgccagagaccctgctggggagcaccgaagagaagcccctgccccttggagtgcctgatgctgggatgaagcccagttaaccaggccggtgtgggctgtgtcgtagccaaggtgggctgagccctggcaggatgaccctgcgaaggggccctggtccttccaggcccccaccactaggactctgaggctctttctgggccaagttcctctagtgccctccacagccgcagcctccctctgacctgcaggccaagagcagaggcagcgagttgtggaaagcctctgctgccatggcgtgtccctctcggaaggctggctgggcatggacgttcggggcatgctggggcaagtccctgactctctgtgacctgccccgcccagctgcacctgccagcctggcttctggagcccttgggttttttgtttgtttgtttgtttgtttgtttgtttctccccctgggctctgccccagctctggcttccagaaaaccccagcatccttttctgcagaggggctttctggagaggagggatgctgcctgagtcacccatgaagacaggacagtgcttcagcctgaggctgagactgcgggatggtcctggggctctgtgcagggaggaggtggcagccctgtagggaacggggtccttcaagttagctcaggaggcttggaaagcatcacctcaggccaggtgcagtggctcacgcctatgatcccagcactttgggaggctgaggcgggtggatcacctgaggttaggagttcgagaccagcctggccaacatggtaaaaccccatctctactaaaaatacagaaattagccgggcgtggtggcgggcacctatagtcccagctactcagaagcctgaggctgggaaatcgtttgaacccgggaagcggaggttgcagggagccgagatcacgccactgcactccagcctgggcgacagagcgagagtctgtctcaaaagaaaaaaaaaagcaccgcctccaaatgccaacttgtccttttgtaccatggtgtgaaagtcagatgcccagagggcccaggcaggccaccatattcagtgctgtggcctgggcaagataacgcacttctaactagaaatctgccaattttttaaaaaagtaagtaccactcaggccaacaagccaacgacaaagccaaactctgccagccacatccaaccccccacctgccatttgcaccctccgccttcactccggtgtgcctgcagccccgcgcctccttccttgctgtcctaggccacaccatctcctttcagggaatttcaggaactagagatgactgagtcctcgtagccatctctctactcctacctcagcctagaccctcctcctcccccagaggggtgggttcctcttccccactccccaccttcaattcctgggccccaaacgggctgccctgccactttggtacatggccagtgtgatcccaagtgccagtcttgtgtctgcgtctgtgttgcgtgtcgtgggtgtgtgtagccaaggtcggtaagttgaatggcctgccttgaagccactgaagctgggattcctccccattagagtcagccttccccctcccagggccagggccctgcagaggggaaaccagtgtagccttgcccggattctgggaggaagcaggttgaggggctcctggaaaggctcagtctcaggagcatggggataaaggagaaggcatgaaattgtctagcagagcaggggcagggtgataaattgttgataaattccactggacttgagcttggcagctgaactattggagggtgggagagcccagccattaccatggagacaagaagggttttccaccctggaatcaagatgtcagactggctggctgcagtgacgtgcacctgtactcaggaggctgaggggaggatcactggagcccaggagtttgaggctgcagcgagctatgatcgcgccactacactccagcctgagcaacagagtgagaccctgtctcttaaagaaaaaaaaagtcagactgctgggactggccaggtttctgcccacattggacccacatgaggacatgatggagcgcacctgccccctggtggacagtcctgggagaacctcaggcttccttggcatcacagggcagagccgggaagcgatgaatttggagactctgtggggccttggttcccttgtgtgtgtgtgttgatcccaagacaatgaaagtttgcactgtatgctggacggcattcctgcttatcaataaacctgtttgttttaaaaaaaa

SEQ ID NO: 898 - protein, 461 aa, Homo sapien
MAPVAVWAALAVGLELWAAAHALPAQVAFTPYAPEPGSTCRLREYYDQTAQMCCSKCSPGQHAKVFCTKTSDTVCDSCEDSTYTQLWNWVPECLSCGSRCSSDQVETQACTREQNRICTCRPGWYCALSKQEGCRLCAPLRKCRPGFGVARPGTETSDVVCKPCAPGTFSNTTSSTDICRPHQICNVVAIPGNASMDAVCTSTSPTRSMAPGAVHLPQPVSTRSQHTQPTPEPSTAPSTSFLLPMGPSPPAEGSTGDFALPVGLIVGVTALGLLIIGVVNCVIMTQVKKKPLCLQREAKVPHLPADKARGTQGPEQQHLLITAPSSSSSSLESSASALDRRAPTRNQPQAPGVEASGAGEARASTGSSDSSPGGHGTQVNVTCIVNVCSSSDHSSQCSSQASSTMGDTDSSPSESPKDEQVPFSKEECAFRSQLETPETLLGSTEEKPLPLGVPDAGMKPS

SEQ ID NO: 899 - DNA, 6906 bp, Homo sapien
ggcgcgggcggcctggagccccgggagcggcgcgcgcggtcccggcccagccggctctcctggcctcgcgctgcacattctctcctggcggcggcgccacctgcagtagcgttcgcccgaacatggcgacacggagcagcaggagggagtcgcgactcccgttcctattcaccctggtcgcactgctgccgcccggagctctctgcgaagtctggacgcagaggctgcacggcggcagcgcgcccttgccccaggaccggggcttcctcgtggtgcagggcgacccgcgcgagctgcggctgtgggcgcgcggggatgccaggggggcgagccgcgcggacgagaagccgctccggaggaaacggagcgctgccctgcagcccgagcccatcaaggtgtacggacaggttagtctgaatgattcccacaatcagatggtggtgcactgggctggagagaaaagcaacgtgatcgtggccttggcccgagatagcctggcattggcgaggcccaagagcagtgatgtgtacgtgtcttacgactatggaaaatcattcaagaaaatttcagacaagttaaactttggcttgggaaataggagtgaagctgttatcgcccagttctaccacagccctgcggacaacaagcggtacatctttgcagacgcttatgcccagtacctctggatcacgtttgacttctgcaacactcttcaaggcttttccatcccatttcgggcagctgatctcctcctacacagtaaggcctccaaccttctcttgggctttgacaggtcccaccccaacaagcagctgtggaagtcagatgactttggccagacctggatcatgattcaggaacatgtcaagtccttttcttggggaattgatccctatgacaaaccaaataccatctacattgaacgacacgaaccctctggctactccactgtcttccgaagtacagatttcttccagtcccgggaaaaccaggaagtgatccttgaggaagtgagagattttcagcttcgggacaagtacatgtttgctacaaaggtggtgcatctcttgggcagtgaacagcagtcttctgtccagctctgggtctcctttggccggaagcccatgagagcagcccagtttgtcacaagacatcctattaatgaatattacatcgcagatgcctccgaggaccaggtgtttgtgtgtgtcagccacagtaacaaccgcaccaatttatacatctcagaggcagaggggctgaagttctccctgtccttggagaacgtgctctattacagcccaggaggggccggcagtgacaccttggtgaggtattttgcaaatgaaccatttgctgacttccaccgagtggaaggattgcaaggagtctacattgctactctgattaatggttctatgaatgaggagaacatgagatcggtcatcacctttgacaaagggggaacctgggagtttcttcaggctccagccttcacgggatatggagagaaaatcaattgtgagctttcccagggctgttcccttcatctggctcagcgcctcagtcagctcctcaacctccagctccggagaatgcccatcctgtccaaggagtcggctccaggcctcatcatcgccactggctcagtgggaaagaacttggctagcaagacaaacgtgtacatctctagcagtgctggagccaggtggcgagaggcacttcctggacctcactactacacatggggagaccacggcggaatcatcacggccattgcccagggcatggaaaccaacgagctaaaatacagtaccaatgaaggggagacctggaaaacattcatcttctctgagaagccagtgtttgtgtatggcctcctcacagaacctggggagaagagcactgtcttcaccatctttggctcgaacaaagagaatgtccacagctggctgatcctccaggtcaatgccacggatgccttgggagttccctgcacagagaatgactacaagctgtggtcaccatctgatgagcgggggaatgagtgtttgctgggacacaagactgttttcaaacggcggaccccccatgccacatgcttcaatggagaggactttgacaggccggtggtcgtgtccaactgctcctgcacccgggaggactatgagtgtgacttcggtttcaagatgagtgaagatttgtcattagaggtttgtgttccagatccggaattttctggaaagtcatactcccctcctgtgccttgccctgtgggttctacttacaggagaacgagaggctaccggaagatttctggggacacttgtagcggaggagatgttgaagcgcgactggaaggagagctggtcccctgtcccctggcagaagagaacgagttcattctgtatgctgtgaggaaatccatctaccgctatgacctggcctcgggagccaccgagcagttgcctctcaccgggctacgggcagcagtggccctggactttgactatgagcacaactgtttgtattggtccgacctggccttggacgtcatccagcgcctctgtttgaatggaagcacagggcaagaggtgatcatcaattctggcctggagacagtagaagctttggcttttgaacccctcagccagctgctttactgggtagatgcaggcttcaaaaagattgaggtagctaatccagatggcgacttccgactcacaatcgtcaattcctctgtgcttgatcgtcccagggctctggtcctcgtgccccaagagggggtgatgttctggacagactggggagacctgaagcctgggatttatcggagcaatatggatggttctgctgcctatcacctggtgtctgaggatgtgaagtggcccaatggcatctctgtggacgaccagtggatttactggacggatgcctacctggagtgcatagagcggatcacgttcagtggccagcagcgctctgtcattctggacaacctcccgcacccctatgccattgctgtctttaagaatgaaatctactgggatgactggtcacagctcagcatattccgagcttccaaatacagtgggtcccagatggagattctggcaaaccagctcacggggctcatggacatgaagattttctacaaggggaagaacactggaagcaatgcctgtgtgcccaggccatgcagcctgctgtgcctgcccaaggccaacaacagtagaagctgcaggtgtccagaggatgtgtccagcagtgtgcttccatcaggggacctgatgtgtgactgccctcagggctatcagctcaagaacaatacctgtgtcaaagaagagaacacctgtcttcgcaaccagtatcgctgcagcaacgggaactgtatcaacagcatttggtggtgtgactttgacaacgactgtggagacatgagcgatgagagaaactgccctaccaccatctgtgacctggacacccagtttcgttgccaggagtctgggacttgtatcccactgtcctataaatgtgaccttgaggatgactgtggagacaacagtgatgaaagtcattgtgaaatgcaccagtgccggagtgacgagtacaactgcagttccggcatgtgcatccgctcctcctgggtatgtgacggggacaacgactgcagggactggtctgatgaagccaactgtaccgccatctatcacacctgtgaggcctccaacttccagtgccgaaacgggcactgcatcccccagcggtgggcgtgtgacggggatacggactgccaggatggttccgatgaggatccagtcaactgtgagaagaagtgcaatggattccgctgcccaaacggcacttgcatcccatccagcaaacattgtgatggtctgcgtgattgctctgatggctccgatgaacagcactgcgagcccctctgtacgcacttcatggactttgtgtgtaagaaccgccagcagtgcctgttccactccatggtctgtgacggaatcatccagtgccgcgacgggtccgatgaggatgcggcgtttgcaggatgctcccaagatcctgagttccacaaggtatgtgatgagttcggtttccagtgtcagaatggagtgtgcatcagtttgatttggaagtgcgacgggatggatgattgcggcgattattctgatgaagccaactgcgaaaaccccacagaagccccaaactgctcccgctacttccagtttcggtgtgagaatggccactgcatccccaacagatggaaatgtgacagggagaacgactgtggggactggtctgatgagaaggattgtggagattcacatattcttcccttctcgactcctgggccctccacgtgtctgcccaattactaccgctgcagcagtgggacctgcgtgatggacacctgggtgtgcgacgggtaccgagattgtgcagatggctctgacgaggaagcctgccccttgcttgcaaacgtcactgctgcctccactcccacccaacttgggcgatgtgaccgatttgagttcgaatgccaccaaccgaagacgtgtattcccaactggaagcgctgtgacggccaccaagattgccaggatggccgggacgaggccaattgccccacacacagcaccttgacttgcatgagcagggagttccagtgcgaggacggggaggcctgcattgtgctctcggagcgctgcgacggcttcctggactgctcggacgagagcgatgaaaaggcctgcagtgatgagttgactgtgtacaaagtacagaatcttcagtggacagctgacttctctggggatgtgactttgacctggatgaggcccaaaaaaatgccctctgcttcttgtgtatataatgtctactacagggtggttggagagagcatatggaagactctggagacccacagcaataagacaaacactgtattaaaagtcttgaaaccagataccacgtatcaggttaaagtacaggttcagtgtctcagcaaggcacacaacaccaatgactttgtgaccctgaggaccccagagggattgccagatgcccctcgaaatctccagctgtcactccccagggaagcagaaggtgtgattgtaggccactgggctcctcccatccacacccatggcctcatccgtgagtacattgtagaatacagcaggagtggttccaagatgtgggcctcccagagggctgctagtaactttacagaaatcaagaacttattggtcaacactctatacaccgtcagagtggctgcggtgactagtcgtggaataggaaactggagcgattctaaatccattaccaccataaaaggaaaagtgatcccaccaccagatatccacattgacagctatggtgaaaattatctaagcttcaccctgaccatggagagtgatatcaaggtgaatggctatgtggtgaaccttttctgggcatttgacacccacaagcaagagaggagaactttgaacttccgaggaagcatattgtcacacaaagttggcaatctgacagctcatacatcctatgagatttctgcctgggccaagactgacttgggggatagccctctggcatttgagcatgttatgaccagaggggttcgcccacctgcacctagcctcaaggccaaagccatcaaccagactgcagtggaatgtacctggaccggcccccggaatgtggtttatggtattttctatgccacgtcctttcttgacctctatcgcaacccgaagagcttgactacttcactccacaacaagacggtcattgtcagtaaggatgagcagtatttgtttctggtccgtgtagtggtaccctaccaggggccatcctctgactacgttgtagtgaagatgatcccggacagcaggcttccaccccgtcacctgcatgtggttcatacgggcaaaacctccgtggtcatcaagtgggaatcaccgtatgactctcctgaccaggacttgttgtatgcaattgcagtcaaagatctcataagaaagactgacaggagctacaaagtaaaatcccgtaacagcactgtggaatacacccttaacaagttggagcctggcgggaaataccacatcattgtccaactggggaacatgagcaaagattccagcataaaaattaccacagtttcattatcagcacctgatgccttaaaaatcataacagaaaatgatcatgttcttctgttttggaaaagcctggctttaaaggaaaagcattttaatgaaagcaggggctatgagatacacatgtttgatagtgccatgaatatcacagcttaccttgggaatactactgacaatttctttaaaatttccaacctgaagatgggtcataattacacgttcaccgtccaagcaagatgcctttttggcaaccagatctgtggggagcctgccatcctgctgtacgatgagctggggtctggtgcagatgcatctgcaacgcaggctgccagatctacggatgttgctgctgtggtggtgcccatcttattcctgatactgctgagcctgggggtggggtttgccatcctgtacacgaagcaccggaggctgcagagcagcttcaccgccttcgccaacagccactacagctccaggctggggtccgcaatcttctcctctggggatgacctgggggaagatgatgaagatgcccctatgataactggattttcagatgacgtccccatggtgatagcctgaaagagctttcctcactagaaaccaaatggtgtaaatattttatttgataaagatagttgatggtttattttaaaagatgcactttgagttgcaatatgttatttttatatgggccaaaaacaaaaaacaaaaaaaaaaa

SEQ ID NO: 900 - protein, 2000 aa, Homo sapien
MATRSSRRESRLPFLFTLVALLPPGALCEVWTQRLHGGSAPLPQDRGFLVVQGDPRELRLWARGDARGASRADEKPLRRKRSAALQPEPIKVYGQVSLNDSHNQMVVHWAGEKSNVIVALARDSLALARPKSSDVYVSYDYGKSFKKISDKLNFGLGNRSEAVIAQFYHSPADNKRYIFADAYAQYLWITFDFCNTLQGFSIPFRAADLLLHSKASNLLLGFDRSHPNKQLWKSDDFGQTWIMIQEHVKSFSWGIDPYDKPNTIYIERHEPSGYSTVFRSTDFFQSRENQEVILEEVRDFQLRDKYMFATKVVHLLGSEQQSSVQLWVSFGRKPMRAAQFVTRHPINEYYIADASEDQVFVCVSHSNNRTNLYISEAEGLKFSLSLENVLYYSPGGAGSDTLVRYFANEPFADFHRVEGLQGVYIATLINGSMNEENMRSVITFDKGGTWEFLQAPAFTGYGEKINCELSQGCSLHLAQRLSQLLNLQLRRMPILSKESAPGLIIATGSVGKNLASKTNVYISSSAGARWREALPGPHYYTWGDHGGIITAIAQGMETNELKYSTNEGETWKTFIFSEKPVFVYGLLTEPGEKSTVFTIFGSNKENVHSWLILQVNATDALGVPCTENDYKLWSPSDERGNECLLGHKTVFKRRTPHATCFNGEDFDRPVVVSNCSCTREDYECDFGFKMSEDLSLEVCVPDPEFSGKSYSPPVPCPVGSTYRRTRGYRKISGDTCSGGDVEARLEGELVPCPLAEENEFILYAVRKSIYRYDLASGATEQLPLTGLRAAVALDFDYEHNCLYWSDLALDVIQRLCLNGSTGQEVIINSGLETVEALAFEPLSQLLYWVDAGFKKIEVANPDGDFRLTIVNSSVLDRPRALVLVPQEGVMFWTDWGDLKPGIYRSNMDGSAAYHLVSEDVKWPNGISVDDQWIYWTDAYLECIERITFSGQQRSVILDNLPHPYAIAVFKNEIYWDDWSQLSIFRASKYSGSQMEILANQLTGLMDMKIFYKGKNTGSNACVPRPCSLLCLPKANNSRSCRCPEDVSSSVLPSGDLMCDCPQGYQLKNNTCVKEENTCLRNQYRCSNGNCINSIWWCDFDNDCGDMSDERNCPTTICDLDTQFRCQESGTCIPLSYKCDLEDDCGDNSDESHCEMHQCRSDEYNCSSGMCIRSSWVCDGDNDCRDWSDEANCTAIYHTCEASNFQCRNGHCIPQRWACDGDTDCQDGSDEDPVNCEKKCNGFRCPNGTCIPSSKHCDGLRDCSDGSDEQHCEPLCTHFMDFVCKNRQQCLFHSMVCDGIIQCRDGSDEDAAFAGCSQDPEFHKVCDEFGFQCQNGVCISLIWKCDGMDDCGDYSDEANCENPTEAPNCSRYFQFRCENGHCIPNRWKCDRENDCGDWSDEKDCGDSHILPFSTPGPSTCLPNYYRCSSGTCVMDTWVCDGYRDCADGSDEEACPLLANVTAASTPTQLGRCDRFEFECHQPKTCIPNWKRCDGHQDCQDGRDEANCPTHSTLTCMSREFQCEDGEACIVLSERCDGFLDCSDESDEKACSDELTVYKVQNLQWTADFSGDVTLTWMRPKKMPSASCVYNVYYRVVGESIWKTLETHSNKTNTVLKVLKPDTTYQVKVQVQCLSKAHNTNDFVTLRTPEGLPDAPRNLQLSLPREAEGVIVGHWAPPIHTHGLIREYIVEYSRSGSKMWASQRAASNFTEIKNLLVNTLYTVRVAAVTSRGIGNWSDSKSITTIKGKVIPPPDIHIDSYGENYLSFTLTMESDIKVNGYVVNLFWAFDTHKQERRTLNFRGSILSHKVGNLTAHTSYEISAWAKTDLGDSPLAFEHVMTRGVRPPAPSLKAKAINQTAVECTWTGPRNVVYGIFYATSFLDLYRNPKSLTTSLHNKTVIVSKDEQYLFLVRVVVPYQGPSSDYVVVKMIPDSRLPPRHLHVVHTGKTSVVIKWESPYDSPDQDLLYAIAVKDLIRKTDRSYKVKSRNSTVEYTLNKLEPGG

SEQ ID NO: 901 - DNA, 1292 bp, Homo sapien
taaaaacccactgtttgagaatgatgctactctgatctaatgaatgtgaacgtgtagatgttttgtgtgtatttttttaaatgaaaactcaaaataagacaagtaatttgttgataaatatttttaaagataactcagcatgtttgtaaagcaggatacattttactaaaaggttcattggttccaatcacagctcataggtagagcaaagaaagggtggatggattgaaaagattagcctctgtctcggtggcaggttcccacctcgcaagcaattggaaacaaaacttttggggagttttattttgcattagggtgtgttttatgttaagcaaaacatactttagaagcaaatgaaaaaggcaattgaaaatcccagctatttcacctagatggaatagccaccctgagcagaactttgtgatgcttcattctgtggaattttgtgcttactactgtatagtgcatgtggtgtaggttactctaactggttttgtcgacgtaaacatttaaagtgttatattttttataaaaatgtttatttttaatgatatgagaaaaattttgttaggccacaaaaacactgcactgtgaacattttagaaaaggtatgtcagactgggattaatgacagcatgattttcaatgactgtaaattgcgataaggaaatgtactgattgccaatacaccccaccctcattacatcatcaggacttgaagccaagggttaacccagcaagctacaaagagggtgtgtcacactgaaactcaatagttgagtttggctgttgttgcaggaaaatgattataactaaaagctctctgatagtgcagagacttaccagaagacacaaggaattgtactgaagagctattacaatccaaatattgccgtttcataaatgtaataagtaatactaattcacagagtattgtaaatggtggatgacaaaagaaaatctgctctgtggaaagaaagaactgtctctaccagggtcaagagcatgaacgcatcaatagaaagaactcggggaaacatcccatcaacaggactacacacttgtatatacattcttgagaacactgcaatgtgaaaatcacgtttgctatttataaacttgtccttagattaatgtgtctggacagattgtgggagtaagtgattcttctaagaattagatacttgtcactgcctatacctgcagctgaactgaatggtacttcgtatgttaatagttgttctgataaatcatgcaattaaagtaaagtgatgcaacatcttgtatactga

SEQ ID NO: 902 - protein, 6 aa, Homo sapien
MQHLVY

SEQ ID NO: 903 - DNA, 7752 bp, Homo sapien
gatggctgcagaggaaggggtcgcgagtgctgcttccgccggcggtagctggggcaccgcggccatggggcgggttctaccgatgctgttggtgccagtccccgccgaggcgatggggcagctcggctcccgggcgcagctgcgcacacagccggaggctctggggagcctgacggctgcgggcagcctccaagtgctttctttgacgcctggcagccggggcgggggtcgctgctgcctggagggccccttctggcactttctatgggaggattctcgtaacagcagcacaccaactgaaaagcccaaactgctcgctcttggtgaaaattatgaactgcttatctatgaatttaatttgaaagatggaagatgtgatgcaaccattttgtatagctgtagtagggaggcattgcaaaagctcattgacgatcaagatatcagtatttccttattgtctttgagaatcctgtcatttcacaataacacatcattactgttcatcaacaaatgtgtcatcctacatattatatttcctgaaagagatgctgcaattagagtactcaactgtttcacacttcccttgcctgcacaggcagtggacatgattattgacacgcagctctgcagaggaattctttttgttttgagtagtttaggctggatctacatttttgatgttgtggatggtacatatgtagctcatgtggatttagcacttcacaaagaagacatgtgtaatgagcagcaacaggagccagccaagatttcttcatttacttcactgaaagtttctcaagacctcgatgttgcagtgattgtcagctcctccaactccgcagttgctcttaacttaaatttgtatttcaggcaacacccaggacacctactgtgtgaaagaatactagaagatcttcctattcaaggacctaagggcgtagatgaagatgatcctgttaactctgcctacaacatgaaactggccaagttttccttccaaattgataggtcttggaaagcccagctatcatcattgaatgaaacaataaagaactccaaactggaggtttcctgttgtgctccatggttccaggatattttgcatttggagtcacctgaatctggtaaccacagtacaagtgtgcagagctgggccttcattccacaggacataatgcatgggcaatataatgttctacagaaagatcatgccaagaccagtgatccaggaagatcatggaaaataatgcacatcagtgaacaagaggaacccatagagcttaaatgtgtgtctgtgacaggattcactgcactgtttacttgggaagtggaaaggatgggctataccattaccctctgggatttggagacccagggcatgcagtgttcttcccttggcacaaagtgtattcctgtagacagtagtggagaccagcagctgtgctttgttttgacagagaatggactctctctgattttgtttggtttgactcaagaagagtttttaaacagactcatgatccatggaagtgccagcactgtggacactctttgtcatctcaatggctggggaaggtgctcaattcccatacatgcactagaggccgggatagaaaatcgtcagctggacacagtaaatttctttttgaagagcaaggaaaatctttttaatccatcctcaaaatcttctgtatctgatcagtttgatcacttgtcatcccatttatatttaagaaatgtggaagagctgataccagcattggatttactttgctcggcaattagagaaagttattctgaaccccaaagcaaacacttttcagaacaattgcttaatcttacactgtctttccttaacaaccaaataaaggagcttttcattcacactgaagaactagatgaacatctgcaaaaaggagtgaacattttgactagctacattaatgaacttcgaaccttcatgataaagtttccttggaagctaacagatgctatagatgaatatgatgtacatgaaaatgtccccaaagtaaaggagagcaatatatggaagaaactcagctttgaggaagttattgccagcgccattttaaacaacaaaataccagaggcacagactttcttcaggattgatagtcattctgctcaaaaacttgaggagcttattggcataggcctaaatttggtctttgacaatttaaaaaagaacaatataaaggaagcctctgaacttttgaagaatatggggtttgatgtaaaaggccaattgctcaagatctgcttctatacaactaataaaaatatacgtgactttttggttgaaattttaaaagaaaaaaattatttttctgaaaaagagaaaagaactatagacttcgtgcatcaagttgagaagctttatttgggacatttccaagaaaatatgcaaatccagtcatttcccaggtactggataaaggaacaagattttttcaagcacaagtctgttttggactcattcctgaaatatgattgtaaagatgaatttaacaaacaggaccatagaattgtgttaaattgggctctgtggtgggatcaactaacacaagaatccatccttctccccaggataagtccagaagaatacaaatcatattcccctgaagccctctggagatacctcacagctcgccatgattggttaaacattatcttatggattggagaatttcaaacccagcatagttatgcttcacttcagcagaacaaatggccccttctgactgttgatgttattaaccagaatacttcctgtaacaactacatgaggaatgaaattttagataagctggccaggaatggggtttttttggcatctgaactggaagactttgaatgcttcctcctaagactgagccgtattggaggtgtaatacaggataccctccctgttcaaaactacaagaccaaagaaggttgggatttccattctcaattcattctctattgtttggagcacagtctgcagcatcttctttatgtctaccttgactgttacaaacttagtcctgaaaattgtccctttttggaaaaaaaagagttacatgaagcacacccttggtttgaatttttagttcagtgtcgacaagttgccagtaacttaacagatcccaaactgatcttccaggctagccttgcaaatgctcagattttgattcccaccaatcaggccagtgtaagcagtatgctattggaaggacataccctcctggcccttgctactacaatgtattctcctgggggtgtcagtcaggttgttcagaatgaagaaaatgaaaactgtttgaagaaagtggatccccagctattgaagatggcattaactccttaccccaagctaaaaactgctctcttcccacagtgcactcctcctagtgtcctgccatctgatattacaatctaccaccttattcagtcattatcaccctttgatcctagcagattgtttggctggcagtctgctaacacactagctataggagatgcatggagtcatctcccacatttctctagccctgacctggttaataaatatgctatagtggaacgtctgaattttgcttattatttacataatgggcggccatcatttgcatttggtacttttctggtccaggaattaatcaagagcaagactcccaagcagctgatccagcaagtaggcaatgaagcctatgttatagggctctcctccttccacataccttcaataggagctgcatgtgtttgtttcttagaattgcttggccttgacagcctcaagctcagagttgatatgaaagtggccaatataattttgagctacaagtgcagaaatgaagatgctcagtacagctttatcagagagtctgtagccgaaaaactatctaaactagctgatggtgaaaagacaaccacagaagaattgcttgttctcttagaagaaggtacatggaacagcattcagcaacaggaaataaagaggttatccagtgaatctagcagccaatgggcattagtggtgcagttctgcaggctacacaatatgaaactaagcatatcttaccttagagaatgtgccaaagcaaatgattggctgcagttcattattcacagccaactccacaactaccacccagcagaggtgaaatcccttatccagtacttcagcccagtcattcaagaccacttaaggctggcttttgagaacttgccctcagtgcccacctccaaaatggacagcgatcaagtctgcaataagtgcccccaggaacttcaaggaagcaaacaagagatgaccgatttatttgaaattctgctccaatgctcagaggagccagactcctggcactggcttctggttgaagcagtgaaacaacaggcccctatcctcagtgttctggcctcatgtctccagggtgccagtgccatttcttgtctctgtgtttggatcatcacttctgtggaggacaatgttgcaactgaagcaatgggacacattcaggactcaacagaggaccatacctggaaccttgaggatctttcagtcatctggagaacattattaacaagacaaaagagcaaaactctcatcagaggtttccagcttttctttaaggattccccgttactactggtgatggagatgtatgaactgtgtatgttcttcaggaattataaagaagctgaagctaaacttctggagtttcagaagagccttgaaacgcttaacacagcagccacaaaggtccaccctgtcatccctgccatgtggctggaggatcaggtgtgtttccttttgaagcttatgctacagcagtgtaagacccagtatgagctggggaagcttttacagctctttgttgaaagagagcatctcttctctgatggtccagatgtgaaaaagctttgcatcctttgccagattttgaaggatacatccatagccattaatcatacaattattaccagctacagcattgagaatcttcagcatgaatgtagatctattttggaaagactgcagacagatggacaattcgctttggccaggagggtagcagaattagctgagttacctgtggacaacttggttattaaagagataacacaggaaatgcagaccctaaaacacattgaacagtggtcactaaaacaagcaagaattgacttctggaaaaaatgccatgagaattttaagaaaaattcaatttcaagcaaagcagcttcttcctttttctcaacccaggcccatgtggcatgtgagcacccaactggatggagcagcatggaggagcgccatctgctgctcaccttggcagggcactggcttgcccaggaggacgtggtgcccttggataagctggaggagctggagaagcagatctggctgtgccgcatcacccagcacactcttggaagaaatcaggaggaaacagagcccagattttctcgacagatctcaactagtggtgaactttcctttgatagtttagccagtgagttttccttctccaagttggctgctctgaacacatcaaaatacttagaacttaacagccttccatccaaagagacatgcgagaatagattggattggaaagagcaggagtcactaaactttttgattgggcgcctactggatgatggctgtgtgcatgaagcaagtagagtatgccggtattttcatttttataatccagatgtcgccttggtattgcactgcagagcactggcctcaggggaagctagtatggaggatctgcacccagagatccatgctctcctacaaagtgctgagctgcttgaggaagaagcacccgacattcccctaaggagagtccacagcacttcaagtctggatagtcagaagtttgtgacagtgccctccagtaatgaagtggtaactaacctggaagtgctgacaagcaaatgcctccatgggaagaactactgtcgacaggtcctctgtctgtatgatcttgccaaggagttgggctgttcctacacagatgttgctgctcaggatggtgaagccatgctccggaaaatcttggcctctcagcagcctgaccgatgcaaacgagcccaggccttcatcagcacacagggccttaagccagatactgtggctgaactcgtggcagaagaggtgacacgggagctgcttacttcatcacagggaacaggacataagcagatgttcaacccaacagaggaaagccagacatttcttcagctgaccactctgtgtcaagaccgcacattggtaggcatgaagttgttggataagatttcctccgttccccatggggaactgtcttgcaccacagagctcctgatcctggcccatcattgcttcaccctgacgtgccacatggagggcatcatccgagtcctacaggccgcccacatgctcacagataaccacctggcccccagtgaggagtatgggctggtggtacggctcctcactggcattggaaggtacaacgagatgacatacatatttgatttgctgcataaaaagcactactttgaagtgctaatgaggaagaagttggatccgagtggtaccctgaaaacagccctgctggactacatcaaacgctgccgtcctggagacagtgaaaagcacaatatgattgccctgtgcttcagcatgtgccgggagattggcgagaaccacgaggcagctgcccgcatccaactgaaattgattgagtctcagccctgggaggacagcctcaaggatgggcaccagctgaaacaactgctgctgaaggccctgactctgatgttggatgcagcagagagttatgccaaggactcctgtgtgcgacaggcccagcactgtcagcggctcaccaagttgataactctgcagattcactttctgaacactggccagaacacaatgctcatcaacttgggccgccacaagctgatggactgtattctggccctacctcggttctaccaggcttctattgtggctgaggcctacgattttgttccagattgggctgaaattttataccagcaagtgattcttaaaggagactttaattacttggaagaatttaagcagcaaaggttattaaagtccagtatatttgaagagatttccaaaaaatataaacaacatcagcctactgacatggtcatggaaaacctgaagaaattactcacatattgtgaagatgtttacctgtattacaagttggcatacgaacacaagttttatgaaattgtaaatgtgcttctgaaggaccctcagacaggttgctgtctaaaggacatgctagcaggttagatgatttcataggtgtctgttttcttgtactgttagcagattctgacagatgtgatgagaagaagaatgcattggagatctttgctaaagttgaacaatcccggtactgtaccatatcagtcctttgtgggtagtaggtagcaagtaagaaacttttcaggaggaaattcctatttaaaatagattgattttagatgattgttcatccacaccattttatatagatactagtattaagatcaaaagcttcctcttcctcaggacagcttctactttagatgatccaataatgattaaagaatacctgtacctgcagattccagtttcaaagaaatttaattattatttacacagttaaggaacaggtgatacattttcatttgttagaaactgatctttctgtaataaaatagattttc

SEQ ID NO: 904 - protein, 2000 aa, Homo sapien
MAAEEGVASAASAGGSWGTAAMGRVLPMLLVPVPAEAMGQLGSRAQLRTQPEALGSLTAAGSLQVLSLTPGSRGGGRCCLEGPFWHFLWEDSRNSSTPTEKPKLLALGENYELLIYEFNLKDGRCDATILYSCSREALQKLIDDQDISISLLSLRILSFHNNTSLLFINKCVILHIIFPERDAAIRVLNCFTLPLPAQAVDMIIDTQLCRGILFVLSSLGWIYIFDVVDGTYVAHVDLALHKEDMCNEQQQEPAKISSFTSLKVSQDLDVAVIVSSSNSAVALNLNLYFRQHPGHLLCERILEDLPIQGPKGVDEDDPVNSAYNMKLAKFSFQIDRSWKAQLSSLNETIKNSKLEVSCCAPWFQDILHLESPESGNHSTSVQSWAFIPQDIMHGQYNVLQKDHAKTSDPGRSWKIMHISEQEEPIELKCVSVTGFTALFTWEVERMGYTITLWDLETQGMQCSSLGTKCIPVDSSGDQQLCFVLTENGLSLILFGLTQEEFLNRLMIHGSASTVDTLCHLNGWGRCSIPIHALEAGIENRQLDTVNFFLKSKENLFNPSSKSSVSDQFDHLSSHLYLRNVEELIPALDLLCSAIRESYSEPQSKHFSEQLLNLTLSFLNNQIKELFIHTEELDEHLQKGVNILTSYINELRTFMIKFPWKLTDAIDEYDVHENVPKVKESNIWKKLSFEEVIASAILNNKIPEAQTFFRIDSHSAQKLEELIGIGLNLVFDNLKKNNIKEASELLKNMGFDVKGQLLKICFYTTNKNIRDFLVEILKEKNYFSEKEKRTIDFVHQVEKLYLGHFQENMQIQSFPRYWIKEQDFFKHKSVLDSFLKYDCKDEFNKQDHRIVLNWALWWDQLTQESILLPRISPEEYKSYSPEALWRYLTARHDWLNIILWIGEFQTQHSYASLQQNKWPLLTVDVINQNTSCNNYMRNEILDKLARNGVFLASELEDFECFLLRLSRIGGVIQDTLPVQNYKTKEGWDFHSQFILYCLEHSLQHLLYVYLDCYKLSPENCPFLEKKELHEAHPWFEFLVQCRQVASNLTDPKLIFQASLANAQILIPTNQASVSSMLLEGHTLLALATTMYSPGGVSQVVQNEENENCLKKVDPQLLKMALTPYPKLKTALFPQCTPPSVLPSDITIYHLIQSLSPFDPSRLFGWQSANTLAIGDAWSHLPHFSSPDLVNKYAIVERLNFAYYLHNGRPSFAFGTFLVQELIKSKTPKQLIQQVGNEAYVIGLSSFHIPSIGAACVCFLELLGLDSLKLRVDMKVANIILSYKCRNEDAQYSFIRESVAEKLSKLADGEKTTTEELLVLLEEGTWNSIQQQEIKRLSSESSSQWALVVQFCRLHNMKLSISYLRECAKANDWLQFIIHSQLHNYHPAEVKSLIQYFSPVIQDHLRLAFENLPSVPTSKMDSDQVCNKCPQELQGSKQEMTDLFEILLQCSEEPDSWHWLLVEAVKQQAPILSVLASCLQGASAISCLCVWIITSVEDNVATEAMGHIQDSTEDHTWNLEDLSVIWRTLLTRQKSKTLIRGFQLFFKDSPLLLVMEMYELCMFFRNYKEAEAKLLEFQKSLETLNTAATKVHPVIPAMWLEDQVCFLLKLMLQQCKTQYELGKLLQLFVEREHLFSDGPDVKKLCILCQILKDTSIAINHTIITSYSIENLQHECRSILERLQTDGQFALARRVAELAELPVDNLVIKEITQEMQTLKHIEQWSLKQARIDFWKKCHENFKKNSISSKAASSFFSTQAHVACEHPTGWSSMEERHLLLTLAGHWLAQEDVVPLDKLEELEKQIWLCRITQHTLGRNQEETEPRFSRQISTSGELSFDSLASEFSFSKLAALNTSKYLELNSLPSKETCENRLDWKEQESLNFLIGRLLDDGCVHEASRVCRYFHFYNPDVALVLHCRALASGEASMEDLHPEIHALLQSAELLEEEAPDIPLRRVHSTSSLDSQKFVTVPSSNEVVTNLEVLTSKCLHGKNYCRQVLCLYDL

SEQ ID NO: 905 - DNA, 1270 bp, Homo sapien
ggcacgaggctgcgccggaagtccctagccaggcctggcggtaaccttgggggcctcactgcagccgccgctgctgttggagtgggctttgcgagtctgaacgttggcggggctaggctcgttaactgccgagagcctccgggtttgcggtggaggacgctgaggcccgtggggggcaggcacccgggcgccgggcctcccagccgacatgtctctagtggcggaagccttcgtctcccagattgcagctgcagaaccttggcctgaaaatgctacattatatcagcaattgaaaggggagcaaattttactttctgacaatgcagcttctcttgcagtgcaggcctttttgcaaatgtgtaacttgcctatcaaagtagtttgtagggcaaatgcagaatatatgtctccatctggtaaagtaccttttattcatgtgggaaatcaagtagtatcagaacttggtccaatagtccaatttgttaaagccaagggccattctcttagtgatgggctggaggaagtccaaaaagcagaaatgaaagcttacatggaattagtcaacaatatgctgttgactgcagagctgtatcttcagtggtgtgatgaagctacagtaggggagatcactcatgctaggtatggatctccttacccttggcctctgaatcatattttggcctatcaaaaacagtgggaagtcaaacgtaagatgaaagctattggatggggaaagaagactctggaccaggtcttagaggatgtagaccagtgctgtcaagctctctctcaaagactgggaacacaaccgtatttcttcaataagcagcctactgaacttgacgcactggtatttggccatctatacaccattcttaccacacaattgacaaatgatgaactttctgagaaggtgaaaaactatagcaacctccttgctttctgtaggagaattgaacagcactattttgaagatcgtggtaaaggcaggctgtcatagagttatgtgttagtctcaggagtcttaacttttgaaatatgttttacttgaatgttacattagatattggtgtcagaattttaaaaccaaattactgctttttgaaacctcaaattatataatgtatcttatgtatgtgctttatattgttatttgtgtatacattaaaataattctgaattatttaatctgatatgttgtattctgtatcttgaaatttttgtttccttgaaacatgcatgcatttaaaaataaagcttaaacaactgt

SEQ ID NO: 906 - protein, 263 aa, Homo sapien
MSLVAEAFVSQIAAAEPWPENATLYQQLKGEQILLSDNAASLAVQAFLQMCNLPIKVVCRANAEYMSPSGKVPFIHVGNQVVSELGPIVQFVKAKGHSLSDGLEEVQKAEMKAYMELVNNMLLTAELYLQWCDEATVGEITHARYGSPYPWPLNHILAYQKQWEVKRKMKAIGWGKKTLDQVLEDVDQCCQALSQRLGTQPYFFNKQPTELDALVFGHLYTILTTQLTNDELSEKVKNYSNLLAFCRRIEQHYFEDRGKGRLS

SEQ ID NO: 907 - DNA, 13449 bp, Homo sapien
  Unsure 11967, 12008, 12013: Unknown base
gcggccgcgtcgacgcggcggcggcagcggcgtcggctcggggttctccgggagagggggagtgcgcggcggccgcagctgccacaaaccaggtgaagctttgttctaagaatatttgtttcatctagtttatgagtccaaatgatatagactgtaaatgtcacagcagtggtgaaagactgctcggtcatgagcaccgacagtaactcactggcacgtgaatttctgaccgatgtcaaccggctttgcaatgcagtggtccagagggtggaggccagggaggaagaagaggaggagacgcacatggcaacccttggacagtaccttgtccatggtcgaggatttctattacttaccaagctaaattctataattgatcaggcattgacatgtagagaagaactcctgactcttcttctgtctctccttccactggtatggaagatacctgtccaagaagaaaaggcaacagattttaacctaccgctctcagcagatataatcctgaccaaagaaaagaactcaagttcacaaagatccactcaggaaaaattacatttagaaggaagtgccctgtctagtcaggtttctgcaaaagtaaatgtttttcgaaaaagcagacgacagcgtaaaattacccatcgctattctgtaagagatgcaagaaagacacagctctccacctcagattcagaagccaattcagatgaaaaaggcatagcaatgaataagcatagaaggccccatctgctgcatcattttttaacatcgtttcctaaacaagaccaccccaaagctaaacttgaccgcttagcaaccaaagaacagactcctccagatgctatggctttggaaaattccagagagattattccaagacaggggtcaaacactgacattttaagtgagccagctgccttgtctgttatcagtaacatgaacaattctccatttgacttatgtcatgttttgttatctttattagaaaaagtttgtaagtttgacgttaccttgaatcataattctcctttagcagccagtgtagtgcccacactaactgaattcctagcaggctttggggactgctgcagtctgagcgacaacttggagagtcgagtagtttctgcaggttggaccgaagaaccggtggctttgattcaaaggatgctctttcgaacagtgttgcatcttctgtcagtagatgttagtactgcagagatgatgccagaaaatcttaggaaaaatttaactgaattgcttagagcagctttaaaaattagaatatgcctagaaaagcagcctgacccttttgcaccaagacaaaagaaaacactgcaggaggttcaggaagattttgtgttttcaaagtatcgtcatagagcccttcttttacctgagcttttggaaggagttcttcagattctgatctgttgtcttcaaagtgcagcttcaaatcccttctacttcagtcaagccatggatttggttcaagaattcattcagcatcatggatttaatttatttgaaacagcagttcttcaaatggaatggctggttttaagagatggagttcctcccgaggcctcagagcatttgaaagccctaataaatagtgtgatgaaaataatgagcactgtcaaaaaagtgaaatcagagcaacttcatcattcgatgtgtacaagaaaaaggcacagacgatgtgaatattctcattttatgcatcatcaccgagatctctcaggtcttctggtttcggcttttaaaaaccaggtttccaaaaacccatttgaagagactgcagatggagatgtttattatcctgagcggtgctgttgcattgcagtgtgtgcccatcagtgcttgcgcttactacagcaggcttccttgagcagcacttgtgtccagatcctatcgggtgttcataacattggaatatgctgttgtatggatcccaaatctgtaatcattcctttgctccatgcttttaaattgccagcactgaaaaattttcagcagcatatattgaatatccttaacaaacttattttggatcagttaggaggagcagagatatcaccaaaaattaaaaaagcagcttgtaatatttgtactgttgactctgaccaactagcccaattagaagagacactgcagggaaacttatgtgatgctgaactctcctcaagtttatccagtccttcttacagatttcaagggatcctgcccagcagtggatctgaagatttgttgtggaaatgggatgctttaaaggcttatcagaactttgtttttgaagaagacagattacatagtatacagattgcaaatcacatttgcaatttaatccagaaaggcaatatagttgttcagtggaaattatataattacatatttaatcctgtgctccaaagaggagttgaattagcacatcattgtcaacacctaagcgttacttcagctcaaagtcatgtatgtagccatcataaccagtgcttgcctcaggacgtgcttcagatttatgtaaaaactctgcctatcctgcttaaatccagggtaataagagatttgtttttgagttgtaatggagtaagtcaaataatcgaattaaattgcttaaatggtattcgaagtcattctctaaaagcatttgaaactctgataatcagcctaggggagcaacagaaagatgcctcagttccagatattgatgggatagacattgaacagaaggagttgtcctctgtacatgtgggtacttcttttcatcatcagcaagcttattcagattctcctcagagtctcagcaaattttatgctggcctcaaagaagcttatccaaagagacggaagactgttaaccaagatgttcatatcaacacaataaacctattcctctgtgtggcttttttatgcgtaagtaaagaagcagagtctgacagggagtcggccaatgactcagaagatacttctggctatgacagcacagccagcgagcctttaagtcatatgctgccatgtatatctctcgagagccttgtcttgccttctcctgaacatatgcaccaagcagcagacatttggtctatgtgtcgttggatctacatgttgagttcagtgttccagaaacagttttataggcttggtggtttccgagtatgccataagttaatatttatgataatacagaaactgttcagaagtcacaaagaggagcaaggaaaaaaggagggagatacaagtgtaaatgaaaaccaggatttaaacagaatttctcaacctaagagaactatgaaggaagatttattatctttggctataaaaagtgaccccataccatcagaactaggtagtctaaaaaagagtgctgacagtttaggtaaattagagttacagcatatttcttccataaatgtggaagaagtttcagctactgaagccgctcccgaggaagcaaagctatttacaagtcaagaaagtgagacctcacttcaaagtatacgacttttggaagcccttctggccatttgtcttcatggtgccagaactagtcaacagaagatggaattggagttacctaatcagaacttgtctgtggaaagtatattatttgaaatgagggaccatctttcccagtcaaaggtgattgaaacacaactagcaaagccgttatttgatgccctgcttcgagttgccctcgggaattattcagcagattttgaacataatgatgctatgactgagaagagtcatcaatctgcagaagaattgtcatcccagcctggtgatttttcagaagaagctgaggattctcagtgttgtagttttaaacttttagttgaagaagaaggttacgaagcagatagtgaaagcaatcctgaagatggcgaaacccaggatgatggggtagacttaaagtctgaaacagaaggtttcagtgcatcaagcagtccaaatgacttactcgaaaacctcactcaaggggaaataatttatcctgagatttgtatgctggaattaaatttgctttctgctagtaaagccaaacttgatgtgcttgcccatgtatttgagagttttttgaaaattattaggcagaaagaaaagaatgtttttctgctcatgcaacagggaactgtgaaaaatcttttaggagggttcttgagtattttaacacaggatgattctgattttcaagcatgccagagagtattggtggatcttttggtatctttgatgagttcaagaacatgttcagaagagctaacccttcttttgagaatatttctggagaaatctccttgtacaaaaattcttcttctgggtattctgaaaattattgaaagtgatactactatgagcccttcacagtatctaaccttccctttactgcacgctccaaatttaagcaacggtgtttcatcacaaaagtatcctgggattttaaacagtaaggccatgggtttattgagaagagcacgagtttcacggagcaagaaagaggctgatagagagagttttccccatcggctgctttcatcttggcacatagccccagtccacctgccgttgctggggcaaaactgctggccacacctatcagaaggtttcagtgtttccctgtggtttaatgtggagtgtatccatgaagctgagagtactacagaaaaaggaaagaagataaagaaaagaaacaaatcattaattttaccagatagcagttttgatggtacagagagcgacagaccagaaggtgcagagtacataaatcctggtgaaagactcatagaagaaggatgtattcatataatttcactgggatccaaagcgttgatgatccaagtgtgggctgatccccacaatgccactcttatctttcgtgtgtgcatggattcaaatgatgacatgaaagctgttttactagcacaggttgaatcacaggagaatattttcctcccaagcaaatggcaacatttagtactcacctacttacagcagccccaagggaaaaggaggattcatgggaaaatctccatatgggtctctggacagaggaagcctgatgttactttggattttatgcttccaagaaaaacaagtttgtcatctgatagcaataaaacattttgcatgattggccattgtttatcatcccaagaagagtttttgcagttggctggaaaatgggacctgggaaatttgcttctcttcaacggagctaaggttggttcacaagaggccttttatctgtatgcttgtggacccaaccatacatctgtaatgccatgtaagtatggcaagccagtcaatgactactccaaatatattaataaagaaattttgcgatgtgaacaaatcagagaactttttatgaccaagaaagatgtggatattggtctcttaattgaaagtctttcagttgtttatacaacttactgtcctgctcagtataccatctatgaaccagtgattagacttaaaggtcaaatgaaaacccaactctctcaaagacccttcagctcaaaagaagttcagagcatcttattagaacctcatcatctaaagaatctccaacctactgaatataaaactattcaaggcattctgcacgaaattggtggaactggcatatttgtttttctctttgccagggttgttgaactcagtagctgtgaagaaactcaagcattagcactgcgagttatactctcattaattaaatacaaccaacaaagagtacatgaattagaaaattgtaatggactttctatgattcatcaggtgttgatcaaacaaaaatgcattgttgggttttacattttgaagacccttcttgaaggatgctgtggtgaagatattatttatatgaatgagaatggagagtttaagttggatgtagactctaatgctataatccaagatgttaagctgttagaggaactattgcttgactggaagatatggagtaaagcagagcaaggtgtttgggaaactttgctagcagctctagaagtcctcatcagagcagatcaccaccagcagatgtttaatattaagcagttattgaaagctcaagtggttcatcactttctactgacttgtcaggttttgcaggaatacaaagaggggcaactcacacccatgccccgagaggtttgtagatcatttgtgaaaattatagcagaagtccttggatctcctccagatttggaattattgacaattatcttcaatttccttttagcagttcaccctcctactaatacttacgtttgtcacaatcccacgaacttctacttttctttgcacatagatggcaagatctttcaggagaaagtgcggtcaatcatgtacctgaggcattccagcagtggaggaaggtcccttatgagccctggatttatggtaataagcccatctggttttactgcttcaccatatgaaggagagaattcctctaatattattccacaacagatggccgcccatatgctgcgttctagaagcctaccagcattccctacttcttcactactaacgcaatcacaaaaactgactggaagtttgggttgtagtatcgacaggttacaaaatattgcagatacttatgttgccacccaatcaaagaaacaaaattctttggggagttccgacacactgaaaaaaggcaaagaggacgcattcatcagtagctgtgagtctgcaaaaactgtttgtgaaatggaagctgtcctctcagcccaggtctctgtcagtgatgtcccaaagggagtgctgggatttccagtggtcaaagcagatcataaacagttgggagcagaacccaggtcagaagatgacagtcctggggatgagtcctgcccacgccgacctgattacctaaagggattggcctccttccagcgaagccacagcactattgcaagccttgggctagcttttccttcacagaacggatctgcagctgttggccgttggccaagtcttgttgatagaaacactgatgattgggaaaactttgcctattctcttggttatgagccaaattacaaccgaactgcaagtgctcacagtgtaactgaagactgtttggtacctatatgctgtggattatatgaactcctaagtggggttcttcttatcctgcctgatgttttgcttgaagatgtgatggacaagcttattcaagcagatacacttttggtcctcgttaaccacccatcaccagctatacaacaaggtgttattaaactattagatgcatattttgctagagcatctaaggaacaaaaagataaatttctgaagaatcgtggattttccttgctagccaaccagttgtatcttcatcgaggaactcaagaattgttagaatgcttcatcgaaatgttctttggtcgacatattggccttgatgaagaatttgatctggaagatgtgagaaacatgggattgtttcagaagtggtctgtcattcctattctgggactaatagagacctctctatatgacaacatactcttgcataatgctcttttacttcttctccaaattttaaattcttgttctaaggtagcagatatgttgctggataatggtctactctatgtgttatgtaatacagtagcagccctgaatggattagaaaagaacattcccatgagtgaatataaattgcttgcttgtgatatacagcaacttttcatagcagttacaattcatgcttgcagttcctcaggctcacaatattttagggttattgaagaccttattgtaatgcttggatatcttcaaaatagcaaaaacaagaggacacaaaatatggctgttgcactacagcttagagttctccaggctgctatggaatttataaggaccaccgcaaatcatgactctgaaaacctcacagattcactccagtcaccttctgctccccatcatgcagtagttcaaaagcggaaaagcattgctggtcctcgaaaatttccccttgctcaaactgaatcgcttctgatgaaaatgcgttcagtggcaaatgatgagcttcatgtgatgatgcaacggagaatgagccaagagaaccctagccaagcaactgaaacggaacttgcgcagagactacagaggctcactgttttagcagtcaacaggattatttatcaagaatttaattcagacattattgacattttgagaactccagaaaatgtaactcaaagcaagacctcagttttccagaccgaaatttctgaggaaaatattcatcatgaacagtcttctgttttcaatccatttcagaaagaaatttttacatatctggtagaaggattcaaagtatctattggttcaagtaaagccagtggttccaagcagcaatggactaaaattctgtggtcttgtaaggagaccttccgaatgcagcttgggagactactagtgcatattttgtcgccagcccacgctgcacaagagagaaagcaaatttttgaaatagttcatgaaccaaatcatcaggaaatactacgagactgtctcagcccatccctacaacatggagccaagttagttttgtatttgtcagagttgatacataatcaccaaggtgaattgactgaagaagagctaggcacagcagaactgcttatgaatgctttgaagttatgtggtcacaagtgcatccctcccagtgcatcaacaaaagcagaccttattaaaatgatcaaagaggaacaaaagaaatatgaaactgaagaaggagtgaataaagctgcttggcagaaaacagttaacaataatcaacaaagtctctttcagcgtctggattcaaaatcaaaggatatatctaaaatagctgcagatatcacccaggcagtgtctctctcccaaggaaatgagagaaaaaaggtgatccagcatattagaggaatgtataaagtagatttgagtgccagcagacattggcaggaacttattcagcagctgacacatgatagagcagtatggtatgaccccatctactatccaacctcatggcagttggatccaacagaagggccaaatcgagagaggagacgtttacagagatgttatttaactattccaaataagtatctccttagggatagacagaaatcagaagatgttgtcaaaccaccactctcttacctgtttgaagacaaaactcattcttctttctcttctactgtcaaagacaaagctgcaagtgaatctataagagtgaatcgaagatgcatcagtgttgcaccatctagagagacagctggtgaattgttactaggtaaatgtggaatgtattttgtggaagataatgcttctgatacagttgaaagttcgagccttcagggagagttggaaccagcatcattttcctggacatatgaagaaattaaagaagttcacaagcgttggtggcaattgagagataatgctgtagaaatctttctaacaaatggcagaacactcctgttggcatttgataacaccaaggttcgtgatgatgtataccacaatatactcacaaataacctccctaatcttctggaatatggtaacatcaccgctctgacaaatttatggtatactgggcaaattactaattttgaatatttgactcacttaaacaaacatgctggccgatccttcaatgatctcatgcagtatcctgtgttcccatttatacttgctgactacgttagtgagacacttgacctcaatgatctgttgatatacagaaatctctctaaacctatagctgttcagtataaagaaaaagaagatcgttatgtggacacatacaagtacttggaggaagagtaccgcaaaggagccagagaagatgaccccatgcctcccgtgcagccctatcactatggctcccactattccaatagcggcactgtgcttcacttcctggtcaggatgcctcctttcactaaaatgtttttagcctatcaagatcaaagttttgacattccagacagaacttttcattctacaaatacaacttggcgactctcatcttttgaatctatgactgatgtgaaagaacttatcccagagtttttctatcttccagagttcctagttaaccgtgaaggttttgattttggtgtgcgtcagaatggtgaacgggttaatcacgtcaaccttcccccttgggcgcgtaatgatcctcgtctttttatcctcatccatcggcaggctctagagtctgactacgtgtcgcagaacatctgtcagtggattgacttggtgtttgggtataagcaaaaggggaaggcttctgttcaagcgatcaatgtttttcatcctgctacatattttggaatggatgtctctgcagttgaagatccagttcagagacgagcgctagaaaccatgataaaaacctacgggcagactccccgtcagctgttccacatggcccatgtgagcagacctggagccaagctcaatattgaaggagagcttccagctgctgtggggttgctagtgcagtttgctttcagggagacccgagaacaggtcaaagaaatcacctatccgagtcctttgtcatggataaaaggcttgaaatggggggaatacgtgggttcccccagtgctccagtacctgtggtctgcttcagccagccccacggagaaagatttggctctctccaggctctgcccaccagagcaatctgtggtttgtcacggaatttctgtcttgtgatgacatatagcaaggaacaaggtgtgagaagcatgaacagtacggacattcagtggtcagccatcctgagctggggatatgctgataatattttaaggttgaagagtaaacaaagtgagcctccagtaaactttattcaaagttcacaacagtaccaggtgactagttgtgcttgggtgcctgacagttgccagctgtttactggaagcaaatgcggtgtcatcacagcctacacaaacagatttacaagcagcacgccatcagaaatagaaatggagactcaaatacatctctatggtcacacagaagagataaccagcttatttgtttgcaaaccatacagtatactgataagtgtgagcagagacggaacctgcatcatatgggatttaaacaggttatgctatgtacaaagtctggcgggacacaaaagccctgtcacagctgtctctgccagtgaaacctcaggtgatattgctactgtgtgtgattcagctggcggaggcagtgacctcagactctggacggtgaacggggatctcgttggacatgtccactgcagggagatcatctgttccgtggctttctccaaccagcctgagggagtatctatcaatgtaatcgctgggggattagaaaatggaattgtaaggttatggagcacatgggacttaaagcctgtgagagaaattacatttcccaaatcaaataagcccatcatcagccttacattttcttgtgatggccaccatttgtacacagcaaacagtgatgggaccgtgattgcctggtgtcggaaggaccagcagcgcttgaaacagccaatgttctattccttccttagcagctatgcagccgggtgaatgcgaatgaacttcacgttctccaaagcactttaactccaaactagatttgttgacttcaccagttttaggaggttgaacctaaagaaatggatgactggacaaaccatccaaataatgataaagtctattcatctgcacaaaattctgaagagtcacatgatcctaagaggaaagttctgttctattttagtgataatctggaagattgtgtcaatatgcactagccaacaagttttaagcctcgcatggtacattaaaatgatattcttaaaattttttcccaccaaggtattccaaagaaaatattaaggtctcccctttttctatgattccaaaaggaccagtagaatttaaattggttggttgatngtttatataaaacacactaaaattatattttaaaagtttantgccntgaaatactcctcccaccacacacacatgctccaaaagaggaaagaaaaaaagataatttttaggacttgataattgctttctttgagaagcaaattattcagtaggtgcctctgtaccaaatattttatggaatatctaaatactaaaataaactatgaatgaatctcaaaattaggcagtttttgccagttgctttcttagctcaaaggagaaccagaatttttttgacagccacaaacaagaatacaggtatcttggatttcagacacattctgtttcttcataaaaattttacttaaaatctgtaacgctagatattgactatccttagttgagtcactgaggtttaaacacaatggtaagtcttaaagtctgctatttacagagcattgaatctgtaccaatttgcaatagaaagccttcagtatgcaagaagtttgcatgggtattaagaacacagcctaaataaggcatttgatctaatctgcaggaagaattttcttccccaaaacagaattataaaagcttactttaaacaggaggcagaataattcttttaggaaaccatttcattctgtttctactaacctataccatctgagaattcctaaacatcttggagccgtctgtctctcccatatgatggctgtctgtatatttttacttggggtgctgctttattggctttgaaaacactgtcagataagctcagtaatatgttaccatgggataaaaatatgtatccctgcctaagaataacttgtgcatttgttatggaaatttaattcatatggtgtttacagtactacttttgtaacttccagactttctaaaacattctgcttaaaaaccatataaaatataattccaaagtctctgctgtcaagatagattcgagagaaagcacgtggccatgtatgctttaaccttaaactgcatacacatgtagtgatacctaggctgcatttagatcaccgtgtgctcaggccaggtgtgaatcctgaggtccatggaggtgcagagatgagattactcctattcacgttgaagtgatttgctttgttaacaaaaaattgcagctattgtctagctttcatttttttactgagaactttaaattagtcccctattagaatagggttgctactcatctttttttaaaaaccgaatttcatcatttatctaaagagaaaatatgcagaataactggtcttgttaagagtgcaatattatatttttatgtaaaaataaaaattaatttggggggattatttattcagcatgaaacctaatatgtatatgtttgaaatacttcataatgtgcatgttgtagcaaacatttctgtaaattatcacaagctctgttacctttatatacgctgcctcttcaatttggaaataaatttcataaaaaaaaaaaaaaaaaaaaaaaaa

SEQ ID NO: 908 - protein, 2000 aa, Homo sapien
  Unsure 11967, 12008, 12013: Unknown amino acid
MSTDSNSLAREFLTDVNRLCNAVVQRVEAREEEEEETHMATLGQYLVHGRGFLLLTKLNSIIDQALTCREELLTLLLSLLPLVWKIPVQEEKATDFNLPLSADIILTKEKNSSSQRSTQEKLHLEGSALSSQVSAKVNVFRKSRRQRKITHRYSVRDARKTQLSTSDSEANSDEKGIAMNKHRRPHLLHHFLTSFPKQDHPKAKLDRLATKEQTPPDAMALENSREIIPRQGSNTDILSEPAALSVISNMNNSPFDLCHVLLSLLEKVCKFDVTLNHNSPLAASVVPTLTEFLAGFGDCCSLSDNLESRVVSAGWTEEPVALIQRMLFRTVLHLLSVDVSTAEMMPENLRKNLTELLRAALKIRICLEKQPDPFAPRQKKTLQEVQEDFVFSKYRHRALLLPELLEGVLQILICCLQSAASNPFYFSQAMDLVQEFIQHHGFNLFETAVLQMEWLVLRDGVPPEASEHLKALINSVMKIMSTVKKVKSEQLHHSMCTRKRHRRCEYSHFMHHHRDLSGLLVSAFKNQVSKNPFEETADGDVYYPERCCCIAVCAHQCLRLLQQASLSSTCVQILSGVHNIGICCCMDPKSVIIPLLHAFKLPALKNFQQHILNILNKLILDQLGGAEISPKIKKAACNICTVDSDQLAQLEETLQGNLCDAELSSSLSSPSYRFQGILPSSGSEDLLWKWDALKAYQNFVFEEDRLHSIQIANHICNLIQKGNIVVQWKLYNYIFNPVLQRGVELAHHCQHLSVTSAQSHVCSHHNQCLPQDVLQIYVKTLPILLKSRVIRDLFLSCNGVSQIIELNCLNGIRSHSLKAFETLIISLGEQQKDASVPDIDGIDIEQKELSSVHVGTSFHHQQAYSDSPQSLSKFYAGLKEAYPKRRKTVNQDVHINTINLFLCVAFLCVSKEAESDRESANDSEDTSGYDSTASEPLSHMLPCISLESLVLPSPEHMHQAADIWSMCRWIYMLSSVFQKQFYRLGGFRVCHKLIFMIIQKLFRSHKEEQGKKEGDTSVNENQDLNRISQPKRTMKEDLLSLAIKSDPIPSELGSLKKSADSLGKLELQHISSINVEEVSATEAAPEEAKLFTSQESETSLQSIRLLEALLAICLHGARTSQQKMELELPNQNLSVESILFEMRDHLSQSKVIETQLAKPLFDALLRVALGNYSADFEHNDAMTEKSHQSAEELSSQPGDFSEEAEDSQCCSFKLLVEEEGYEADSESNPEDGETQDDGVDLKSETEGFSASSSPNDLLENLTQGEIIYPEICMLELNLLSASKAKLDVLAHVFESFLKIIRQKEKNVFLLMQQGTVKNLLGGFLSILTQDDSDFQACQRVLVDLLVSLMSSRTCSEELTLLLRIFLEKSPCTKILLLGILKIIESDTTMSPSQYLTFPLLHAPNLSNGVSSQKYPGILNSKAMGLLRRARVSRSKKEADRESFPHRLLSSWHIAPVHLPLLGQNCWPHLSEGFSVSLWFNVECIHEAESTTEKGKKIKKRNKSLILPDSSFDGTESDRPEGAEYINPGERLIEEGCIHIISLGSKALMIQVWADPHNATLIFRVCMDSNDDMKAVLLAQVESQENIFLPSKWQHLVLTYLQQPQGKRRIHGKISIWVSGQRKPDVTLDFMLPRKTSLSSDSNKTFCMIGHCLSSQEEFLQLAGKWDLGNLLLFNGAKVGSQEAFYLYACGPNHTSVMPCKYGKPVNDYSKYINKEILRCEQIRELFMTKKDVDIGLLIESLSVVYTTYCPAQYTIYEPVIRLKGQMKTQLSQRPFSSKEVQSILLEPHHLKNLQPTEYKTIQGILHEIGGTGIFVFLFARVVELSSCEETQALALRVILSLIKYNQQRVHELENCNGLSMIHQVLIKQKCIVGFYILKTLLEGCCGEDIIYMNENGEFKLDVDSNAIIQDVKLLEELLLDWKIWSKAEQGVWETLLAALEVLIRADHHQQMFNIKQLLKAQVVHHFLLTCQVLQEYKEGQLTPMPREVCRSFVKIIAEVL

SEQ ID NO: 909 - DNA, 4859 bp, Homo sapien
cacgttgggtgacataatggggtttttttaattatagattcacactgcatttattcatcacccctgtcctctcatccataactcaaatttactaccagcaacacaaaatacaaagatgtgtccagtttcactacagctcttcgcgtttacaagtgtcgagcgcttgctttcggaacgcccttgtgattggccgagccaatgccagtgacatcaaccaacttacttttgattggaaggctggttgctgggactgtagcgtttgcaggaagtcacttaactgtttgggagctggaaaaccgaagctgaagttctcttttgccataggaacgagcgcaactgactaggaaagatgtgtcccaaagctccgcaagctggaacgtgagccaggaggcccggaccggccacgggaccgcgaggcactccgaaagtgtgcggctgccccttccctgcctcccagctgttacccttttaaatgtcagtgttcgaggctgtaggggtagcacgaggcagcgaaacggaacagtcggattggccgcacgcctcagttctagacgcacctctccaccgaagccgttctgactggcagggggagaaagtaaacagagttgaatcaccctccccactggccaattggagggggtttggtttgtgacgtgatgggattctgcgaaattgttactgagcaagagaatgccggaacgtgcggaccggccggagcaggggttcagaagccgtcagtggactcgggaaaaagtgtctcttagacctggcgctcggcggggccctcgccacccgcgtcggggtgatcgggtgaatgtcctggggctttggctcgacggcgaggcggccgagggcgtgcacctctcttgcagtttcctctcccagcgcctcgggggcgttttcagtcgaataaacttgcgaccgccacgtgtggcatctttccaagggagccggctcagaggggccggcgcgcccgtcgggggatcgcggccggcgcggggcaggggcggcggctagaggcggcggcgcggcggagcccggggccgtggatgctgcgtgcggaggcgctgccggttacgtaaagatgaggggctgaggtcgcctcggcgctcctgcgagtcggaagcgccccgcgcccccgcccccttggccgccgcgccgtgccgggcgggcgggtcgtcgtccgaggccagggagggcgagccgaacctccgcagccaccgccaagtttgtccgcgccgcctgggctgccgtcgcccgcaccatgtccgcggccgcctacatggacttcgtggctgcccagtgtctggtttccatttcgaaccgcgctgcggtgccggagcatggggtcgctccggacgccgagcggctgcgactacctgagcgcgaggtgaccaaggagcacggtgacccgggggacacctggaaggattactgcacactggtcaccatcgccaagagcttgttggacctgaacaagtaccgacccatccagaccccctccgtgtgcagcgacagtctggaaagtccagatgaggatatgggatccgacagcgacgtgaccaccgaatctgggtcgagtccttcccacagcccggaggagagacaggatcctggcagcgcgcccagcccgctctccctcctccatcctggagtggctgcgaaggggaaacacgcctccgaaaagaggcacaagtgcccctacagtggctgtgggaaagtctatggaaaatcctcccatctcaaagcccattacagagtgcatacaggtgaacggcccttcccctgcacgtggccagactgccttaaaaagttctcccgctcagacgagctgacccgccactaccggacccacactggggaaaagcagttccgctgtccgctgtgtgagaagcgcttcatgaggagtgaccacctcacaaagcacgcccggcggcacaccgagttccaccccagcatgatcaagcgatcgaaaaaggcgctggccaacgctttgtgaggtgctgcccgtggaagccagggagggatggaccccgaaaggacaaaagtactcccaggaaacagacgcgtgaaaactgagccccagaagaggcacacttgacggcacaggaagtcactgctctttggtcaatattctgattttcctctccctgcattgtttttaaaaagcacattgtagcctaagatcaaagtcaacaacactcggtccccttgaagaggcaactctctgaacccgtctctgactgttggagggaaggcaaatgcttttgggttttttggtttttgtttttgtttttttttctccttttatttttttgcgggggagggtagggagtgggtgggggggagggggtaaggccaagactgggtagattttaaagattcaacactggtgtacatatgtccgctgggtgagttgacctgtggcctcgcacagtgattctaggccctttatgcttgctgtctctcagaattgttttcttaccttttaatgtaatgacgagtgtgcttcagtttgtttagcaaaaccactctcttgaatcacgttaacttttgagattaaaaaaaaaaacgccatagcacagctgtctttatgcaagcaagagcacatctactccagcatgatctgtcatctaaagacttgaaaacaaaaaacagttacttatagtcaatgggtaagcagagtctgaatttatactaatcaagacaaacctttgaaaggttacactaagtacagaacttttaaaccttgctttgtatgagttgtactttttgaacataagctgcacttttattttctaatgcagaggatgaataagttaaatacatgctttgaggatagaagcagatgttctgtttggcaccacgttataatctgcttattttacaatatacacgtttccctaagaaatcatgcgcagagatgtgagggcagaatatacacaacagatgctgaaggagaaggagggtagtgttttgcaaaagaaaaagaaaagaaccaacagaattttaactctattaacttttccaaattttcctatgcttttagttaacatcattattgtatcctaatgccactaggggagagagcttttgactctgttgggttttatttgaatgtgtgcataacagtaatgagatctggaaacacctattttttggggaaaaaggtttgttggtctccttcctgtgttcctacaaaactcccactctcaggtgcaagagttatgtagaaggaaagggagctgaaataggaacagaaaaatcaacccctataactagtgaacaccaagggaaaataccacaatgatttcagaggagactctgcaaaatcgtcccttgtggagaatgcaggcaacatggaatactacgaatgaaatcacatcactgtatcttttacatcaatagcctcaccactaatatatcttgtatctaggtgtctataatggctgaaaccactacatccatctatgccatttacctgaaaacttaactgtggcctttatgaggccagaaaagtgaactgagttttgtagttaagacctcaaatgaggggagtcagcagtgatcatgggggaaatgtttacattttttttttcttcagaagtaacgctttctgatgattttatctgatatttaaaacagggagctatggtgcactctagtttatacttgcgctctgaaatgtgtaaacatagggtgcctacctatttcacctgacccatactcgtttctgattcagaatcagtgtgggctcctgcagtgggcgcgggtcacggctgactccaacttccaatacaacagccatcactagcacagtgtttttttgtttaaccaacgtagtgttattagtagttctataaagagaactgcttttaacattagggactgggagcagtccatgggataaaaaggaaagtgttttctcacgagaaaacatgtcaggaaaaataaagaacactttctacctctgtttcagatttttgaaacacttattttaaaccaaattttaatttctgtgtccaaaataagttttaaggacatctgttcttccatacgaaataggttaggctgcctatttctcactgagctcatggaatggttctgcttatgatactctgcacgctgccttttagtgagtgaggagtttggggttgcctagcacttgctaacttgtaaaaagtcatctttccctcacagaaagaaacgaaagaaagcaaagcaaagtcagtgaaagacaatctttatagtttcaggagtaaatctaaatgtggcttttgtcaagcacttagatggatataaatgcagcaacttgttttaaaaaaatgcacatttacttcccaaaaaagttgttacttgccttttcaagtgtgacaaactcacatttgatattctcttatatgttatagtaatgtaacgtataaactcaagcctttttattctttgtgattaaatcctgttttaaaatgtcacaaaacaggaaccagcattctaattagatttactatatcaagatatggttcaaataggactactagagttcattgaacactaaaactatgaaacaattactttttatattaaaaagaccatggatttaacttatgaaaatccaaatgcaggatagtaatttttgtttacttttttaaccaaactgaatttttgaaagactattgcaggtgtttaaaaagaaagaaaagttgttttatctaatactgtaagtagttgtcatattctggaaaatttaatagttttagagttaagatatctcctctctttggttagggaagaagaaagcccttcaccattgtggaatgatgccctggctttaaggtttagctccacatcatgcttctctt

SEQ ID NO: 910 - protein, 244 aa, Homo sapien
MSAAAYMDFVAAQCLVSISNRAAVPEHGVAPDAERLRLPEREVTKEHGDPGDTWKDYCTLVTIAKSLLDLNKYRPIQTPSVCSDSLESPDEDMGSDSDVTTESGSSPSHSPEERQDPGSAPSPLSLLHPGVAAKGKHASEKRHKCPYSGCGKVYGKSSHLKAHYRVHTGERPFPCTWPDCLKKFSRSDELTRHYRTHTGEKQFRCPLCEKRFMRSDHLTKHARRHTEFHPSMIKRSKKALANAL

SEQ ID NO: 911 - DNA, 4859 bp, Homo sapien; identical to SEQ ID NO: 909

SEQ ID NO: 912 - protein, 244 aa, Homo sapien; identical to SEQ ID NO: 910

SEQ ID NO: 913 - DNA, 2967 bp, Homo sapien
tagctccgcgcgggggcttcctcggctccttgctgttgccgccgccgcagctgctgccgcggttggtggggttgggtgagaggaggagctgtcgcggaccctgtagagtcggtctctgttgctctttttgcctgaggagtcttccatcctacgtcgagctctgactcccgtgctgtcgagagggagtccccggggacacctcggcacgcagcggagatgcctctttttgccaccaatcccttcgatcaggatgttgagaaagcaaccagcgagatgaatactgctgaggactggggcctcattttggatatctgtgataaagttggtcagtctcgcactggacctaaggattgtcttcggtctattatgagaagagtgaaccacaaagatcctcacgttgctatgcaggctttgactcttctaggagcatgtgtatcaaactgtggcaaaatttttcatttagaagtatgttcaagagattttgctagtgaagtaagcaacgtattaaataagggtcatcctaaagtatgtgaaaaattaaaggctcttatggttgaatggacagatgaatttaagaatgatccacagcttagtctaatatcagcaatgattaagaaccttaaggaacaaggagttacgttcccagctattggctctcaggctgcagaacaagcaaaagcaagcccagctcttgtagccaaggatcctggtactgtggctaacaaaaaagaagaagaagatttagcaaaagccattgagttgtctctcaaggaacaaaggcagcagtcaaccaccctttccactttgtatccaagcacatccagtctcttaactaaccaccaacatgaaggccgaaaagttcgtgctatatatgactttgaagctgctgaagacaatgaacttacttttaaagctggagaaattattacagttcttgatgacagtgatcctaactggtggaaaggtgaaacccatcaaggcatagggttatttccttctaattttgtgactgcagatctcactgctgaaccagaaatgattaaaacagagaagaagacggtacaatttagtgatgatgttcaggtagagacaatagaaccagagccggaaccagcctttattgatgaagataaaatggaccagttgctacagatgctgcaaagtacagaccccagtgatgatcagccagacctaccagagctgcttcatcttgaagcaatgtgtcaccagatgggacctctcattgatgaaaagctggaagatattgatagaaaacattcagaactctcagaacttaatgtgaaagtgatggaggccctttccttatataccaagttaatgaacgaagatccgatgtattccatgtatgcaaagttacagaatcagccatattatatgcagtcatctggtgtttctggttctcaggtgtatgcagggcctcctccaagtggtgcctacctggttgcagggaacgcgcagatgagccacctccagagctacagtcttcccccggagcagctgtcttctctcagccaggcagtggtcccaccatccgcaaacccagcccttcctagtcagcagactcaggccgcttacccaaatacaatggtcagttccgttcaaggaaacacatatcccagccaggcgccagtatatagtcctcctcctgccgctactgctgctgctgcaactgccgatgtcactctgtaccagaatgcaggacctaatatgccccaggtgccaaactataacttaacatcatcaactctgcctcagcccggaggcagccaacagccacctcagccacagcaaccatattctcagaaggctctgctataggacccggtgttcctcttggtggcagatacctgctaaatgccactgacaatgttatgagattcattactatcttaagatgtgtttatcctcagcttataggaatctctccaggtcaacaggttcaaatattcaagaaggtagaactctcctcaatttacactgactttttagaggttcttccccccccgcccctgcagaggaatgaaactacttacaacatttaattcctttcataatatgaaagaattgatacaaggctatttgtctcgtaaacctggtctgcagaaagtcaaacttacaaaaactgttgtgacaaatgttatgtacatatattgatatgtaactgcattagtggccattttgaatcacagtggtgatcgtgtgaatatatttaacactgtgttaaattaatttacgttgctattttattttaatcataaacaactaccatgtttcttaatgttttgtgtaaatttaaggtaattatactatccttttaaacttcaagaaaacaaagttgttagcgtatttacatgaaggcgcattatgttgtcgtgtgtttcagtttcacattaaactgaaccttttactaattgtgagctaaagagatatatatatatatgtgtgtgtatatatatatatctacatgtctttctgtagcctctgcatactactggctgtcatcacaccagcgtacagtagctaaatttttggtgcaattatagcaaatgataatgttcccttttgaacttttacattttggcatgacatttcagagtattgtgggaccatgagacaaaattaagtacgatcacattctttatttctcattttaaagaaatgatgttggtttaccttttcctagttgaagatagtaattaggtttctaagctgtatactgtgtttattggtggcagtgacaccaaagatagaggcaatggatagaaatttttaaactggaaagaaaacctgaattacactacattttcgaagtctcttgtaattatttgggatatcaacaaaatttgattcgtctgtctaatcccttgctagtattttaaatatgtctttaacacattgtatcctttaattcttcattaaaatggaaataagtagatgtttcaaagt

SEQ ID NO: 914 - protein, 540 aa, Homo sapien
MPLFATNPFDQDVEKATSEMNTAEDWGLILDICDKVGQSRTGPKDCLRSIMRRVNHKDPHVAMQALTLLGACVSNCGKIFHLEVCSRDFASEVSNVLNKGHPKVCEKLKALMVEWTDEFKNDPQLSLISAMIKNLKEQGVTFPAIGSQAAEQAKASPALVAKDPGTVANKKEEEDLAKAIELSLKEQRQQSTTLSTLYPSTSSLLTNHQHEGRKVRAIYDFEAAEDNELTFKAGEIITVLDDSDPNWWKGETHQGIGLFPSNFVTADLTAEPEMIKTEKKTVQFSDDVQVETIEPEPEPAFIDEDKMDQLLQMLQSTDPSDDQPDLPELLHLEAMCHQMGPLIDEKLEDIDRKHSELSELNVKVMEALSLYTKLMNEDPMYSMYAKLQNQPYYMQSSGVSGSQVYAGPPPSGAYLVAGNAQMSHLQSYSLPPEQLSSLSQAVVPPSANPALPSQQTQAAYPNTMVSSVQGNTYPSQAPVYSPPPAATAAAATADVTLYQNAGPNMPQVPNYNLTSSTLPQPGGSQQPPQPQQPYSQKALL

SEQ ID NO: 915 - DNA, 728 bp, Homo sapien
gcggcctcagatgaatgcggctgttaagacctgcaataatccagaatggctactctgatctatgttgataaggaaaatggagaaccaggcacccgtgtggttgctaaggatgggctgaagctggggtctggaccttcaatcaaagccttagatgggagatctcaagtttcaacaccacgttttggcaaaacgttcgatgccccaccagccttacctaaagctactagaaaggctttgggaactgtcaacagagctacagaaaagtctgtaaagaccaagggacccctcaaacaaaaacagccaagcttttctgccaaaaagatgactgagaagactgttaaagcaaaaagctctgttcctgcctcagatgatgcctatccagaaatagaaaaattctttcccttcaatcctctagactttgagagttttgacctgcctgaagagcaccagattgcgcacctccccttgagtggagtgcctctcatgatccttgacgaggagagagagcttgaaaagctgtttcagctgggccccccttcacctgtgaagatgccctctccaccatgggaatccaatctgttgcagtctccttcaagcattctgtcgaccctggatgttgaattgccacctgtttgctgtgacatagatatttaaatttcttagtgcttcagagtttgtgtgtatttgtattaataaagcattcttcaacagaaaaaaaaaaaaaaaaa

SEQ ID NO: 916 - protein, 202 aa, Homo sapien
MATLIYVDKENGEPGTRVVAKDGLKLGSGPSIKALDGRSQVSTPRFGKTFDAPPALPKATRKALGTVNRATEKSVKTKGPLKQKQPSFSAKKMTEKTVKAKSSVPASDDAYPEIEKFFPFNPLDFESFDLPEEHQIAHLPLSGVPLMILDEERELEKLFQLGPPSPVKMPSPPWESNLLQSPSSILSTLDVELPPVCCDIDI

SEQ ID NO: 917 - DNA, 4089 bp, Homo sapien
cgcgttcacagccccagcgcaggtctggatgtaccgactgcttttggaataaaaagattcccaggatgtgagcaacacgggaccgatatgatgcttcctggtgtgtttagtggttggtgccattccaattttctgtgctgaaatcattctgaaaactcaaacagtagacttcagcacacaaggaaagccaaagccatttgagggggaataaagccaaaagcctttcaccttattcgttccaagaatctcaccgccccctccttatccccctccaaaaataagccattgcacacagacaggcagcatggctagcaaacgaaaatctacaactccatgcatggttcggacatcacaagtagtagaacaagatgtgcccgaggaagtagacagggccaaagagaaaggaatcggcacaccacagcctgacgtggccaaggacagttgggcagcagaacttgaaaactcttccaaagaaaacgaagtgatagaggtgaaatctatgggggaaagccagtccaaaaaactccaaggtggttatgagtgcaaatactgcccctactccacgcaaaacctgaacgagttcacggagcatgtcgacatgcagcatcccaacgtgattctcaaccccctctacgtgtgtgcagaatgtaacttcacaaccaaaaagtacgactccctatccgaccacaactccaagttccatcccggggaggccaacttcaagctgaagttaattaaacgcaataatcaaactgtcttggaacagtccatcgaaaccaccaaccatgtcgtgtccatcaccaccagtggccctggaactggtgacagtgattctgggatctcggtgagtaaaacccccatcatgaagcctggaaaaccaaaagcggatgccaagaaggtgcccaagaagcccgaggagatcacccccgagaaccacgtggaagggaccgcccgcctggtgacagacacagctgagatcctctcaagactcggcggggtggagctcctccaagacacattaggacacgtcatgccttctgtacagctgccaccaaatatcaaccttgtgcccaaggtccctgtcccactaaatactaccaaatacaactctgccctggatacaaatgccacgatgatcaactctttcaacaagtttccttacccgacccaggctgagttgtcctggctgacagctgcctccaaacacccagaggagcacatcagaatctggtttgccacccagcgcttaaagcatggcatcagctggtccccagaagaggtggaggaggcccggaagaagatgttcaacggcaccatccagtcagtacccccgaccatcactgtgctgcccgcccagttggcccccacaaaggtgacgcagcccatcctccagacggctctaccgtgccagatcctcggccagactagcctggtgctgactcaggtgaccagcgggtcaacaaccgtctcttgctcccccatcacacttgccgtggcaggagtcactaaccatggccagaagagacccttggtgactccccaagctgcccccgaacccaagcgtccacacatcgctcaggtgccagagcccccacccaaggtggccaaccccccgctcacaccagccagtgaccgcaagaagacaaaggagcagatagcacatctcaaggccagctttctccagagccagttccctgacgatgccgaggtttaccggctcatcgaggtgactggccttgccaggagcgagatcaagaagtggttcagtgaccaccgatatcggtgtcaaaggggcatcgtccacatcaccagcgaatcccttgccaaagaccagttggccatcgcggcctcccgacacggtcgcacgtatcatgcgtacccagactttgccccccagaagttcaaagagaaaacacagggtcaggttaaaatcttggaagacagctttttgaaaagttcttttcctacccaagcagaactggatcggctaagggtggagaccaagctgagcaggagagagatcgactcctggttctcggagaggcggaagcttcgagacagcatggaacaagctgtcttggattccatggggtctggcaaaaaaggccaagatgtgggagcccccaatggtgctctgtctcgactcgaccagctctccggtgcccagttaacaagttctctgcccagcccttcgccagcaattgcaaaaagtcaagaacaggttcatctcctgaggagcacgtttgcaagaacccagtggcctactccccaggagtacgaccagttagcggccaagactggcctggtccgaactgagattgtgcgttggttcaaggagaacagatgcttgctgaaaacgggaaccgtgaagtggatggagcagtaccagcaccagcccatggcagatgatcacggctacgatgccgtagcaaggaaagcaacaaaacccatggccgagagcccaaagaacgggggtgatgtggttccacaatattacaaggaccccaaaaagctctgcgaagaggacttggagaagttggtgaccagggtaaaagtaggcagcgagccagcaaaagactgtttgccagcaaagccctcagaggccacctcagaccggtcagagggcagcagccgggacggccagggtagcgacgagaacgaggagtcgagcgttgtggattacgtggaggtgacggtcggggaggaggatgcgatctcagatagatcagatagctggagtcaggctgcggcagaaggtgtgtcggaactggctgaatcagactccgactgcgtccctgcagaggctggccaggcctagacagggaagtctgttagaactgctgtgctgatcaacgggacgctccgtctttgaagaaagaagagatggtctctccccagccatgggccacccttgccagtgactccaagtggaactacttagctcgcgtgtgcctggagggtgcgggaagtccagcgactctcagacgcacctcccagaggaccggtgggaattgttcatagtgccaaagtcctactactgcgttttcagtgggtccttgtacatagtttgctcctctgccctagccctcacctcttgctatactggaaccgatttgtacaatgtgggaattttgttacctttttaatcaagggcaacttccttttccagcactaccattgtaaggtttttttcaggagggagggctaaccaccttgcttttctcttttctctttttcttttttttatttttgttttattaatttggggaaaggggtgttagcattagtgccatgatatctactggattttaagtagggagactttatttttaaaggtaggttgaaatttgggagatttctcggcaggaagggctgaaatccaggcccctgtctcaacttggagagaggtgacagacggcagatcttccaaatcaaattcctttccagttcttcccctggctgcctttttgggggtccctgccttagccccacacaaggctttctgaactgccaagaggggatctggcttctcaactgctcggcctcttgggccaggctgtgcccagccagccctgggagaactgggtagcaggtggctgacttctttaagcacctttctaaataccagcagaagaggctcccgcctctgttagcatgatcagtactattgtgacattaaaacaacaacaataagatcttcctatctggagggtacagaggtgaatggctttggttttcatttctcttcttcactgccttttctcggtgtggtatttgacaagattttagctcaaagcctcaccatgaattgattttttttgtttgtgtgtgtgtttgttttgggacaattttagatacctgagtgcactttttcagttagtcctaacttttaaaagaaggaaaaccaagagacatatctggtgtacgtgttgcagtatgaactctggttgcaatccctccccctcccacactgccccccatttgagtacgccgcacaagtcaaacgctaggaagtttgaataaaaccaatttttctaacttgttgctcatttgttgtaactcaataaagcaaagactaaacatttttat

SEQ ID NO: 918 - protein, 837 aa, Homo sapien
MASKRKSTTPCMVRTSQVVEQDVPEEVDRAKEKGIGTPQPDVAKDSWAAELENSSKENEVIEVKSMGESQSKKLQGGYECKYCPYSTQNLNEFTEHVDMQHPNVILNPLYVCAECNFTTKKYDSLSDHNSKFHPGEANFKLKLIKRNNQTVLEQSIETTNHVVSITTSGPGTGDSDSGISVSKTPIMKPGKPKADAKKVPKKPEEITPENHVEGTARLVTDTAEILSRLGGVELLQDTLGHVMPSVQLPPNINLVPKVPVPLNTTKYNSALDTNATMINSFNKFPYPTQAELSWLTAASKHPEEHIRIWFATQRLKHGISWSPEEVEEARKKMFNGTIQSVPPTITVLPAQLAPTKVTQPILQTALPCQILGQTSLVLTQVTSGSTTVSCSPITLAVAGVTNHGQKRPLVTPQAAPEPKRPHIAQVPEPPPKVANPPLTPASDRKKTKEQIAHLKASFLQSQFPDDAEVYRLIEVTGLARSEIKKWFSDHRYRCQRGIVHITSESLAKDQLAIAASRHGRTYHAYPDFAPQKFKEKTQGQVKILEDSFLKSSFPTQAELDRLRVETKLSRREIDSWFSERRKLRDSMEQAVLDSMGSGKKGQDVGAPNGALSRLDQLSGAQLTSSLPSPSPAIAKSQEQVHLLRSTFARTQWPTPQEYDQLAAKTGLVRTEIVRWFKENRCLLKTGTVKWMEQYQHQPMADDHGYDAVARKATKPMAESPKNGGDVVPQYYKDPKKLCEEDLEKLVTRVKVGSEPAKDCLPAKPSEATSDRSEGSSRDGQGSDENEESSVVDYVEVTVGEEDAISDRSDSWSQAAAEGVSELAESDSDCVPAEAGQA

SEQ ID NO: 919 - DNA, 1280 bp, Homo sapien
tgccgcagcccccgcccgcccgcagagcttttgaaaggcggcgggaggcggcgagcgccatggccagtccgggctgcctgctgtgcgtgctgggcctgctactctgcggggcggcgagcctcgagctgtctagaccccacggcgacaccgccaagaagcccatcatcggaatattaatgcaaaaatgccgtaataaagtcatgaaaaactatggaagatactatattgctgcgtcctatgtaaagtacttggagtctgcaggtgcgagagttgtaccagtaaggctggatcttacagagaaagactatgaaatacttttcaaatctattaatggaatccttttccctggaggaagtgttgacctcagacgctcagattatgctaaagtggccaaaatattttataacttgtccatacagagttttgatgatggagactattttcctgtgtggggcacatgccttggatttgaagagctttcactgctgattagtggagagtgcttattaactgccacagatactgttgacgtggcaatgccgctgaacttcactggaggtcaattgcacagcagaatgttccagaattttcctactgagttgttgctgtcattagcagtagaacctctgactgccaatttccataagtggagcctctccgtgaagaattttacaatgaatgaaaagttaaagaagtttttcaatgtcttaactacaaatacagatggcaagattgagtttatttcaacaatggaaggatataagtatccagtatatggtgtccagtggcatccagagaaagcaccttatgagtggaagaatttggatggcatttcccatgcacctaatgctgtgaaaaccgcattttatttagcagagttttttgttaatgaagctcggaaaaacaaccatcattttaaatctgaatctgaagaggagaaagcattgatttatcagttcagtccaatttatactggaaatatttcttcatttcagcaatgttacatatttgattgaaagtcttcaatttgttaacagagcaaatttgaataattccatgattaaactgttagaataacttgctactcatggcaagattaggaagtcacagattcttttctataatgtgcctggctctgattcttcattatgtatgtgactatttatataacattagataattaaatagtgagacataaatagagtgctttttcatggaaaagccttcttatatctgaagattgaaaaataaatttactgaaatacaaaaaaaaaaaaaaa

SEQ ID NO: 920 - protein, 318 aa, Homo sapien
MASPGCLLCVLGLLLCGAASLELSRPHGDTAKKPIIGILMQKCRNKVMKNYGRYYIAASYVKYLESAGARVVPVRLDLTEKDYEILFKSINGILFPGGSVDLRRSDYAKVAKIFYNLSIQSFDDGDYFPVWGTCLGFEELSLLISGECLLTATDTVDVAMPLNFTGGQLHSRMFQNFPTELLLSLAVEPLTANFHKWSLSVKNFTMNEKLKKFFNVLTTNTDGKIEFISTMEGYKYPVYGVQWHPEKAPYEWKNLDGISHAPNAVKTAFYLAEFFVNEARKNNHHFKSESEEEKALIYQFSPIYTGNISSFQQCYIFD

SEQ ID NO: 921 - DNA, 1702 bp, Homo sapien
ctggctctccgctgcgctgcgctgcgctccggccgctcccgcggcccgtggatgggggtgtccggctgagccccgggatccgcctccctccgccaggacccgcacagataaactcatcctgaaagtcgctgttgttctcctgctgagcaagaatggaggccccactggtgagtctggatgaagagtttgaggaccttcgaccctcctgctcggaggacccggaggagaagccccagtgtttctatggttcatctccccaccatctcgaggacccctccctctccgagcttgagaatttttcttccgaaataatcagcttcaagtccatggaggacctcgtaaatgaatttgatgagaagctcaatgtctgctttcggaactacaacgccaagaccgagaacctagctcccgtgaagaaccagttacagatccaagaggaggaggagacccttcaggacgaggaggtttgggatgctctgacagacaattacatcccttcactctcagaagactggagggatccaaacatcgaggctctgaatggcaactgctctgacactgagatccatgagaaagaagaggaagagttcaatgagaagagtgaaaatgattccggtatcaacgaggagcctctgctcacagcagatcaggtaattgaggagattgaggaaatgatgcagaactccccagaccctgaggaagaagaggaggttctggaagaagaggatggaggagaaacttcctcccaggcagactcggtcctcctgcaggagatgcaggcattgacacagaccttcaacaacaactggtcctatgaagggctgaggcacatgtctgggtctgagctgaccgagctgctggaccaggtggagggtgccatccgtgacttctcggaggagctggtgcagcagctggcccgccgggacgagctggagtttgagaaggaagtgaagaactcctttatcacggtgcttattgaggttcagaacaagcagaaggagcagcgagaactgatgaaaaagaggcggaaagagaaagggctgagcctgcagagcagccggatagagaagggaaaccagatgcctctcaagcgcttcagcatggaaggcatctccaacattctgcagagtggcatccgccagacctttggctcctcaggaactgacaaacagtatctgaacacagtcattccttacgagaagaaagcctctcctccctcagtggaagacctgcagatgctgacaaacattctctttgccatgaaggaggataatgagaaggtgcctactttgctaacggactacattttaaaagtgctctgccctacctaaccttgccctttggagcagcctcgctgcaggaggtcactgagcaagagtcattccatcacagggactgcatgagaccatgtaacctccgacatgtatttaaacgtgtatagcttaacctggattaaacacgagcaagcgcgcggggtcctttgccgttggcttctagtgctagtaatcattggatgcatgatggggcagggccggtgatggtgcctcccccttgctggtgtcaggagaggggaaggcagccgctttcaccgctcattatgtagtctggctacagccctcaaaaacagcttatactcttaagactaattttgaaataaaaccttcatttaattaaaaaaaaaaaaaaaaaaaaaaaaaaaaaa

SEQ ID NO: 922 - protein, 392 aa, Homo sapien
MEAPLVSLDEEFEDLRPSCSEDPEEKPQCFYGSSPHHLEDPSLSELENFSSEIISFKSMEDLVNEFDEKLNVCFRNYNAKTENLAPVKNQLQIQEEEETLQDEEVWDALTDNYIPSLSEDWRDPNIEALNGNCSDTEIHEKEEEEFNEKSENDSGINEEPLLTADQVIEEIEEMMQNSPDPEEEEEVLEEEDGGETSSQADSVLLQEMQALTQTFNNNWSYEGLRHMSGSELTELLDQVEGAIRDFSEELVQQLARRDELEFEKEVKNSFITVLIEVQNKQKEQRELMKKRRKEKGLSLQSSRIEKGNQMPLKRFSMEGISNILQSGIRQTFGSSGTDKQYLNTVIPYEKKASPPSVEDLQMLTNILFAMKEDNEKVPTLLTDYILKVLCPT

SEQ ID NO: 923 - DNA, 3286 bp, Homo sapien
tagcagcgaatatactttacaccaaatctcagaagattcagaacttagatgagtggggcccaggacaggaaccctggagccttggaaggaggggagccccatctccccagaagagcagtgaccccagcagagaggggcctggtgtatcactggaggaaatagcctgccaaggaatacacgtcttcagaagaaattctgtgtggcttcaagagactgatcaaattgtgagaggaaaacagcctacccggtcctcttttcttcaatacaaaatgagataataggggttggaaggaaaaccttcaagacctatggaagtcagttgcagccagctcatcacatagaggtgcaggtgaggtgtattttcatcacggtggaaaattctggctgcttcatctccatctctagagccaatattggagcttttcaataaaagctatggcctcaaccaccagcaccaagaagatgatggaggaagccacctgctccatctgcctgagcctgatgacgaacccagtaagcatcaactgtggacacagctactgccacttgtgtataacagacttctttaaaaacccaagccaaaagcaactgaggcaggagacattctgctgtccccagtgtcgggctccatttcatatggatagcctccgacccaacaagcagctgggaagcctcattgaagccctcaaagagacggatcaagaaatgtcatgtgaggaacacggagagcagttccacctgttctgcgaagacgaggggcagctcatctgctggcgctgtgagcgggcaccacagcacaaagggcacaccacagctcttgttgaagacgtatgccagggctacaaggaaaagctccagaaagctgtgacaaaactgaagcaacttgaagacagatgtacggagcagaagctgtccacagcaatgcgaataactaaatggaaagagaaggtacagattcagagacaaaaaatccggtctgactttaagaatctccagtgtttcctacatgaggaagagaagtcttatctctggaggctggagaaagaagaacaacagactctgagtagactgagggactatgaggctggtctggggctgaagagcaatgaactcaagagccacatcctggaactggaggaaaaatgtcagggctcagcccagaaattgctgcagaatgtgaatgacactttgagcaggagttgggctgtgaagctggaaacatcagaggctgtctccttggaacttcatactatgtgcaatgtttccaagctttacttcgatgtgaagaaaatgttaaggagtcatcaagttagtgtgactctggatccagatacagctcatcacgaactaattctctctgaggatcggagacaagtgactcgtggatacacccaggagaatcaggacacatcttccaggagatttactgccttcccctgtgtcttgggttgtgaaggcttcacctcaggaagacgttactttgaagtggatgttggcgaaggaaccggatgggatttaggagtttgtatggaaaatgtgcagaggggcactggcatgaagcaagagcctcagtctggattctggaccctcaggctgtgcaaaaagaaaggctatgtagcacttacttctcccccaacttcccttcatctgcatgagcagcccctgcttgtgggaatttttctggactatgaggccggagttgtatccttttataacgggaatactggctgccacatctttactttcccgaaggcttccttctctgatactctccggccctatttccaggtttatcaatattctcctttgtttctgcctcccccaggtgactaaggaaaagagcagaagctccttggtttaaccagcacagagaaaataatataaatcccataagggcagacgtttggtctgttttcttcgctgtcatttccttagtagttagactagtgctgagattttagtggatatataattgatttatgttgaatatatggacttagcaactaaaaataccacagatggttaacctggactggggcaaagcaagataatagtgatgatcgtatgttgctgtctccatccgtctttaatgggtcagggctttgatttccaagggtcttcaggtgatgagtaggggtacccacaagtcagaaggtctgcgttctcctagtttgtttgctgccatttgaactcatgtagggaatgaaagaaagctgcaattatccgccaactgcatttaaaacaaaacaaaacagaaaaatcaaaataacattgactcttccaaccactgacatgttgtttaataatctaagcggcagtcctggaggctaccagacttactgagttctacctgagaaacagccaagcaaagtgtgagagaagggttaagactggcttacaatgagatgcttcaaatgaaaagggaattatgagtaaaattgaactttgatgggggattcagttctggaaaagaatttggtattttccagtctgctaggaccaattaccttgaaatattttaaaatctcagtaaatagttattgctgaaatggctgttggcagttcttattatgattcagagaagagcaaatagaccttaacttcattttgaaaaagaccaaattaccatacccgagtgagtaatgacaggactacaactaaaacataaacaacattaatgatgaccataaaaagtcacaaaattgctaaatgttataatttagagttgacataaaaattgatggccaggcatggtggctcacgcctgtaatcccagaactatgtgaggctgaggcaggtggatcacttgaggtcaggagttcaacaccagcctggccaacatggtgaaaccctgtctctactaaaaatacaaaaattagccgggcatggtggtaggggcctgtaacccagctactcgtgaggccaaggcaggagaattgcttgagcctgcagcagctgcagtaagccaagatcatgctgtgcctcaaggaaaaaaaaaattaatgtttactgatatttgttgaagtcctacaacatcacctctgagaataggagaaatgaagcaacagttgtgtctagatgtcagaggcatggctgggcctccatctctgcctaagggagatataaaagagttcaaactattgcccatgttccccagggtcagaagttctaattatgatgatagaggctgggttgtaagtagtaagtgaagggtagcagaatatgccatctttggcataagaagtattttgagttgaagacaattgagaaaaaaaaaaaaaaaaaa

SEQ ID NO: 924 - protein, 465 aa, Homo sapien
MASTTSTKKMMEEATCSICLSLMTNPVSINCGHSYCHLCITDFFKNPSQKQLRQETFCCPQCRAPFHMDSLRPNKQLGSLIEALKETDQEMSCEEHGEQFHLFCEDEGQLICWRCERAPQHKGHTTALVEDVCQGYKEKLQKAVTKLKQLEDRCTEQKLSTAMRITKWKEKVQIQRQKIRSDFKNLQCFLHEEEKSYLWRLEKEEQQTLSRLRDYEAGLGLKSNELKSHILELEEKCQGSAQKLLQNVNDTLSRSWAVKLETSEAVSLELHTMCNVSKLYFDVKKMLRSHQVSVTLDPDTAHHELILSEDRRQVTRGYTQENQDTSSRRFTAFPCVLGCEGFTSGRRYFEVDVGEGTGWDLGVCMENVQRGTGMKQEPQSGFWTLRLCKKKGYVALTSPPTSLHLHEQPLLVGIFLDYEAGVVSFYNGNTGCHIFTFPKASFSDTLRPYFQVYQYSPLFLPPPGD

SEQ ID NO: 925 - DNA, 3615 bp, Homo sapien
cggtcctgcctcgctgccttcagtccctagtgtctgggtccccgccctccagccgcctttgagtcgtgcctgggtcctcgcccttgcctcagaaccgcgaagaaaggaagctcgcgtgtttgctagaaaacctagttgggagtgcgaggcagagaacgttcagcacctttgttcctcccgaaccctcgggacagaggcagggttctgagggcagggattccccctcgtcttggccccaccgcccgggctgggcactaaactcgggccgcggcggggcgagcgaggcgggctccggagggagctgacgcctgatgatggcgcagtccaacatgtttaccgtggctgatgtgttgagtcaagatgaactgcgcaaaaagctataccagacgtttaaggatcggggtatactggatacactcaagacacaacttcgaaaccagctaattcatgagttgatgcaccctgtattgagtggagaactgcagcctcggtccatttcagtagaagggagctccctcttaataggcgcctctaactctttagtggcagatcacttacaaagatgtggctatgaatattcactttctgttttctttccagaaagtggtttggcaaaagaaaaggtatttactatgcaggatctattacaactcattaaaatcaaccctacttccagtctctacaaatcactggtttcaggatctgataaagaaaatcaaaaaggttttcttatgcattttttaaaagaattggcagaatatcatcaagctaaagagagttgtaatatggaaactcagacaagttcgacatttaacagagattctctggctgagaagcttcagcttattgatgatcagtttgcagatgcttaccctcagcgtatcaagttcgaatctttagaaataaagctaaatgagtataagagagaaatagaagagcaacttcgggcagaaatgtgtcaaaagttgaagttttttaaagataccgagatagcaaaaattaaaatggaagcaaaaaaaaagtatgaaaaggagttaaccatgttccagaatgattttgaaaaagcttgtcaagcaaaatctgaagctctcgttcttcgggaaaagagtacccttgaaagaattcacaagcaccaagagattgaaacaaaagaaatttatgctcaaaggcaacttttactaaaagatatggatttgctaagaggaagagaagcagagctgaagcaaagagttgaagcttttgaattgaaccagaagctccaggaagaaaaacataaaagcataactgaggcacttaggagacaggagcagaatataaagagttttgaggagacctatgaccgaaagctcaagaatgaacttctaaagtatcaacttgaactgaaggatgactacatcattagaactaatcgactgattgaagatgaaaggaagaataaagaaaaagctgttcatttgcaagaggagctcatagctattaattcaaaaaaggaggaactcaatcaatctgtaaatcgtgtgaaagaacttgagcttgaattagagtctgtcaaagcccagtctttggcaataacaaaacaaaaccatatgctgaatgaaaaggttaaagagatgagtgattattcactactaaaagaagagaaactggagcttctggcacaaaataaattacttaaacaacaactggaagagagtagaaatgaaaacctgcgtctcctaaaccgcctagctcagccggctcctgaacttgcagtctttcagaaagaactacggaaagccgaaaaggctatagtggttgagcatgaggagttcgaaagctgcaggcaagctctgcacaaacaactgcaagacgaaattgagcattctgcacagctgaaggcccagattctaggttacaaagcttctgtaaagagtttaactactcaggttgccgatttaaaattgcaactgaagcaaactcagacagccctagagaatgaagtgtactgcaatccaaagcagtctgtgatcgatcgttctgtcaatggattaataaatggcaatgtggtgccttgcaatggtgagataagtggggatttcttgaacaatccttttaaacaggaaaacgttctagcacgtatggttgcatcaaggatcacaaattatccaactgcatgggtggagggtagttcccctgattctgaccttgagtttgtagccaatactaaggcaagggtcaaagagcttcagcaagaggccgaacgcttggaaaaggctttcagaagttaccatcggagagtcattaaaaactctgccaaaagcccactagcagcaaagagcccaccatctctgcacttgctggaagccttcaaaaacattacttccagttccccggaaagacatatttttggagaggacagagttgtctctgagcagcctcaagtgggcacacttgaagaaaggaatgacgtcgtggaagcactgacaggcagtgcagcctcgaggctccgcgggggcacttcctccagacgcctctcttccacaccccttccaaaagcaaaaagaagcctcgaaagtgaaatgtatctggaaggtctgggcagatcacacattgcttcccccagtccttgtcctgacagaatgcccctaccatcacccactgagtctaggcacagcctctccatccctcctgtctccagccctccggagcagaaagtgggtctttatcgaagacaaactgaacttcaagacaaaagtgaattttcagatgtggacaagctagcttttaaggataatgaggagtttgaatcatcttttgaatctgcagggaacatgccaaggcagttggaaatgggcgggctttctcctgccggggatatgtctcatgtggacgctgctgcagctgctgtgcccctctcatatcagcacccaagtgtagatcagaaacaaattgaagaacaaaaggaagaagaaaaaatacgggaacagcaagtgaaagaacgaaggcagagagaagaaagaaggcagagtaacctacaagaagttttagaaagggaacgaagagaactagaaaaactgtatcaggaaaggaagatgattgaagaatcactgaagattaaaataaaaaaggaattagaaatggaaaatgaattagaaatgagtaatcaagaaataaaagacaaatctgctcacagtgaaaatcctttagagaaatacatgaaaatcatccagcaggagcaagaccaggagtcggcagataagagctcaaaaaagatggtccaagaaggctccctagtggacacgctgcaatctagtgacaaagtcgaaagtttaacaggcttttctcatgaagaactagacgactcttggtaaccatgtttgctgcccagcttctaacttacataccgtgagaagttacgtaacatttactcctttgtaaatgtttccctatcatcagacaaaactcaataaaaatgtgtgtaatccaatgtgggtttttttttccataattaattttgataccatagtgtgtgaaccaagaataatctagtcacgtgaaacctcttctccagtcatagtatttctcattcattataataaaagtaactggcttttaaaaaaaaaaaaaaaaaaaaaa

SEQ ID NO: 926 - protein, 1012 aa, Homo sapien
MMAQSNMFTVADVLSQDELRKKLYQTFKDRGILDTLKTQLRNQLIHELMHPVLSGELQPRSISVEGSSLLIGASNSLVADHLQRCGYEYSLSVFFPESGLAKEKVFTMQDLLQLIKINPTSSLYKSLVSGSDKENQKGFLMHFLKELAEYHQAKESCNMETQTSSTFNRDSLAEKLQLIDDQFADAYPQRIKFESLEIKLNEYKREIEEQLRAEMCQKLKFFKDTEIAKIKMEAKKKYEKELTMFQNDFEKACQAKSEALVLREKSTLERIHKHQEIETKEIYAQRQLLLKDMDLLRGREAELKQRVEAFELNQKLQEEKHKSITEALRRQEQNIKSFEETYDRKLKNELLKYQLELKDDYIIRTNRLIEDERKNKEKAVHLQEELIAINSKKEELNQSVNRVKELELELESVKAQSLAITKQNHMLNEKVKEMSDYSLLKEEKLELLAQNKLLKQQLEESRNENLRLLNRLAQPAPELAVFQKELRKAEKAIVVEHEEFESCRQALHKQLQDEIEHSAQLKAQILGYKASVKSLTTQVADLKLQLKQTQTALENEVYCNPKQSVIDRSVNGLINGNVVPCNGEISGDFLNNPFKQENVLARMVASRITNYPTAWVEGSSPDSDLEFVANTKARVKELQQEAERLEKAFRSYHRRVIKNSAKSPLAAKSPPSLHLLEAFKNITSSSPERHIFGEDRVVSEQPQVGTLEERNDVVEALTGSAASRLRGGTSSRRLSSTPLPKAKRSLESEMYLEGLGRSHIASPSPCPDRMPLPSPTESRHSLSIPPVSSPPEQKVGLYRRQTELQDKSEFSDVDKLAFKDNEEFESSFESAGNMPRQLEMGGLSPAGDMSHVDAAAAAVPLSYQHPSVDQKQIEEQKEEEKIREQQVKERRQREERRQSNLQEVLERERRELEKLYQERKMIEESLKIKIKKELEMENELEMSNQEIKDKSAHSENPLEKYMKIIQQEQDQESADKSSKKMVQEGSLVDTLQSSDKVESLTGFSHEELDDSW

SEQ ID NO: 927 - DNA, 1922 bp, Homo sapien
gcccctttctttctcctcgtcggcccgagagcaggaacacgataacgaaggaggcccaacttcattcaataaggagcctgacggatttatcccagacggtagaacaaaaggaagaatattgatggattttaaaccagagtttttaaagagcttgagaatacggggaaattaatttgttctcctacacacatagatagggtaaggttgtttctgatgcagctgagaaaaatgcagaccgtcaaaaaggagcaggcgtctcttgatgccagtagcaatgtggacaagatgatggtccttaattctgctttaacggaagtgtcagaagactccacaacaggtgaggacgtgcttctcagtgaaggaagtgtggggaagaacaaatcttctgcatgtcggaggaaacgggaattcattcctgatgaaaagaaagatgctatgtattgggaaaaaaggcggaaaaataatgaagctgccaaaagatctcgtgagaagcgtcgactgaatgacctggttttagagaacaaactaattgcactgggagaagaaaacgccactttaaaagctgagctgctttcactaaaattaaagtttggtttaattagctccacagcatatgctcaagagattcagaaactcagtaattctacagctgtgtactttcaagattaccagacttccaaatccaatgtgagttcatttgtggacgagcacgaaccctcgatggtgtcaagtagttgtatttctgtcattaaacactctccacaaagctcgctgtccgatgtttcagaagtgtcctcagtagaacacacgcaggagagctctgtgcagggaagctgcagaagtcctgaaaacaagttccagattatcaagcaagagccgatggaattagagagctacacaagggagccaagagatgaccgaggctcttacacagcgtccatctatcaaaactatatggggaattctttctctgggtactcacactctcccccactactgcaagtcaaccgatcctccagcaactccccgggaacgtcggaaactgatgatggtgtggtaggaaagtcatctgatggagaagacgagcaacaggtccccaagggccccatccattctccagttgaactcaagcatgtgcatgcaactgtggttaaagttccagaagtgaattcctctgccttgccacacaagctccggatcaaagccaaagccatgcagatcaaagtagaagcctttgataatgaatttgaggccacgcaaaaactttcctcacctattgacatgacatctaaaagacatttcgaactcgaaaagcatagtgccccaagtatggtacattcttctcttactcctttctcagtgcaagtgactaacattcaagattggtctctcaaatcggagcactggcatcaaaaagaactgagtggcaaaactcagaatagtttcaaaactggagttgttgaaatgaaagacagtggctacaaagtttctgacccagagaacttgtatttgaagcaggggatagcaaacttatctgcagaggttgtctcactcaagagacttatagccacacaaccaatctctgcttcagactctgggtaaattactactgagtaagagctgggcatttagaaagatgtcatttgcaatagagcagtccattttgtattatgctgaattttcactggacctgtgatgtcatttcactgtgatgtgcacatgttgtctgtttggtgtctttttgtgcacagattatgatgaagattagattgtgttatcactctgcctgtgtatagtcagatagtccatgcgaaggctgtatatattgaacattatttttgttgttctattataaagtgtgtaagttaccagtttcaataaaggattggtgacaaacacagaaaaaaaaaaaaaaaaaaaaa

SEQ ID NO: 928 - protein, 462 aa, Homo sapien
MQLRKMQTVKKEQASLDASSNVDKMMVLNSALTEVSEDSTTGEDVLLSEGSVGKNKSSACRRKREFIPDEKKDAMYWEKRRKNNEAAKRSREKRRLNDLVLENKLIALGEENATLKAELLSLKLKFGLISSTAYAQEIQKLSNSTAVYFQDYQTSKSNVSSFVDEHEPSMVSSSCISVIKHSPQSSLSDVSEVSSVEHTQESSVQGSCRSPENKFQIIKQEPMELESYTREPRDDRGSYTASIYQNYMGNSFSGYSHSPPLLQVNRSSSNSPGTSETDDGVVGKSSDGEDEQQVPKGPIHSPVELKHVHATVVKVPEVNSSALPHKLRIKAKAMQIKVEAFDNEFEATQKLSSPIDMTSKRHFELEKHSAPSMVHSSLTPFSVQVTNIQDWSLKSEHWHQKELSGKTQNSFKTGVVEMKDSGYKVSDPENLYLKQGIANLSAEVVSLKRLIATQPISASDSG

SEQ ID NO: 929 - DNA, 2189 bp, Homo sapien
agcggggcggaagtcggttcccgtgacgcggcgcgccccaagggccggctccgttgagggaagggagcccgcccggtggcggctggggtcggctgctgggaggaggtggtgggctggttcggacgtgggtcgaggctgtagcaggactccaggtgaggcctgaggaccactctgccctcccgcggcccgggctcgcgccgggggccatttaatcccgacagcttgcggcctgacgtcgctgcggcctggcagtgaccacgtcggcgtccggcccctcggccggcgatagagttgcggctaaaatgaaaggacgcccagttacatttgcatcgtagataaagaaagagcatttagtataagcatgtccgaaatgttgcgtgggatgtaggcatactaaaaccttattcgtggcctgtctgaaatccaaatggagctgggtattctgtgtttttatttgctaaatctggcagccgtacccgcggccccgggcagggagggagcagctgggctcggccagaccctgccggcgtctggggggcctgcgaagtggaggggagacgggcagccgggcagtggccggcgttccccggagctcggaccggttggattggactccgacgctaccgctccctctgctgaactattccggatgtaaaacactagggatcggagtttttcttggttttttaatctcattctagtgaccgagaagcttgctggcagtgcgctgatggatctgtgtgaataggccatttatttgacctcttcagtaacactgttctaaccggctgaaactgctttcttaggcattttcttaaaagcttggtggttaagagcacggaatttcgagtcagatttccaatcttggctctatcactatcctcggagtcatggggcagtcacatcatccctgtctctgtaatggtagctgcccctggataagtgttattaggtgattcagaagggtgggctgttgcccttgcctgaggttgcagtctgcggttcccaagccccaagacccgcctcagaactaactgcatttgcttttgactcctggcctttctctagggttgggaagaacatggaaagtgacctccctgccaaataactcagaagaggagtgtcggtagccaaatgtttcttcagaatacgtgtaaaagaaatgtttttcttccatctaggaagatgttaccgagtacttcagtgaattccttagtgcaggggaacggagtcttgaattccagggatgcggcaagacacacagccggagcgaaacgctacaaatatctgagaaggcttttccgctttcggcaaatggactttgaatttgctgcctggcagatgctctacctgttcacatccccacagagagtttacagaaattttcattatcgaaaacagacgaaggaccagtgggccagagatgaccctgctttcttggtcctgttaagtatctggctctgtgtgtccactataggatttggctttgtgctggacatgggattctttgagacaataaagcttctcctttgggttgtactcatagattgtgtaggcgttggtcttctgatagcaactttaatgtggttcatctctaacaagtatttagtgaaacgacagagcagagactatgatgtggaatggggctatgcttttgatgtgcatctcaatgctttttatccactcctggtcattttgcattttatccagctttttttcatcaaccatgttatcctgacagacacatttattggatatttagttggaaataccttatggttggttgcagttggctattatatctatgtaactttcctgggatacagtgcattgccatttttgaaaaatacagtaattcttctgtatccatttgcacctctgattctgctctacgggctttccctggcactgggatggaacttcacccatactctctgttctttctataagtacagagtgaaataaaaagtgagaagaagattcaatcgtaactgtgtcaacagtattgtgaagtgatcatttcttgtaaaacttgtaaataaactatcatctttgtagatatcttaaaggtgtaaagtttgcaaatttgaagaaatatatattaacactgtggtcaggtacattccttaaaactaattaaatgtacatttctataataaatattttttaaactaaaaaaaaaaaaaaaa

SEQ ID NO: 930 - protein, 259 aa, Homo sapien
MLPSTSVNSLVQGNGVLNSRDAARHTAGAKRYKYLRRLFRFRQMDFEFAAWQMLYLFTSPQRVYRNFHYRKQTKDQWARDDPAFLVLLSIWLCVSTIGFGFVLDMGFFETIKLLLWVVLIDCVGVGLLIATLMWFISNKYLVKRQSRDYDVEWGYAFDVHLNAFYPLLVILHFIQLFFINHVILTDTFIGYLVGNTLWLVAVGYYIYVTFLGYSALPFLKNTVILLYPFAPLILLYGLSLALGWNFTHTLCSFYKYRVK

SEQ ID NO: 931 - DNA, 3906 bp, Homo sapien
ctggcgcgcgcacgcgcacgcgcacgcccaccgcgcggcttcccccgctccccggtgctgaggagagagcgatccgagggactgcgccgcccggacggcctgcagagcgctgccatcatgagtgaaattcgtaaggacaccttgaaggccattctgttggagttagaatgtcattttacatggaatttacttaaggaagacattgatctgtttgaggtagaagatacaattgggcaacagcttgaatttcttaccacaaaatctagacttgctctttataacctattggcctatgtgaaacacctaaaaggccaaaataaagacgcccttgagtgcttggaacaagcagaagaaataatccagcaagaacactcagacaaagaagaagtacgaagcctggtcacttggggaaactatgcctgggtgtattatcacatggaccagcttgaagaagctcagaagtatacaggtaagatagggaatgtctgtaagaaattgtccagtccttctaactacaagttggagtgtcctgagactgactgtgagaaaggctgggcactcttgaaatttggaggaaagtattatcaaaaggctaaagcggcttttgagaaggctctggaagtggagcctgacaatccagaatttaacatcggctatgctatcacagtgtatcggctggatgattctgatagagaagggtctgtaaagagcttttctctggggcctttgagaaaggctgttaccctgaacccagataacagctatattaaggtttttctggcactgaagcttcaagatgtacatgcagaagctgaaggggaaaagtatattgaagaaatcctggaccaaatatcatcccagccttacgtccttcgttatgcagccaagttctataggagaaaaaattcctggaacaaagctctcgaacttttaaaaaaggccttggaggtgacaccaacttcttctttcctgcatcaccagatgggactttgctacagggcacaaatgatccaaatcaagaaggccacacacaacagacctaaaggaaaggataaactaaaggttgatgagctgatttcatctgctatatttcatttcaaagcagccatggaacgagactctatgtttgcatttgcctacacagacctggccaacatgtatgctgaaggaggccagtatagcaatgctgaggacattttccggaaagctcttcgtctggagaacataaccgatgatcacaaacatcagatccattaccactatggccgctttcaggaatttcaccgtaaatcagaaaatactgccatccatcattatttagaagccttaaaggtcaaagacagatcaccccttcgcaccaaactgacaagtgctctgaagaaattgtctaccaagagactttgtcacaatgctttagatgtgcagagtttaagtgccctagggtttgtttacaagctggaaggagaaaagaggcaagctgctgagtactatgagaaggcacaaaagatagatccagaaaatgcagaattcctgactgctctctgtgagctccgactttccatttaaatacatactctaggaaattagctctaagtttttcccttcattttgggttctcctgtttgttttttttttattattttaatcccttgtttattatagagctaatatttattgaatagttattgtgtaccaagcattgtgctaaatactttatatgcattatgatgaatcttgtgcggttttctttctttttttctttttaattaaaatactataatccattgagaaatagcaatattctagctattgtaacttctaaaaatggtatggccattagatctgtgctttttatctctgctctttgaatttctcatattatatagtaaatatattcctacgtaaacctttgatacctagatcaggaatactcttccaggagtacaaaattacattattgatagttaagctcttaattgtgtagcttgcaaaagacagcactttttagttacagatgttttgactttgatgaggatatttagctatcaatctaatagtcacctaaaatatcttttttgttggaaaaaagtttataataaaaaagtttgtcatctctagtgacttcaataaagaaaaaactagaagaggagaaaaaggatttcctcaaattttaaatatgtaacttcagggattcaatccccaaatgtttattaagtagctagaaataattatgtggaaaaaaatgaataatggaaaatagtgagtctcaaattgtttttttttaactaaaatctgcaatgaatctagatgcaattaattttattccttccaactaaaattacaatatttttaggttaaaattattgagatataaagcagccattgggaaattgggagaaatgataaacaaatggaaaaagaagatgtccctaacctacacccatagattaccaaggtttcagtgtactagttttgaatctgttctgaatggagtttttataccctcaatttctggcctttggctattttagcatttcaaagtgacttctatgaagctttttttttaatgtgaaattttcagaatgttgtttttttcatgtagatactccaggaagagttaagcactgctttcagttttaatatccaccttgaggggtcgctgcttgagggctcttatcccaggggactttttaattcggatgttacttaatgtggcttctctaatgtagtttctttgattaccgactacacaattatgtaccatcacagtattagtggaaaagtaccatgtgatttaattctccattcctccaatgtaactcttaaaattattatgtatgtgtatgtgttttactttttgttttttatcatctttaaaatttctattatggtttgattattataaaaataatgaattctcactgtaaatttcaaaaaaaaaattacaaaagtatgtgaatttaaaaatgagagcagtcccctcaccctaccacagttccacaccctcaaggtaaacttataacttataatttgatatgtaaacttccagatcttttttctatgcgtaatcagacatacatatatactgcagtgtatctcacgtattaatttttaaaaatcttttgttttacttaattctgtttttattattattattattttgtttgatctattaaggaagaacaaggaagggaatgatctttactcaagaatttcagaaagtcagcactgaagtcctgacctatcagtagacacatttgtccctttcagatattttaggatattctagcaaagcaggccatttctcccacctgaaagtacataacttctatcacttgccacataattaaaagaactcacattaagcggttactcagacagttaatcatagaaaagattatttgcttcatcagttcatagaaaagattatttgcttcatcagttaacttgtttttataaatcagggcctgtgttcatacacagaaggggcctgagatttctgcactttaaacaagctcctcctaggtgaggatgctgtggctgttctaattacattttgagtagtaaggtctacagcattgttcctcaaacttggctacgtattggaatcacctaaaaagttaaaacaaaacatggatgtctgggtcccgccccatagagaatgacttaattggcatggggtgcagtccaggcatcatgatttttagatttcccagttggaacttgtgcagcaaagtttgggagctactgatggacatgtgaaaagtaagtataaatggaataaaattaattaggctaataggcttaacccaggaaatcctaagttccttgaatatccagtttgcatttgggactcctcatcatatacttggtatataatactctaataaaagctgcctgagttga

SEQ ID NO: 932 - protein, 482 aa, Homo sapien
MSEIRKDTLKAILLELECHFTWNLLKEDIDLFEVEDTIGQQLEFLTTKSRLALYNLLAYVKHLKGQNKDALECLEQAEEIIQQEHSDKEEVRSLVTWGNYAWVYYHMDQLEEAQKYTGKIGNVCKKLSSPSNYKLECPETDCEKGWALLKFGGKYYQKAKAAFEKALEVEPDNPEFNIGYAITVYRLDDSDREGSVKSFSLGPLRKAVTLNPDNSYIKVFLALKLQDVHAEAEGEKYIEEILDQISSQPYVLRYAAKFYRRKNSWNKALELLKKALEVTPTSSFLHHQMGLCYRAQMIQIKKATHNRPKGKDKLKVDELISSAIFHFKAAMERDSMFAFAYTDLANMYAEGGQYSNAEDIFRKALRLENITDDHKHQIHYHYGRFQEFHRKSENTAIHHYLEALKVKDRSPLRTKLTSALKKLSTKRLCHNALDVQSLSALGFVYKLEGEKRQAAEYYEKAQKIDPENAEFLTALCELRLSI

SEQ ID NO: 933 - DNA, 5170 bp, Homo sapien
gtttcctgtcgccgtcgttgcccgggccatggcgacctgcatttggctgcggagctgtggggcccggcgcctcgggtcgacgtttccaggctgccgcctccgcccccgcgccggcggcctggtccctgcctccgggcctgcgcccggcccggcccagctccgctgctacgctgggcgcctggcgggcctctctgcggcgctgctgcgcaccgacagcttcgtgggcggccgctggctcccggccgccgccaccttccccgtgcaagacccggccagcggcgccgctctgggcatggtagccgactgcggggtgcgagaggcccgcgccgccgtgcgcgctgcctacgaggctttctgccgctggagggaggtctccgccaaggagaggagttcattacttcggaagtggtacaatttaatgatacaaaataaggatgaccttgccagaataatcacagctgaaagtggaaagccactgaaggaggcacatggagaaattctctattccgcctttttcctagagtggttctctgaggaagcccgccgtgtttacggagacattatccacaccccggcaaaggacaggcgggccctggtcctcaagcagcccataggcgtggctgcagtcatcaccccgtggaatttccccagtgccatgatcacccggaaggtgggggccgccctggcagccggctgtactgtcgtggtgaagcctgccgaagacacgcccttctccgccctggccctggctgaggtaaatcagggatttcttcttgatttggatccattgttgcttgcaagccaggctgggattccttcaggtgtatacaatgttattccctgttctcgaaagaatgccaaggaagtaggggaggcaatttgtactgatcctctggtgtccaaaatttcctttactggttcaacaactacaggaaagatcctgttgcaccacgcagcaaactctgtgaaaagggtctctatggagctgggcggccttgctccatttatagtatttgacagtgccaacgtggaccaggctgtagcaggggccatggcatctaaatttaggaacactggacagacttgtgtttgctcaaaccaattcttggtgcaaaggggcatccatgatgcctttgtaaaagcattcgccgaggccatgaagaagaacctgcgcgtaggtaatggatttgaggaaggaactactcagggcccattaattaatgaaaaagcggtagaaaaggtggagaaacaggtgaatgatgccgtttctaaaggtgccaccgttgtgacaggtggaaaacgacaccaacttggaaaaaatttctttgagcctaccctgctgtgcaatgtcacccaggacatgctgtgcactcatgaagagactttcgggcctctggcaccagttatcaagttcgatacagaggaggaggctatagcaatcgctaacgcagctgatgttgggttagcaggttatttttactctcaagacccagcccagatctggagagtggcagagcagctggaagtgggcatggttggcgtcaacgaaggattaatttcctctgtggagtgcccttttggtggagtgaagcagtccggccttgggcgagaggggtccaagtatggcattgatgagtatctggaactcaagtatgtgtgttacgggggcttgtaggattctttggttctttaaaaaaatttaaaaggagacttatctacatatataggtacatgccatccattattttaaataaactaataggttttcagaattatgaatttttcagaactcatccagtccttgtaatcttaaacagatgcaaatcctacccctgcccttaatgtaactagggaccaatatgtgccacgtgcctgtggctgcagactcccagagaaccagcactgggtttacagaatgaggccctggctccccaccacagccccagctgcctcagagcaggcacagcacaaggcaggcccagccccatgggccgtcacaaaggcttgatcactgcctgggcagtggcacaaccatcccccatgtcgctacagaacatgggcccagagcaccttgaaggagacccttgactgtgactggcaggcaggtgaggggcacagcacccctccccggcatctgccagctcagcacagaagacaccgaatgtgcatctggaggtgttgcggcagaggtttgagtgaaccctctttcaaagacaataaatagcacagaattgtccgtgcttctgtgaggcacgaaggagcacctctccctattcctgaaccatattttaattgatgcctttattgtcccaaatttaccacttaaagaattctattttcatttctgtcctgtttgccacttcatttcatttccttgagtaaatgagctgaagtgtaaagcaaagaatagcagaagcagcttggtaggatggaaggcacgcagtggcatggcctggctccttccctgagtggccttgttgccttgggcgtgtgttcagcacctcccatcccatggatacagtggagattccatacaggccttacttagctccttgcgatactgtgagccagagagaaagtaaaagcacttcacaaaaaaatgaaaattctaaggacatacaagagccattgttacgagcagcaccgcccagcccttccttgcctactgtcagtggctttgccaagatgggaggaggccagtgcccacttgcccaccgacctgagcctgagtaagtggctgtcacctgagcctgttctttctgtcctggtgtggtgctgctccctcacctccaaaagagcaaaagtactttcaccacagtcaacccaaaagggaaagaatttctgtaattgccaacccactttgtagaagaggcatgagcccttgaatttcaggcaccttttatctaatgagagtttttacagctcatcattcaaataacgcacaaaaaacaaaagccgctatgaccggcgttgcctctcactttgaaagaaagactccgtaatcttaaacagatgcaaatccaattaggcggccaagtaggtggagacgaagcaccttcctttccccatctctgtctgtgtagactccacttacatcttgtggttattctgggttgtggaaggaaaatgtgaatgaaagtagtgctggatgcaattactcctgaaccccacctaggatttaacatccctcattgagccactgggaagctatggttgagtaactaaaggtctggcaagaccctgggcacacagggagctgcctagcatctggcctggagtgtactagccacattcccaaggtcccaaggagaaggaagagctgaaattcatctcctagtgacagtgccccggccctgtcaagaatcacatactcagcattttgacagttaatgtcttctctttatttgtgtagtttttaggtggttttatataacattttaattacttgtgatttagatgtatccatcctttttctattaagaatacaaatgctgggctgggcacagtggctcacgcctgtaatcccaacaccttgggaggccaaggcaggcagatcacgacatcaggagatcgagaccatcctggctaacacggtgaaaccccgtctctactaaaaatacaaaaaaaattagtcggatgtggtggcaggtgcctgtagtcccagctactctggaggctgaggcaggagaatggcgtgaacccaggaggcggagcttgcagtgagcagagatcacgccactgcactccagcctggatgacagagcgagactccgcctcaaaaaaagaatacaaatgctccaacattattttttataactctggattaccgatgctgagatgtgtgcaggaatacttccaaataaatttttaacattgtaagccagtagattctttggctgggtggcaaattttgagtcttcttgcatatttggctcatgggttcataaattgaggccagagactcattgtatatccttgatcaattttctaattaaaggaaatagcttattgtttagtaaaatggcccttggttgtgggaagaaagagaattatttttaactgaacgtttttgttgttttttaaataaagtagccatatgtaacgggattttaaaaatatatacattttacaacatggactagaaaaggaccattagatcaggggttggcaaactatggcccacgaatcaaacctggcctgccacctgtttttatacaacctgtgagctaagaatggtttatatgttttcaaatgattgggcagaaaatcaaaagaagaacaatatttcatgacacctgaaaattctatgaaattcagatttcagtgtccataaacaaaatgttattagagcatagccacacccattcatttatggtattgtctgggactgctttcttggcagagttgaatagttgggacagggacagtatagcctgcaaagcctaaaagatttactacttgtctccttaaagaaaaagtttgccagctcctgatctagaccaagagggagatattgaccttacttgcatttatccggcattatttcaacacctcctgtgaagaaagtacttttctggcatagctaccgtgagttctcagcaggaacttcccagcgatgataatgtacatgaaattagccacgtaacaagagtctatttgccttgaaaaaacaattatccttgaacttcctccagctatgcagggattctcattaaagagctgatctgcatctgtttatccattttagtagcttttaaatatgattttatgtgaagtgccatttctttattctactaaagagagacagcagaaataaagatcagaagcaaatgtgagcaaatctgttttactgttaacttcaattatgaacttgaaattgtgccacatgactttttcctctaaaaactggatcctagtgttttaattacctgtgtgcagctattttaaatagcattttacttgaataatatgtatgttgtcattgtttcatgctatactttgtgggataaaacttgggaatgagtgtggtaagaaatttataaagttttgcttttaaaacgtggacataactcatttttctagtttttgacaattgtgtgttttagtgtctagtctgcagagagctgtgtgattaataaacgtggaattaacagaatttcctctccctgta

SEQ ID NO: 934 - protein, 548 aa, Homo sapien
MATCIWLRSCGARRLGSTFPGCRLRPRAGGLVPASGPAPGPAQLRCYAGRLAGLSAALLRTDSFVGGRWLPAAATFPVQDPASGAALGMVADCGVREARAAVRAAYEAFCRWREVSAKERSSLLRKWYNLMIQNKDDLARIITAESGKPLKEAHGEILYSAFFLEWFSEEARRVYGDIIHTPAKDRRALVLKQPIGVAAVITPWNFPSAMITRKVGAALAAGCTVVVKPAEDTPFSALALAEVNQGFLLDLDPLLLASQAGIPSGVYNVIPCSRKNAKEVGEAICTDPLVSKISFTGSTTTGKILLHHAANSVKRVSMELGGLAPFIVFDSANVDQAVAGAMASKFRNTGQTCVCSNQFLVQRGIHDAFVKAFAEAMKKNLRVGNGFEEGTTQGPLINEKAVEKVEKQVNDAVSKGATVVTGGKRHQLGKNFFEPTLLCNVTQDMLCTHEETFGPLAPVIKFDTEEEAIAIANAADVGLAGYFYSQDPAQIWRVAEQLEVGMVGVNEGLISSVECPFGGVKQSGLGREGSKYGIDEYLELKYVCYGGL

SEQ ID NO: 935 - DNA, 3286 bp, Homo sapien; identical to SEQ ID NO: 923

SEQ ID NO: 936 - protein, 465 aa, Homo sapien; identical to SEQ ID NO: 924

SEQ ID NO: 937 - DNA, 1750 bp, Homo sapien
caccgcgcaagcgcatcctggcctttcttcagtccccacgtgcgatccttcccggcaactttttcgagaaaaatgcccaaattcaaggcggcccgtggggtggggggtcaggaaaaacatgcgcccctggccgatcagatcctggctgggaatgcggtgcgggcgggggtccgggagaagcggcggggtcgcgggacaggagaagcggaggaagagtatgtggggccccggctgagccgacggattttgcagcaagcacggcagcaacaggaggaactcgaggccgagcatgggactggggacaagcccgcggcgccgcgggaacgcaccacgcggctgggtccaagaatgcctcaggatggatcagatgacgaggacgaggagtggcccaccctggagaaggctgccacaatgacagcagcgggccatcatgcagaggtggttgtggaccctgaggatgagcgtgccatagagatgttcatgaacaagaaccctcctgccaggcgcaccctggctgacatcatcatggagaagctgactgagaagcagacagaggttgagacagtcatgtcagaggtgtcgggcttccctatgccccagctggacccccgggtcctagaagtgtacaggggggtccgggaggtattatctaagtaccgcagtggaaaactgcccaaggcatttaagatcatccctgcactctccaactgggagcaaatcctctacgtcacagagccggaggcctggactgcagctgccatgtaccaggccaccaggatttttgcctctaacctgaaggaacgcatggcccagcgcttctacaaccttgtcctgctccctcgagtacgagatgacgttgctgaatacaaacgactcaacttccatctctacatggctctcaagaaggcccttttcaaacctggagcctggttcaaagggatcctgattccactgtgcgagtctggcacttgtaccctccgggaagccatcattgtgggtagcatcatcaccaagtgctccatccctgtgttgcactccagtgcggccatgctgaaaattgctgagatggaatacagcggtgccaacagcatcttcctgcgactgctgctggataagaagtatgcactgccttaccgggtgctggatgccctagtcttccacttcctggggttccggacagagaagcgtgaactgcctgtgctgtggcaccagtgcctcctgactttggtccagcgctacaaggccgacttggccacagaccagaaagaggccctcttagaactgctccggctgcagccccatccacagctatcgcccgaaatcaggcgtgagcttcagagtgcagtcccccgcgatgtggaagatgttcccatcaccgtggagtgaggaaaacagtcagctgtcctggccaaaggggtttggaaggacaccaagacccccgttggtgactgaagatgacactgagctttaatggctgaagacccagatcagggcagtgacagatcacagggacatctgtggctcccagtccaggacaggaaggactgagggtctggctggttccctcttccattctaggcccttatccctgtttagttctgagagccaacttgagataccatatgctagcattcccagtccccagctggggcttggtgtgagtactttttctatggctattgtgtcaggtcactgtggataaaggcaaagacagatatttattgaaaaaaaaaaaaaaaaaaaaaaaaaa

SEQ ID NO: 938 - protein, 301 aa, Homo sapien
MNKNPPARRTLADIIMEKLTEKQTEVETVMSEVSGFPMPQLDPRVLEVYRGVREVLSKYRSGKLPKAFKIIPALSNWEQILYVTEPEAWTAAAMYQATRIFASNLKERMAQRFYNLVLLPRVRDDVAEYKRLNFHLYMALKKALFKPGAWFKGILIPLCESGTCTLREAIIVGSIITKCSIPVLHSSAAMLKIAEMEYSGANSIFLRLLLDKKYALPYRVLDALVFHFLGFRTEKRELPVLWHQCLLTLVQRYKADLATDQKEALLELLRLQPHPQLSPEIRRELQSAVPRDVEDVPITVE

SEQ ID NO: 939 - DNA, 1259 bp, Homo sapien
ccggagctgggttgctcctgctcccgtctccaagtcctggtacctccttcaagctgggagagggctctagtccctggttctgaacactctggggttctcgggtgcaggccgccatgagcaaacggaaggcgccgcaggagactctcaacgggggaatcaccgacatgctcacagaactcgcaaactttgagaagaacgtgagccaagctatccacaagtacaatgcttacagaaaagcagcatctgttatagcaaaatacccacacaaaataaagagtggagctgaagctaagaaattgcctggagtaggaacaaaaattgctgaaaagattgatgagtttttagcaactggaaaattacgtaaactggaaaagattcggcaggatgatacgagttcatccatcaatttcctgactcgagttagtggcattggtccatctgctgcaaggaagtttgtagatgaaggaattaaaacactagaagatctcagaaaaaatgaagataaattgaaccatcatcagcgaattgggctgaaatattttggggactttgaaaaaagaattcctcgtgaagagatgttacaaatgcaagatattgtactaaatgaagttaaaaaagtggattctgaatacattgctacagtctgtggcagtttcagaagaggtgcagagtccagtggtgacatggatgttctcctgacccatcccagcttcacttcagaatcaaccaaacagccaaaactgttacatcaggttgtggagcagttacaaaaggttcattttatcacagataccctgtcaaagggtgagacaaagttcatgggtgtttgccagcttcccagtaaaaatgatgaaaaagaatatccacacagaagaattgatatcaggttgatacccaaagatcagtattactgtggtgttctctatttcactgggagtgatattttcaataagaatatgagggctcatgccctagaaaagggtttcacaatcaatgagtacaccatccgtcccttgggagtcactggagttgcaggagaacccctgccagtggatagtgaaaaagacatctttgattacatccagtggaaataccgggaacccaaggaccggagcgaatgaggcctgtatcctccctggcagacacaacccaataggagtcttaatttatttcttaacctttgctatgtaagggtctttggtgtttttaaatgattgtttcttcttcatgcttttgcttgcaatgtagtcaataaaacc

SEQ ID NO: 940 - protein, 335 aa, Homo sapien
MSKRKAPQETLNGGITDMLTELANFEKNVSQAIHKYNAYRKAASVIAKYPHKIKSGAEAKKLPGVGTKIAEKIDEFLATGKLRKLEKIRQDDTSSSINFLTRVSGIGPSAARKFVDEGIKTLEDLRKNEDKLNHHQRIGLKYFGDFEKRIPREEMLQMQDIVLNEVKKVDSEYIATVCGSFRRGAESSGDMDVLLTHPSFTSESTKQPKLLHQVVEQLQKVHFITDTLSKGETKFMGVCQLPSKNDEKEYPHRRIDIRLIPKDQYYCGVLYFTGSDIFNKNMRAHALEKGFTINEYTIRPLGVTGVAGEPLPVDSEKDIFDYIQWKYREPKDRSE

SEQ ID NO: 941 - DNA, 1194 bp, Homo sapien
agcctttaagatttccggggatggaatccgaaatggaaacgcagagcgccagggcagaggagggctttacccaggtcacccgcaagggtggccgacgggcgaagaaacgacaggctgaacagctgtccgcagcaggagagggcggggatgcgggccgcatggacacagaggaggccaggccggcgaagaggcccgtcttcccacccctctgtggggacgggctcctgagtgggaaagaagaaacaaggaaaattccagtcccagctaacagatacacaccattgaaagaaaactggatgaagatatttactcctattgtggaacatttgggacttcagatacgctttaacttgaaatcaaggaatgtagaaatcaggacttgtaaagaaaccaaggatgttagtgctctgacaaaagcagctgattttgtgaaagcttttattctcggctttcaggtggaggatgcacttgccctcatcaggttggatgacctcttcctagagtcttttgaaattacagatgttaaacccctaaagggagaccatctatccagggcaataggaagaatcgctggcaaaggaggaaaaaccaaattcaccatagagaatgtgacacggacaaggatagttttggctgatgtgaaagttcacatccttggctccttccaaaatatcaagatggcaagaactgccatttgcaacctaatcttgggaaatcctccttccaaggtttatggcaatattcgagctgtggctagcagatcagcagatcgattctgatttcaagtcagagactttttatcttgcctttggactctggtgaaaaatactttacagtggtcggtcacaagaaaccatctgaacaatttcagtcatttgaagcctccgtcccttcttccattctcagccagaagcataaacagaaaagaaagatttaagaggattcacactcaacaggttttaggataatttaaatatcaaaaattgattgttatacttacacattaggtataatttatcatttatctgaaatcacatgtagcagattgcatagtctgtaatcctctcagagggaaacttcttgtttaaacagctctatatggatttatacttttatatttataaatttataacttcatacaaatttataaacatttctttataaattgtaatttaatagattatctcagaaaaa

SEQ ID NO: 942 - protein, 252 aa, Homo sapien
MESEMETQSARAEEGFTQVTRKGGRRAKKRQAEQLSAAGEGGDAGRMDTEEARPAKRPVFPPLCGDGLLSGKEETRKIPVPANRYTPLKENWMKIFTPIVEHLGLQIRFNLKSRNVEIRTCKETKDVSALTKAADFVKAFILGFQVEDALALIRLDDLFLESFEITDVKPLKGDHLSRAIGRIAGKGGKTKFTIENVTRTRIVLADVKVHILGSFQNIKMARTAICNLILGNPPSKVYGNIRAVASRSADRF

SEQ ID NO: 943 - DNA, 3914 bp, Homo sapien
ctgtgaacaggtatctacagtcggtgaggcctcttatgaaggaagaagacttcaaacggatgacagcacttgctcaagattttgctgtcggtcttggaccaagattacagtggtatttgaagttaaaatcctggtgggctacaaattacgtgagcgactggtgggaggagtacatctacctccgaggacgagggccgctcatggtgaacagcaactattatgccatggatctgctgtatatccttccaactcacattcaggcagcaagagccggcaacgccatccatgccatcctgctttacaggcgcaaactggaccgggaggaaatcaaaccaattcgtcttttgggatccacgattccactctgctccgctcagtgggagcggatgtttaatacttcccggatcccaggagaggagacagacaccatccagcacatgagagacagcaagcacatcgtcgtgtaccatcgaggacgctacttcaaggtctggctctaccatgatgggcggctgctgaagccccgggagatggagcagcagatgcagaggatcctggacaatacctcggagcctcagcccggggaggccaggctggcagccctcaccgcaggagacagagttccctgggccaggtgtcgtcaggcctattttggacgtgggaaaaataagcagtctcttgatgctgtggagaaagcagcgttcttcgtgacgttagatgaaactgaagaaggatacagaagtgaagacccggatacgtcaatggacagctacgccaaatctctactacacggccgatgttacgacaggtggtttgacaagtcgttcacgtttgttgtcttcaaaaacgggaagatgggcctcaacgctgaacactcctgggcagatgcgccgatcgtggcccacctttgggagtacgtcatgtccattgacagcctccagctgggctatgcggaggatgggcactgcaaaggcgacatcagtccgaacattccgtaccccaccaggctgcagtgggacatcccgggggaatgtcaagaggttatagagacctccctgaacaccgcaaatcttctggcaaacgacgtggatttccattccttcccattcgtagcctttggtaaaggaatcatcaagaaatgtcgcacgagcccagacgcctttgtgcagctggccctccagctggcgcactacaaggacatgggcaagttttgcctcacatacgaggcctccatgacccggctcttccgagaggggaggacggagaccgtgcgcccctgcaccactgagtcatgcgacttcgtgcgggccatggtggacccggcccagacggtggaacagaggctgaagttgttcaagttggcgtctgagaagcatcagcatatgtatcgcctcgccatgaccggctctgggatcgatcgtcacctcttctgcctttacgtggtgtctaaatatctcgctgtggagtcccctttccttaaggaagttttatctgagccttggagattatcaacaagccagacccctcagcagcaagtggagctgtttgacttggagaataacccagagtacgtgtccagcggagggggctttggaccggttgctgatgacggctatggtgtgtcgtacatccttgtgggagagaacctcatcaatttccacatttcttccaagttctcttgccctgagacggattctcatcgctttggaaggcacctgaaagaagcaatgactgacatcatcactttgtttggtctcagttctaattccaaaaagtaattccactggagctgctgggaaggaaaacgagctcttctggtgcaaaccaaatgaaaaataggcattaatcctgaccttagctcgggatgaaacactgctcttaaaaaaactcagttttccttccagaaaatgtgggtgttttttttttcctagaacagtatctctcccctgtgaagcataaccccactacttccagacttgccctcccttgggggacatctgataaagtctcccctgatgtctccgcatcggcttggatttattaagggatgcaaatcttgttgagttaatgaaggaattagtagggttgtggcttcacacacagtggaatggaaatggtgtgctttctcagtggcaaccgaaggcctagtgcttaagggcatttagcatcatccaagcagggtaaacttttgttttgttaaaagaaaaatgtgttattcaagttggtgtccccagttgtagctaacacatctggaatgcactaaccaaaatgctgtgctttggagacctgcttttgtcaccgtgggtaaccgttcccgtctggtccagtagcctgtgtttgcctctccacatttgaagcaagcaggatgcaaggtcttcagttttactgaccttgtatgtcttcaagtcttcacaacccagtgccttaaaaatgaaaggccctaaatgtaagggagatggagagaaagatttattttgtagagtctttgggtggaattgtgggtatactgttcccttcacaattgactgagtatggataaccgtacataagcatttgctacaccccaccagccccctccccctcagaaacaccagttccttcccaagggcagctgtgccagactcccctcccgggactgccttcttgtcatcataagcaacaaaagaaataacaggcacatgtcataaaaggggagcaagggccgtgatggtcagataattcactcaagaataaaacatgacacgtgcctcaggaggatctctttcccaaagtgacagcaaggagggcagggcatcggccaccaagcggggactagcaagtgaggaaggggagggcagtccaccgtggtgaggagagagtggctccacgaccccaagggatggccttctcctcccacccggtgaggggaaagactcaccagagggtgatggagacagtatgccggctcaccttggtgaccagccaagatgtctcaagtgacggtgctaggtgttcacccagcctgtccttcagataggagtgccttcacgaaagcgtctcatggaccacaaagcaattatgcactgagtcatcttcagtatttaatgcaaaaatgaaacatcatggaatgaaattcccactgtctgtcatgacaagcttagctgtccattgttttaaattgtgtatttatttttttgaccacttggttctagttgggcctgactccttcagagtgctgcaccccgatagtacaacagcgatggctgaactgttggagtcgatggaaggtgcttgccggagaacacgtgcctttttttttttttttttttttgagatggagttgcactccagcctgggcgacagagcgagactccgtctaaaaaaaaaagcaaaaacaaaccaacaacaaaagcccctgactgtccgtcaagcaggcagcggggatgtagctctctctgccctgggcaagaatagcacttcccgttaaaagccagcagccggcgtcagtccctatcagagccagtagatcatgcactgttgaccactgagcaatctgtgttacactagagttcacagggcattttgagtgtagacgtgagtgcttaaacatatttgggtttctctctcaggttttaaatgtttcaaatgtaattgttgctcatcagtgcagttatcaatgcaattttatattccttgaggggagaaagaggggtcttattgtacatgtccaaggggggtgataagagtattatctgtttaatttaattggaacaaaccattgtcttaacgcagccatggtttgaatttgttatcttgggctgaccggtgcatgtaaatacagtatgctctttggatgtaaatcttagaaatgcagtgtgaatgtaggttatcattaataaaacattaaccccagtctactaaaaaaaaaaaaaaaa

SEQ ID NO: 944 - DNA, 4575 bp, Homo sapien
gagcgggcgagggagcgcgcgcggccgccacaaagctcgggcgccgcggggctgcatgcggcgtacctggcccggcgcggcgactgctctccgggctggcgggggccggccgcgagccccgggggccccgaggccgcagcttgcctgcgcgctctgagccttcgcaactcgcgagcaaagtttggtggaggcaacgccaagcctgagtcctttcttcctctcgttccccaaatccgagggcagcccgcgggcgtcatgcccgcgctcctccgcagcctggggtacgcgctgaagcccgggaggcttggcgccggcgaagacccaaggaccactcttctgcgtttggagttgctccccacaaccccgggctcgtcgctttctccatcccgacccagccggggcgcggggacaacacaggtcgcggaggagcgttgccattcaagtgactgcagcagcagcggcagcgcctcggttcctgagcccaccgcaggctgaaggcattgcgcgtagtccatgcccgtagaggaagtgtgcagatgggattaacgtccacatggagatatggaagaggaccggggattggtaccgtaaccatggtcagctggggtcgtttcatctgcctggtcgtggtcaccatggcaaccttgtccctggcccggccctccttcagtttagttgaggataccacattagagccagaagagccaccaaccaaataccaaatctctcaaccagaagtgtacgtggctgcgccaggggagtcgctagaggtgcgctgcctgttgaaagatgccgccgtgatcagttggactaaggatggggtgcacttggggcccaacaataggacagtgcttattggggagtacttgcagataaagggcgccacgcctagagactccggcctctatgcttgtactgccagtaggactgtagacagtgaaacttggtacttcatggtgaatgtcacagatgccatctcatccggagatgatgaggatgacaccgatggtgcggaagattttgtcagtgagaacagtaacaacaagagagcaccatactggaccaacacagaaaagatggaaaagcggctccatgctgtgcctgcggccaacactgtcaagtttcgctgcccagccggggggaacccaatgccaaccatgcggtggctgaaaaacgggaaggagtttaagcaggagcatcgcattggaggctacaaggtacgaaaccagcactggagcctcattatggaaagtgtggtcccatctgacaagggaaattatacctgtgtggtggagaatgaatacgggtccatcaatcacacgtaccacctggatgttgtggagcgatcgcctcaccggcccatcctccaagccggactgccggcaaatgcctccacagtggtcggaggagacgtagagtttgtctgcaaggtttacagtgatgcccagccccacatccagtggatcaagcacgtggaaaagaacggcagtaaatacgggcccgacgggctgccctacctcaaggttctcaaggttctcaaggccgccggtgttaacaccacggacaaagagattgaggttctctatattcggaatgtaacttttgaggacgctggggaatatacgtgcttggcgggtaattctattgggatatcctttcactctgcatggttgacagttctgccagcgcctggaagagaaaaggagattacagcttccccagactacctggagatagccatttactgcataggggtcttcttaatcgcctgtatggtggtaacagtcatcctgtgccgaatgaagaacacgaccaagaagccagacttcagcagccagccggctgtgcacaagctgaccaaacgtatccccctgcggagacaggtttcggctgagtccagctcctccatgaactccaacaccccgctggtgaggataacaacacgcctctcttcaacggcagacacccccatgctggcaggggtctccgagtatgaacttccagaggacccaaaatgggagtttccaagagataagctgacactgggcaagcccctgggagaaggttgctttgggcaagtggtcatggcggaagcagtgggaattgacaaagacaagcccaaggaggcggtcaccgtggccgtgaagatgttgaaagatgatgccacagagaaagacctttctgatctggtgtcagagatggagatgatgaagatgattgggaaacacaagaatatcataaatcttcttggagcctgcacacaggatgggcctctctatgtcatagttgagtatgcctctaaaggcaacctccgagaatacctccgagcccggaggccacccgggatggagtactcctatgacattaaccgtgttcctgaggagcagatgaccttcaaggacttggtgtcatgcacctaccagctggccagaggcatggagtacttggcttcccaaaaatgtattcatcgagatttagcagccagaaatgttttggtaacagaaaacaatgtgatgaaaatagcagactttggactcgccagagatatcaacaatatagactattacaaaaagaccaccaatgggcggcttccagtcaagtggatggctccagaagccctgtttgatagagtatacactcatcagagtgatgtctggtccttcggggtgttaatgtgggagatcttcactttagggggctcgccctacccagggattcccgtggaggaactttttaagctgctgaaggaaggacacagaatggataagccagccaactgcaccaacgaactgtacatgatgatgagggactgttggcatgcagtgccctcccagagaccaacgttcaagcagttggtagaagacttggatcgaattctcactctcacaaccaatgaggaatacttggacctcagccaacctctcgaacagtattcacctagttaccctgacacaagaagttcttgttcttcaggagatgattctgttttttctccagaccccatgccttacgaaccatgccttcctcagtatccacacataaacggcagtgttaaaacatgaatgactgtgtctgcctgtccccaaacaggacagcactgggaacctagctacactgagcagggagaccatgcctcccagagcttgttgtctccacttgtatatatggatcagaggagtaaataattggaaaagtaatcagcatatgtgtaaagatttatacagttgaaaacttgtaatcttccccaggaggagaagaaggtttctggagcagtggactgccacaagccaccatgtaacccctctcacctgccgtgcgtactggctgtggaccagtaggactcaaggtggacgtgcgttctgccttccttgttaattttgtaataattggagaagatttatgtcagcacacacttacagagcacaaatgcagtatataggtgctggatgtatgtaaatatattcaaattatgtataaatatatattatatatttacaaggagttattttttgtattgattttaaatggatgtcccaatgcacctagaaaattggtctctctttttttaatagctatttgctaaatgctgttcttacacataatttcttaattttcaccgagcagaggtggaaaaatacttttgctttcagggaaaatggtataacgttaatttattaataaattggtaatatacaaaacaattaatcatttatagttttttttgtaatttaagtggcatttctatgcaggcagcacagcagactagttaatctattgcttggacttaactagttatcagatcctttgaaaagagaatatttacaatatatgactaatttggggaaaatgaagttttgatttatttgtgtttaaatgctgctgtcagacgattgttcttagacctcctaaatgccccatattaaaagaactcattcataggaaggtgtttcattttggtgtgcaaccctgtcattacgtcaacgcaacgtctaactggacttcccaagataaatggtaccagcgtcctcttaaaagatgccttaatccattccttgaggacagaccttagttgaaatgatagcagaatgtgcttctctctggcagctggccttctgcttctgagttgcacattaatcagattagcctgattctcttcagtgaattttgataatggcttccagactctttgcgttggagacgcctgttaggatcttcaagtcccatcatagaaaattgaaacacagagttgttctgctgatagttttggggatacgtccatctttttaagggattgctttcatctaattctggcaggacctcaccaaaagatccagcctcatacctacatcagacaaaatatcgccgttgttccttctgtactaaagtattgtgttttgctttggaaacacccactcactttgcaatagccgtgcaagatgaatgcagattacactgatcttatgtgttacaaaattggagaaagtatttaataaaacctgttaatttttatactgacaataaaaatgtttctacagatattaatgttaacaagacaaaataaatgtcacgcaactt

SEQ ID NO: 945 - protein, 822 aa, Homo sapien
MVSWGRFICLVVVTMATLSLARPSFSLVEDTTLEPEEPPTKYQISQPEVYVAAPGESLEVRCLLKDAAVISWTKDGVHLGPNNRTVLIGEYLQIKGATPRDSGLYACTASRTVDSETWYFMVNVTDAISSGDDEDDTDGAEDFVSENSNNKRAPYWTNTEKMEKRLHAVPAANTVKFRCPAGGNPMPTMRWLKNGKEFKQEHRIGGYKVRNQHWSLIMESVVPSDKGNYTCVVENEYGSINHTYHLDVVERSPHRPILQAGLPANASTVVGGDVEFVCKVYSDAQPHIQWIKHVEKNGSKYGPDGLPYLKVLKVLKAAGVNTTDKEIEVLYIRNVTFEDAGEYTCLAGNSIGISFHSAWLTVLPAPGREKEITASPDYLEIAIYCIGVFLIACMVVTVILCRMKNTTKKPDFSSQPAVHKLTKRIPLRRQVSAESSSSMNSNTPLVRITTRLSSTADTPMLAGVSEYELPEDPKWEFPRDKLTLGKPLGEGCFGQVVMAEAVGIDKDKPKEAVTVAVKMLKDDATEKDLSDLVSEMEMMKMIGKHKNIINLLGACTQDGPLYVIVEYASKGNLREYLRARRPPGMEYSYDINRVPEEQMTFKDLVSCTYQLARGMEYLASQKCIHRDLAARNVLVTENNVMKIADFGLARDINNIDYYKKTTNGRLPVKWMAPEALFDRVYTHQSDVWSFGVLMWEIFTLGGSPYPGIPVEELFKLLKEGHRMDKPANCTNELYMMMRDCWHAVPSQRPTFKQLVEDLDRILTLTTNEEYLDLSQPLEQYSPSYPDTRSSCSSGDDSVFSPDPMPYEPCLPQYPHINGSVKT

SEQ ID NO: 946 - DNA, 1468 bp, Homo sapien
gccactccagccccgcgcccctcgccgcggccctcgggcgtctgcgccgcagctgccgcccccgcctctttggagtctctcgcggcctcaaagcgcggcctgcgtcgcttccggcagttccagaccgcgggcgatggctgccgctgggggcgcccggctgctgcgcgccgcttctgctgtcctcggcggcccggccggccggtggctgcaccacgctgggtcccgcgctggatccagcggcctgctgaggaaccgggggccgggcgggagcgcggaggcgagccggtcgctgagcgtgtcggcgcgggcccggagcagctcagaagataaaataacagtccactttataaaccgtgatggtgaaacattaacaaccaaaggaaaagttggtgattctctgctagatgttgtggttgaaaataatctagatattgatggctttggtgcatgtgagggaaccctggcttgttcaacctgtcacctcatctttgaagatcacatatatgagaagttagatgcaatcactgatgaggagaatgacatgctcgatctggcatatggactaacagacagatcacggttgggctgccaaatctgtttgacaaaatctatggacaatatgactgttcgagtgcctgaaacagtggctgatgccagacaatccattgatgtgggcaagacctcctgaactagaacaaataggaatattttcatggaattttacctatttttataattattatttcttaaagtgattaaatgagaacatggatgagtggacttcatattatgactagctttactattttaattcaccttgcataactactgaattttgtcattcttgaaagtatgcaatttttattttggttatattacaaaaatgtcaatcaaatattaaaaaatagttaatgtgatagaaaaaccttacatatttttttcttatgtttgtttagcgactttagcaaaatgttttcatataatctcatctgtttacctagaagataggttaaggaaatatattattattcctgtttgatgtgggtgaaggcagagatctaacctggcttgtttagggccataccactaattagaaaatctgtgctagaacctgtgtcttattcctataagctatgtgttcagactgaaactggagaaattatgactattttatttatagtagtagttaaatctgaatgtgtatggactaaaaatatttaattgctgagtaaactgcttaacttcaaagatagttattgaccttataaataaatatttcaaaattttgattcggaagactaagtctggagctagacattataatgctatcaaagaagttgatctctgttttgactaaactagaggaaaaatgattggatgagtttattcttttctaagcagaatggtttaactttgtactcaaagaaaaataatgctgatttataaatctctgcctataatagaatgg

SEQ ID NO: 947 - protein, 184 aa, Homo sapien
MAAAGGARLLRAASAVLGGPAGRWLHHAGSRAGSSGLLRNRGPGGSAEASRSLSVSARARSSSEDKITVHFINRDGETLTTKGKVGDSLLDVVVENNLDIDGFGACEGTLACSTCHLIFEDHIYEKLDAITDEENDMLDLAYGLTDRSRLGCQICLTKSMDNMTVRVPETVADARQSIDVGKTS

SEQ ID NO: 948 - DNA, 1381 bp, Homo sapien
cttctcttttccctagactgcagccagcggagcccgcagccggcccgagccaggaacccaggtccggagcctcaacttcaggatgttgacaacattgctgccgatactgctgctgtctggctgggccttttgtagccaagacgcctcagatggcctccaaagacttcatatgctccagatctcctacttccgcgacccctatcacgtgtggtaccagggcaacgcgtcgctggggggacacctaacgcacgtgctggaaggcccagacaccaacaccacgatcattcagctgcagcccttgcaggagcccgagagctgggcgcgcacgcagagtggcctgcagtcctacctgctccagttccacggcctcgtgcgcctggtgcaccaggagcggaccttggcctttcctctgaccatccgctgcttcctgggctgtgagctgcctcccgagggctctagagcccatgtcttcttcgaagtggctgtgaatgggagctcctttgtgagtttccggccggagagagccttgtggcaggcagacacccaggtcacctccggagtggtcaccttcaccctgcagcagctcaatgcctacaaccgcactcggtatgaactgcgggaattcctggaggacacctgtgtgcagtatgtgcagaaacatatttccgcggaaaacacgaaagggagccaaacaagccgctcctacacttcgctggtcctgggcgtcctggtgggcggtttcatcattgctggtgtggctgtaggcatcttcctgtgcacaggtggacggcgatgttaattactctccagccccgtcagaaggggctggattgatggaggctggcaagggaaagtttcagctcactgtgaagccagactccccaactgaaacaccagaaggtttggagtgacagctcctttcttctcccacatctgcccactgaagatttgagggaggggagatggagaggagaggtggacaaagtacttggtttgctaagaacctaagaacgtgtatgctttgctgaattagtctgataagtgaatgtttatctatctttgtggaaaacagataatggagttggggcaggaagcctatggcccatcctccaaagacagacagaatcacctgaggcgttcaaaagatataaccaaataaacaagtcatccacaatcaaaatacaacattcaatacttccaggtgtgtcagacttgggatgggacgctgatataatagggtagaaagaagtaacacgaagaagtggtggaaatgtaaaatccaagtcatatggcagtgatcaattattaatcaattaataatattaataaatttcttatatttaaggcaaaaaaaaaataaaaaaaaaaaaaaaaaaaaaaa

SEQ ID NO: 949 - protein, 238 aa, Homo sapien
MLTTLLPILLLSGWAFCSQDASDGLQRLHMLQISYFRDPYHVWYQGNASLGGHLTHVLEGPDTNTTIIQLQPLQEPESWARTQSGLQSYLLQFHGLVRLVHQERTLAFPLTIRCFLGCELPPEGSRAHVFFEVAVNGSSFVSFRPERALWQADTQVTSGVVTFTLQQLNAYNRTRYELREFLEDTCVQYVQKHISAENTKGSQTSRSYTSLVLGVLVGGFIIAGVAVGIFLCTGGRRC

SEQ ID NO: 950 - DNA, 1550 bp, Homo sapien
tcaacgcctgcctcccctcgagcgtcctcagcgcagccgccgcccgcggagccagcacgaacgagcccagcaccggccggatggagcgtccgcaacccgacagcatgccccaggatttgtcagaggccctgaaggaggccaccaaggaggtgcacacccaggcagagaatgctgagttcatgaggaactttcagaagggccaggtgacccgagacggcttcaagctggtgatggcctccctgtaccacatctatgtggccctggaggaggagattgagcgcaacaaggagagcccagtcttcgcccctgtctacttcccagaagagctgcaccgcaaggctgccctggagcaggacctggccttctggtacgggccccgctggcaggaggtcatcccctacacaccagccatgcagcgctatgtgaagcggctccacgaggtggggcgcacagagcccgagctgctggtggcccacgcctacacccgctacctgggtgacctgtctgggggccaggtgctcaaaaagattgcccagaaagccctggacctgcccagctctggcgagggcctggccttcttcaccttccccaacattgccagtgccaccaagttcaagcagctctaccgctcccgcatgaactccctggagatgactcccgcagtcaggcagagggtgatagaagaggccaagactgcgttcctgctcaacatccagctctttgaggagttgcaggagctgctgacccatgacaccaaggaccagagcccctcacgggcaccagggcttcgccagcgggccagcaacaaagtgcaagattctgcccccgtggagactcccagagggaagcccccactcaacacccgctcccaggctccgcttctccgatgggtccttacactcagctttctggtggcgacagttgctgtagggctttatgccatgtgaatgcaggcatgctggctcccagggccatgaactttgtccggtggaaggccttctttctagagagggaattctcttggctggcttccttaccgtgggcactgaaggctttcagggcctccagccctctcactgtgtccctctctctggaaaggaggaaggagcctatggcatcttccccaacgaaaagcacatccaggcaatggcctaaacttcagagggggcgaaggggtcagccctgcccttcagcatcctcagttcctgcagcagagcctggaagacaccctaatgtggcagctgtctcaaacctccaaaagccctgagtttcaagtatccttgttgacacggccatgaccactttccccgtgggccatggcaatttttacacaaacctgaaaagatgttgtgtcttgtgtttttgtcttatttttgttggagccactctgttcctggctcagcctcaaatgcagtatttttgttgtgttctgttgtttttatagcagggttggggtggtttttgagccatgcgtgggtggggagggaggtgtttaacggcactgtggccttggtctaacttttgtgtgaaataataaacaacattgtctg

SEQ ID NO: 951 - protein, 288 aa, Homo sapien
MERPQPDSMPQDLSEALKEATKEVHTQAENAEFMRNFQKGQVTRDGFKLVMASLYHIYVALEEEIERNKESPVFAPVYFPEELHRKAALEQDLAFWYGPRWQEVIPYTPAMQRYVKRLHEVGRTEPELLVAHAYTRYLGDLSGGQVLKKIAQKALDLPSSGEGLAFFTFPNIASATKFKQLYRSRMNSLEMTPAVRQRVIEEAKTAFLLNIQLFEELQELLTHDTKDQSPSRAPGLRQRASNKVQDSAPVETPRGKPPLNTRSQAPLLRWVLTLSFLVATVAVGLYAM

SEQ ID NO: 952 - DNA, 2379 bp, Homo sapien
ggaattccggtcggcctctcgcccttcagctacctgtgcgtccctccgtcccgtcccgtcccggggtcaccccggagcctgtccgctatgcggctcctgcctctagccccaggtcggctccggcggggcagcccccgccacctgccctcctgcagcccagcgctgctactgctggtgctgggcggctgcctgggggtcttcggggtggctgcgggaacccggaggcccaacgtggtgctgctcctcacggacgaccaggacgaagtgctcggcggcatgacaccactaaagaaaaccaaagctctcatcggagagatggggatgactttttccagtgcttatgtgccaagtgctctctgctgccccagcagagccagtatcctgacaggaaagtacccacataatcatcacgttgtgaacaacactctggaggggaactgcagtagtaagtcctggcagaagatccaagaaccaaatactttcccagcaattctcagatcaatgtgtggttatcagaccttttttgcagggaaatatttaaatgagtacggagccccagatgcaggtggactagaacacgttcctctgggttggagttactggtatgccttggaaaagaattctaagtattataattacaccctgtctatcaatgggaaggcacggaagcatggtgaaaactatagtgtggactacctgacagatgttttggctaatgtctccttggactttctggactacaagtccaactttgagcccttcttcatgatgatcgccactccagcgcctcattcgccttggacagctgcacctcagtaccagaaggctttccagaatgtctttgcaccaagaaacaagaacttcaacatccatggaacgaacaagcactggttaattaggcaagccaagactccaatgactaattcttcaatacagtttttagataatgcatttaggaaaaggtggcaaactctcctctcagttgatgaccttgtggagaaactggtcaagaggctggagttcactggggagctcaacaacacttacatcttctatacctcagacaatggctatcacacaggacagttttccttgccaatagacaagagacagctgtatgagtttgatatcaaagttccactgttggttcgaggacctgggatcaaaccaaatcagacaagcaagatgctggttgccaacattgacttgggtcctactattttggacattgctggctacgacctaaataagacacagatggatgggatgtccttattgcccattttgagaggtgccagtaacttgacctggcgatcagatgtcctggtggaataccaaggagaaggccgtaacgtcactgacccaacatgcccttccctgagtcctggcgtatctcaatgcttcccagactgtgtatgtgaagatgcttataacaatacctatgcctgtgtgaggacaatgtcagcattgtggaatttgcagtattgcgagtttgatgaccaggaggtgtttgtagaagtctataatctgactgcagacccagaccagatcactaacattgctaaaaccatagacccagagcttttaggaaagatgaactatcggttaatgatgttacagtcctgttctgggccaacctgtcgcactccaggggtttttgaccccggatacaggtttgacccccgtctcatgttcagcaatcgcggcagtgtcaggactcgaagattttccaaacatcttctgtagcgacctcacacagcctctgcagatggatccctgcacgcctctttctgatgaagtgattgtagtaggtgtctgtagctagtcttcaagaccacacctggaagagtttctgggctggctttaagtcctgtttgaaaaagcaacccagtcagctgacttcctcgtgcaatgtgttaaactgtgaactctgcccatgtgtcaggagtggctgtctctggtctcttcctttagctgacaaggacactcctgaggtctttgttctcactgtattttttttatcctggggccacagttcttgattattcctcttgtggttaaagactgaatttgtaaacccattcagataaatggcagtactttaggacacacacaaacacacagatacaccttttgatatgtaagcttgacctaaagtcaaaggacctgtgtagcatttcagattgagcacttcactatcaaaaatactaacatcacatggcttgaagagtaaccatcagagctgaatcatccaagtaagaacaagtaccattgttgattgataagtagagatacattttttatgatgttcatcacagtgtggtaaggttgcaaattcaaaacatgtcacccaagctctgttcatgtttttgtgaattc

SEQ ID NO: 953 - protein, 552 aa, Homo sapien
MRLLPLAPGRLRRGSPRHLPSCSPALLLLVLGGCLGVFGVAAGTRRPNVVLLLTDDQDEVLGGMTPLKKTKALIGEMGMTFSSAYVPSALCCPSRASILTGKYPHNHHVVNNTLEGNCSSKSWQKIQEPNTFPAILRSMCGYQTFFAGKYLNEYGAPDAGGLEHVPLGWSYWYALEKNSKYYNYTLSINGKARKHGENYSVDYLTDVLANVSLDFLDYKSNFEPFFMMIATPAPHSPWTAAPQYQKAFQNVFAPRNKNFNIHGTNKHWLIRQAKTPMTNSSIQFLDNAFRKRWQTLLSVDDLVEKLVKRLEFTGELNNTYIFYTSDNGYHTGQFSLPIDKRQLYEFDIKVPLLVRGPGIKPNQTSKMLVANIDLGPTILDIAGYDLNKTQMDGMSLLPILRGASNLTWRSDVLVEYQGEGRNVTDPTCPSLSPGVSQCFPDCVCEDAYNNTYACVRTMSALWNLQYCEFDDQEVFVEVYNLTADPDQITNIAKTIDPELLGKMNYRLMMLQSCSGPTCRTPGVFDPGYRFDPRLMFSNRGSVRTRRFSKHLL

SEQ ID NO: 954 - DNA, 5057 bp, Homo sapien
  Unsure 3995-3997, 4906, 4923, 4932, 4995, 5028, 5056: Unknown base
ggctcctgaggcgcacagcgccgagcgcggcgccgcgcacccgcgcgccggacgccagtgaccgcgatggtgaactccagtcgcgtgcagcctcagcagcccggggacgccaagcggccgcccgcgccccgcgcgccggacccgggccggctgatggctggctgcgcggccgtgggcgccagcctcgccgccccgggcggcctctgcgagcagcggggcctggagatcgagatgcagcgcatccggcaggcggccgcgcgggaccccccggccggagccgcggcctccccttctcctccgctctcgtcgtgctcccggcaggcgtggagccgcgataaccccggcttcgaggccgaggaggaggaggaggaggtggaaggggaagaaggcggaatggtggtggagatggacgtagagtggcgcccgggcagccggaggtcggccgcctcctcggccgtgagctccgtgggcgcgcggagccgggggcttgggggctaccacggcgcgggccacccgagcgggaggcggcgccggcgagaggaccagggcccgccgtgccccagcccagtcggcggcggggacccgctgcatcgccacctccccctggaagggcagccgccccgagtggcctgggcggagaggctggttcgcgggctgcgaggtctctggggaacaagactcatggaggaaagcagcactaaccgagagaaataccttaaaagtgttttacgggaactggtcacatacctcctttttctcatagtcttgtgcatcttgacctacggcatgatgagctccaatgtgtactactacacccggatgatgtcacagctcttcctagacacccccgtgtccaaaacggagaaaactaactttaaaactctgtcttccatggaagacttctggaagttcacagaaggctccttattggatgggctgtactggaagatgcagcccagcaaccagactgaagctgacaaccgaagtttcatcttctatgagaacctgctgttaggggttccacgaatacggcaactccgagtcagaaatggatcctgctctatcccccaggacttgagagatgaaattaaagagtgctatgatgtctactctgtcagtagtgaagatagggctccctttgggccccgaaatggaaccgcttggatctacacaagtgaaaaagacttgaatggtagtagccactggggaatcattgcaacttatagtggagctggctattatctggatttgtcaagaacaagagaggaaacagctgcacaagttgctagcctcaagaaaaatgtctggctggaccgaggaaccagggcaacttttattgacttctcagtgtacaacgccaacattaacctgttctgtgtggtcaggttattggttgaattcccagcaacaggtggtgtgattccatcttggcaatttcagcctttaaagctgatccgatatgtcacaacttttgatttcttcctggcagcctgtgagattatcttttgtttctttatcttttactatgtggtggaagagatattggaaattcgcattcacaaactacactatttcaggagtttctggaattgtctggatgttgtgatcgttgtgctgtcagtggtagctataggaattaacatatacagaacatcaaatgtggaggtgctactacagtttctggaagatcaaaatactttccccaactttgagcatctggcatattggcagatacagttcaacaatatagctgctgtcacagtattttttgtctggattaagctcttcaaattcatcaattttaacaggaccatgagccagctctcgacaaccatgtctcgatgtgccaaagacctgtttggctttgctattatgttcttcattattttcctagcgtatgctcagttggcataccttgtctttggcactcaggtcgatgacttcagtactttccaagagtgtatcttcactcaattccgtatcattttgggcgatatcaactttgcagagattgaggaagctaatcgagttttgggaccaatttatttcactacatttgtgttctttatgttcttcattcttttgaatatgtttttggctatcatcaatgatacttactctgaagtgaaatctgacttggcacagcagaaagctgaaatggaactctcagatcttatcagaaagggctaccataaagctttggtcaaactaaaactgaaaaaaaataccgtggatgacatttcagagagtctgcggcaaggaggaggcaagttaaactttgacgaacttcgacaagatctcaaagggaagggccatactgatgcagagattgaggcaatattcacaaagtacgaccaagatggagaccaagaactgaccgaacatgaacatcagcagatgagagacgacttggagaaagagagggaggacctggatttggatcacagttctttaccacgtcccatgagcagccgaagtttccctcgaagcctggatgactctgaggaggatgacgatgaagatagcggacatagctccagaaggaggggaagcatttctagtggcgtttcttacgaagagtttcaagtcctggtgagacgagtggaccggatggagcattccatcggcagcatagtgtccaagattgacgccgtgatcgtgaagctagagattatggagcgagccaaactgaagaggagggaggtgctgggaaggctgttggatggggtggccgaggatgaaaggctgggtcgtgacagtgaaatccatagggaacagatggaacggctagtacgtgaagagttggaacgctgggaatccgatgatgcagcttcccagatcagtcatggtttaggcacgccagtgggactaaatggtcaacctcgccccagaagctcccgcccatcttcctcccaatctacagaaggcatggaaggtgcaggtggaaatgggagttctaatgtccacgtatgatatgtgtgtttcagtatgtgtgtttctaataagtgaggaagtggctgtcctgaattgctgtaacaagcacactatttatatgccctgaccaccataggatgctagtctttgtgaccgattgctaatcttctgcactttaatttattttatataaactttacccatggttcaaagatttttttttctttttctcatataagaaatctaggtgtaaatattgagtacagaaaaaaaatcttcatgatgtgtattgagcggtacgcccagttgccaccatgactgagtcttctcagttgacaatgaagtagccttttaaagctagaaaactgtcaaagggcttctgagtttcatttccagtcacaaaaatcagtattgttatttttttccaagagtgtgaaggaaaatggggcaattcctttccactctggcatagttcatgagcttaatacatagctttcttttaagaaaggagccttttttttcaactagcttcctggggtaaacttttctaaaagataaaatgggaaggaactccaaactatgatagaatctgtgtgaatggttaagatgaatgttaaatactatgcttttttgtaagttgatcgtatctgatgtctgtgggactaactgtatcacttaatttttaccttattttggctctaatttgaataagctgagtaaaaccaccaaagatcagttataggataaaatggcatctctaaccataacacaggagaattggaaggagccctaagttgtcactcagtttaatttcttttaatggttagtttagcctaaagatttatctgcatattctttttcccatgtggctctactcatttgcaactgaatttaatgttataactcatctagtgagaccaacttactaaatttttagtatgcactgaaagtttttatccaacaattatgttcattttaagcaaaattttaagaaagttttgaaattcataaagcatttggttttaaactattttaagaatatagtactcggtcaggtatgnnncacgcctgtaatcccagcactttgggaggccgaaacaggcgaatcacttgagcccaggagttcaagaccaacatgggcaatgtggcgaaactccatctctacaaaaaatgcaaaaataaaaaatatagtactcaagtattcttgatcctgtgtttcaaaactagaatttgtaatgcaaatggagctcagtctaataaaaaagaggttttggtattaaaagttcatacattagacagtatcagccaaaatttgagttagcaacactgttttctttacgagagggtctcacccaaatttatggggagaaatctatttctcaaaaaaaaaaaatcttcttttacagaaatgttgagtaaggtgacattttgagcgctaataagcaaaagagcatgcagtgctgttgaataaccctcacttggagaaccaagagaatcctgtcgtttaatgctatattttaatttcacaagttgttcatttaactggtagaatgtcagtccaatctccaatgagaacatgagcaaatagacctttccaggttgaaagtgaaacatactgggtttctgtaagtttttcctcatggcttcatctctatctttactttctcttgaatatgctacacaaagttctttattactacatactaaagtttgcattccagggatattgactgtacatatttatgtatatgtaccatgttgttacatgtaaacaaacttcaatttgaagtgcagctattatgtggtatccatgtgtatcgaccatgtgccatatatcaattatggtcactagaaagtctctttatgatactttttattgtactgtttttcatttcacttgcaaaattttgcagaattcctcctttctacccataaattacatataatttttcttctttagtcatggagaacncccccccatcatctcanccctattanctttcccatgtgtactggtattattaaaaagacatttacatacgcaagtttttcactgacaancaagaatgttattaatgtgtaatactgagcacntttacttcttaataaaaacttgatatant

SEQ ID NO: 955 - protein, 968 aa, Homo sapien
  Unsure 3995-3997, 4906, 4923, 4932, 4995, 5028, 5056: Unknown amino acid
MVNSSRVQPQQPGDAKRPPAPRAPDPGRLMAGCAAVGASLAAPGGLCEQRGLEIEMQRIRQAAARDPPAGAAASPSPPLSSCSRQAWSRDNPGFEAEEEEEEVEGEEGGMVVEMDVEWRPGSRRSAASSAVSSVGARSRGLGGYHGAGHPSGRRRRREDQGPPCPSPVGGGDPLHRHLPLEGQPPRVAWAERLVRGLRGLWGTRLMEESSTNREKYLKSVLRELVTYLLFLIVLCILTYGMMSSNVYYYTRMMSQLFLDTPVSKTEKTNFKTLSSMEDFWKFTEGSLLDGLYWKMQPSNQTEADNRSFIFYENLLLGVPRIRQLRVRNGSCSIPQDLRDEIKECYDVYSVSSEDRAPFGPRNGTAWIYTSEKDLNGSSHWGIIATYSGAGYYLDLSRTREETAAQVASLKKNVWLDRGTRATFIDFSVYNANINLFCVVRLLVEFPATGGVIPSWQFQPLKLIRYVTTFDFFLAACEIIFCFFIFYYVVEEILEIRIHKLHYFRSFWNCLDVVIVVLSVVAIGINIYRTSNVEVLLQFLEDQNTFPNFEHLAYWQIQFNNIAAVTVFFVWIKLFKFINFNRTMSQLSTTMSRCAKDLFGFAIMFFIIFLAYAQLAYLVFGTQVDDFSTFQECIFTQFRIILGDINFAEIEEANRVLGPIYFTTFVFFMFFILLNMFLAIINDTYSEVKSDLAQQKAEMELSDLIRKGYHKALVKLKLKKNTVDDISESLRQGGGKLNFDELRQDLKGKGHTDAEIEAIFTKYDQDGDQELTEHEHQQMRDDLEKEREDLDLDHSSLPRPMSSRSFPRSLDDSEEDDDEDSGHSSRRRGSISSGVSYEEFQVLVRRVDRMEHSIGSIVSKIDAVIVKLEIMERAKLKRREVLGRLLDGVAEDERLGRDSEIHREQMERLVREELERWESDDAASQISHGLGTPVGLNGQPRPRSSRPSSSQSTEGMEGAGGNGSSNVHV

SEQ ID NO: 956 - DNA, 4744 bp, Homo sapien
aaataataaagaaattgaaaacaatacattaatataccataacactaaaaagagcaggagcgagagatgagaaagggaatccagcccgctctggagcagtacctggtgaccgccgggggtggggagggggcggctgtcgtcgccgccgccgctgcagcctccatggacaaaagggcactgctagccagccccggcttcgccgccgccgccgccgctgccgccgccccgggcgcgtacatccagatcctcaccacgaacacttccaccacctcctgttcctcctccctccaaagcggcgccgtagccgccggccccctcctccccagtgcccccggcgcggagcagaccgccggcagcctcctctacaccacgccgcacggaccctccagcagagccgggctgctgcagcagccaccagcgctgggacgcggcggcagcggcggcggcggcggccctccggcaaagcgaaggctggagctaggagaaagcggtcatcagtacctctcagatggtttaaaaacccccaagggcaaaggaagagctgcactacgaagtccagatagtccaaaaactccaaaatctccctcagaaaaaacgcggtatgatacgtctcttggtctgctcaccaagaagttcattcagctcctgagccagtcacccgatggggtattggatttgaacaaggcagcagaagtgctaaaagtgcaaaagagaaggatttatgatatcaccaacgttctggaaggcatccacctcattaagaagaagtctaaaaacaacgtccaatggatgggctgcagtctgtctgaggatgggggcatgctggcccagtgtcaaggcctgtcaaaagaagtgaccgagctcagtcaggaagagaagaaattagatgaactgatccaaagctgcaccctggacctcaaactgttaaccgaggattcagagaatcaaaggttagcttatgttacatatcaagatattcgaaaaattagtggccttaaagaccaaactgttatagttgtgaaagcccctccagaaacaagacttgaagtgcctgactcaatagagagcctacaaatacatttggcaagtacccaagggcccattgaggtttacttatgtccagaagagactgaaacacacagtccaatgaaaacaaacaaccaagaccacaatgggaatatccctaaacccgcttccaaagacttggcttcaaccaactcaggacatagcgattgctcagtttctatgggaaacctttctcctctggcctccccagccaacctcttacagcagactgaggaccaaattccttccaacctagaaggaccgtttgtgaacttactgcctcccctgctgcaagaggactatctcctgagcctcggggaggaggaaggcatcagcgatctcttcgatgcttacgatttggaaaagctcccactggtggaagacttcatgtgtagttgattatgcttcgtgtgaactctccttaaaaaccgatatttttttatcatggaccagaacatctgtcatgcagtgttgtcccttcctaccttcttcctccaagagagtatcatgaagtaaactacaaacttcagaagaaagctgacattttaatgaattttttaaaaaattaataaacaaattgtctaaacgcacagttgcaggctcccttgggaaagccctgctttgctccaggctccaagatctcctggctaagtcagcaagtgagaaaatgtgcaatcaggtgtctctcaccccgaattgtccttcctccttcctccccggattggcttgctgtgcctgacggatgggctgtagaatggggtctggccacctggcctgctgggaaacagcaatcttccttaatagcatttcaagccgtgccttctccgcagaatgcatgtctttgaggtctgctaatatggaatggaactgcagcaaatgcaaacttgaagtcatgcaaaagtatgaaatggatttcttcagctcttcttaggaatatttaaattactgtcataattcagtttaagctatgaactgtgtgtcccagtaggaggtcaagaaaacctccacagccttctggatgaagaacctgttttcaaatatacttgttgcagatacagaagactagtagagttctgccactctaagctgttgtggattttcctgtctccatgaaccactcccattcccccgtccccaatgtgtttgtgagtttccagttgatttgtagcaaatgcctacttagttctttgtggattgttctagacttttaatttttttagctgccatttaagcattcctgtggcacccatcaccatttcaatttaattgtttactttgaagcggtttttgcaaattcatattacttaagcagagggagagaacctctactgatcagagcatctaaacctgtgtgatctaaggtttatcagcctctgcaaggagctttgtcccatcgtgcttccattcccaggagggggagcttggagcgagtcagtcctggggcttgctgacatgggtggcccattggaaaggagaaccaggtcagatgatgtaacagccccaaggagcagcaggcatgggtccctccatccttgggcttcccgggcccctgtgacaggggaaagggctctcttacaccgcactcagggagaccacttctcaggatggggtcagatggagagacctctagggagaaagacatccccattgtgtgagtggcatttccttaagctggcaggaacagggagcagccctgtgtcgggggctggaatagttctggccagaccccgttccccttcctctatgaaggaataagttggaccaagggaagtcggggacgtaaaaaatgaagcaaaacaatgccagggtgtctcccgctttactcttcaggaatggtgtcccaagttggaggctttgtgtcagctgcaaatcctaccagttatgtccaagaatggctttccctcgggcaggtggcagcggccatctcccactgggaatatggcgtagtatctccggtccattccttggatgctaaggactgcgggaatgagggagtcagataaagaacaaacctcgaaacgaacagttaaattgaaatgctatgtgcctgacccaatggtaggcacatagtaggcactcaactcatatgtttaattgaattgaaaatatcccttaggaaaaaaaaaaaacacacaaaaaaccacaagagccccagccagtttactccaggtagatttccacaatatgcaaagtggtggtggggtcaagacagatgacaccagcactttaaactctttgtgtgggtatgcgtgggtgtatgtttgggaagaaaaacaaaggtgcagactatcttcctttttttcttcttcagcctccatccctggcctcctcccctcacacacactggacttggtacaaaatgtcggtgtggtcctagatgaagcattggggtgggggagggagagggagctttgtgttaagtgcctactggaaatgcactgtggggttttttcctgtatgggaaaccatttatgccaagcttttccccatttcccatatttatctcatctggttagctgcctctgcttccagctttgtgtaattctctttgccagctgcacaaagctgattttttccaaagtctaaagactgagctcacctggctagattgttgtgtgttttgttgaattttttcataatgtaatgccgtatttattgtttttaaaatgaaaggaatactaataagtcttaaaagttccttcatgcataagatttttttccagttactgggcttaactggtgtacattaattagatgtccatactgtattttgtttgcattaagtaattttctttttgacttagtatccggcacacaaagtgggttagtactacagtatttgcgttactttaagtactaagtatgcaggtttcctggtaccattgagttgctgctattaaagctcacacacgaaatggctaaaagttacaagtgtgcaaattatgactgcgtgagccttagaaaataaaatgtataaagggcaacacatgagctgtcaaacagtgttaggagtgtgtttatatgtacagagttgtgcatagcaatcgttttatttaagttgatatgtagtctactcacattttcattatttagcaattttgtacaaaaatagcaattaatttgtaaacactgccagaatactttctagctgctttgtaattttttaagagtgttattttgtttttgtttttctgttctttgttgtggctcttgttttcatttttgttgtacgtgtagatctgtaaataaaattgcagtatttaaagcttaagctttcaggaaaaagaaaataagaattcagtgtgtgcatgacaactcgtgtgtatgagaaggagggatatgaaggaagatggcttgcagagtaagtcgggtggcaattgtcagggtgtgggaatttcttttcctacggggtacgtgattttgtaaaaaggaagtatttctcccaaaattgggagtaggcaaactactaatcagtttagctttgtgttgtatgctagtttaaaaaagaaaatatgtaatataatgtaaaaaaaaacaaaaaaaagcttttatgatggattttgtaaatagatttgttacagggtgacctgttctctagctgtgatcttaccacttcaaatgggtgtaatttgaataaattttgtatggtaaaggatcaataaaatgattttttttaaga

SEQ ID NO: 957 - protein, 465 aa, Homo sapien
MRKGIQPALEQYLVTAGGGEGAAVVAAAAAASMDKRALLASPGFAAAAAAAAAPGAYIQILTTNTSTTSCSSSLQSGAVAAGPLLPSAPGAEQTAGSLLYTTPHGPSSRAGLLQQPPALGRGGSGGGGGPPAKRRLELGESGHQYLSDGLKTPKGKGRAALRSPDSPKTPKSPSEKTRYDTSLGLLTKKFIQLLSQSPDGVLDLNKAAEVLKVQKRRIYDITNVLEGIHLIKKKSKNNVQWMGCSLSEDGGMLAQCQGLSKEVTELSQEEKKLDELIQSCTLDLKLLTEDSENQRLAYVTYQDIRKISGLKDQTVIVVKAPPETRLEVPDSIESLQIHLASTQGPIEVYLCPEETETHSPMKTNNQDHNGNIPKPASKDLASTNSGHSDCSVSMGNLSPLASPANLLQQTEDQIPSNLEGPFVNLLPPLLQEDYLLSLGEEEGISDLFDAYDLEKLPLVEDFMCS

SEQ ID NO: 958 - DNA, 4744 bp, Homo sapien; identical to SEQ ID NO: 956

SEQ ID NO: 959 - protein, 465 aa, Homo sapien; identical to SEQ ID NO: 957

SEQ ID NO: 960 - DNA, 4068 bp, Homo sapien
gaattcctcctctcttcaccccgttagctgttttcaatgtaatgctgccgtccttctcttgcactgccttctgcgctaacacctccattcctgtttataaccgtgtatttattacttaatgtatataatgtaatgttttgtaagttattaatttatatatctaacattgcctgccaatggtggtgttaaatttgtgtagaaaactctgcctaagagttacgactttttcttgtaatgttttgtattgtgtattatataacccaaacgtcacttagtagagacatatggcccccttggcagagaggacaggggtgggcttttgttcaaagggtctgccctttccctgcctgagttgctacttctgcacaacccctttatgaaccagttttcacccgaattttgactgtttcatttagaagaaaagcaaaatgagaaaaagctttcctcatttctccttgagatggcaaagcactcagaaatgacatcacataccctaaagaaccctgggatgactaaggcagagagagtctgagaaaactctttggtgcttctgcctttagttttaggacacatttatgcagatgagcttataagagaccgttccctccgccttcttcctcagaggaagtttcttggtagatcaccgacacctcatccaggcggggggttggggggaaacttggcaccagccatcccaggcagagcaccactgtgatttgttctcctggtggagagagctggaaggaaggagccagcgtgcaaataatgaaggagcacgggggcaccttcagtagcaccggaatcagcggtggtagcggtgactctgctatggacagcctgcagccgctccagcctaactacatgcctgtgtgtttgtttgcagaagaatcttatcaaaaattagcaatggaaacgctggaggaattagactggtgtttagaccagctagagaccatacagacctaccggtctgtcagtgagatggcttctaacaagttcaaaagaatgctgaaccgggagctgacacacctctcagagatgagccgatcagggaaccaggtgtctgaatacatttcaaatactttcttagacaagcagaatgatgtggagatcccatctcctacccagaaagacagggagaaaaagaaaaagcagcagctcatgacccagataagtggagtgaagaaattaatgcatagttcaagcctaaacaatacaagcatctcacgctttggagtcaacactgaaaatgaagatcacctggccaaggagctggaagacctgaacaaatggggtcttaacatctttaatgtggctggatattctcacaatagacccctaacatgcatcatgtatgctatattccaggaaagagacctcctaaagacattcagaatctcatctgacacatttataacctacatgatgactttagaagaccattaccattctgacgtggcatatcacaacagcctgcacgctgctgatgtagcccagtcgacccatgttctcctttctacaccagcattagacgctgtcttcacagatttggagatcctggctgccatttttgcagctgccatccatgacgttgatcatcctggagtctccaatcagtttctcatcaacacaaattcagaacttgctttgatgtataatgatgaatctgtgttggaaaatcatcaccttgctgtgggtttcaaactgctgcaagaagaacactgtgacatcttcatgaatctcaccaagaagcagcgtcagacactcaggaagatggttattgacatggtgttagcaactgatatgtctaaacatatgagcctgctggcagacctgaagacaatggtagaaacgaagaaagttacaagttcaggcgttcttctcctagacaactataccgatcgcattcaggtccttcgcaacatggtacactgtgcagacctgagcaaccccaccaagtccttggaattgtatcggcaatggacagaccgcatcatggaggaatttttccagcagggagacaaagagcgggagaggggaatggaaattagcccaatgtgtgataaacacacagcttctgtggaaaaatcccaggttggtttcatcgactacattgtccatccattgtgggagacatgggcagatttggtacagcctgatgctcaggacattctcgataccttagaagataacaggaactggtatcagagcatgatacctcaaagtccctcaccaccactggacgagcagaacagggactgccagggtctgatggagaagtttcagtttgaactgactctcgatgaggaagattctgaaggacctgagaaggagggagagggacacagctatttcagcagcacaaagacgctttgtgtgattgatccagaaaacagagattccctgggagagactgacatagacattgcaacagaagacaagtcccccgtggatacataatccccctctccctgtggagatgaacattctatccttgatgagcatgccagctatgtggtagggccagcccaccatgggggccaagacctgcacaggacaagggccacctggcctttcagttacttgagtttggagtcagaaagcaagaccaggaagcaaatagcagctcaggaaatcccacggttgacttgccttgatggcaagcttggtggagagggctgaagctgttgctgggggccgattctgatcaagacacatggcttgaaaatggaagacacaaaactgagagatcattctgcactaagtttcgggaacttatccccgacagtgactgaactcactgactaataacttcatttatgaatcttctcacttgtccctttgtctgccaacctgtgtgccttttttgtaaaacattttcatgtctttaaaatgcctgttgaatacctggagtttagtatcaacttctacacagataagctttcaaagttgacaaacttttttgactctttctggaaaagggaaagaaaatagtcttccttctttcttgggcaatatccttcactttactacagttacttttgcaaacagacagaaaggatacacttctaaccacattttacttccttcccctgttgtccagtccaactccacagtcactcttaaaacttctctctgtttgcctgcctccaacagtacttttaactttttgctgtaaacagaataaaattgaacaaattagggggtagaaaggagcagtggtgtcgttcaccgtgagagtctgcatagaactcagcagtgtgccctgctgtgtcttggaccctgccccccacaggagttgctacagtccctggccctgcttcccatcctcctctcttcaccccgttagctgttttcaatgtaatgctgccgtccttctcttgcactgccttctgcgctaacacctccattcctgtttataaccgtgtatttattacttaatgtatataatgtaatgttttgtaagttattaatttatatatctaacattgcctgccaatggtggtgttaaatttgtgtagaaaactctgcctaagagttacgactttttcttgtaatgttttgtattgtgtattatataacccaaacgtcacttagtagagacatatggcccccttggcagagaggacaggggtgggcttttgttcaaagggtctgccctttccctgcctgagttgctacttctgcacaacccctttatgaaccagttttggaaacaatattctcacattagatactaaatggtttatactgagtcttttacttttgtatagcttgataggggcaggggcaatgggatgtagtttttacccaggttctatccaaatctatgtgggcatgagttgggttataactggatcctactatcattgtggctttggttcaaaaggaaacactacatttgctcacagatgattcttctgattcttctgaatgctcccgaactactgactttgaagaggtagcctcctgcctgccattaagcaggaatgtcatgttccagttcattacaaaagaaaacaataaaacaatgtgaatttttataataaaaaaaaaaaaaaggaattc

SEQ ID NO: 961 - protein, 564 aa, Homo sapien
MKEHGGTFSSTGISGGSGDSAMDSLQPLQPNYMPVCLFAEESYQKLAMETLEELDWCLDQLETIQTYRSVSEMASNKFKRMLNRELTHLSEMSRSGNQVSEYISNTFLDKQNDVEIPSPTQKDREKKKKQQLMTQISGVKKLMHSSSLNNTSISRFGVNTENEDHLAKELEDLNKWGLNIFNVAGYSHNRPLTCIMYAIFQERDLLKTFRISSDTFITYMMTLEDHYHSDVAYHNSLHAADVAQSTHVLLSTPALDAVFTDLEILAAIFAAAIHDVDHPGVSNQFLINTNSELALMYNDESVLENHHLAVGFKLLQEEHCDIFMNLTKKQRQTLRKMVIDMVLATDMSKHMSLLADLKTMVETKKVTSSGVLLLDNYTDRIQVLRNMVHCADLSNPTKSLELYRQWTDRIMEEFFQQGDKERERGMEISPMCDKHTASVEKSQVGFIDYIVHPLWETWADLVQPDAQDILDTLEDNRNWYQSMIPQSPSPPLDEQNRDCQGLMEKFQFELTLDEEDSEGPEKEGEGHSYFSSTKTLCVIDPENRDSLGETDIDIATEDKSPVDT

SEQ ID NO: 962 - DNA, 9517 bp, Homo sapien
gttgctgtcggagagagaaagccgcacccgagaggaggtgtgggtgttccgcttccatcctaacggaacgagctccctcttcgcggacatgggattacccagcggctgctaacccctctcctcgccctgctcccccaaaccggcgtggctccccgggcaccaaggagctgactacagaggagcaggatttgcacccctcgctgggcttgctttggcaacagagtgcctgacccaggtcaggattttcaagaaagacatgtctgacaaaatgtctagcttcctacatattggagacatttgttctctgtacgcggagggatcgacaaatggatttattagcaccttgggcctggttgatgatcgttgtgttgtacagccagaaaccggggaccttaacaatccacctaagaaattcagagactgcctctttaagctatgtcccatgaaccgctactctgcccaaaagcagttctggaaagccgctaagcctggggccaacagcaccacagacgcagtgctactcaacaaactgcaccacgctgcagacttggaaaagaagcagaatgagacagaaaacaggaaattgctggggaccgtaatccagtatggcaatgtgatccagctcctgcatttgaaaagtaataaatacctaacagtgaataagaggcttcctgctctgttggagaagaatgccatgagagtcacattggacgaggctggaaatgaagggtcctggttttatattcagccattctacaagctgcgatccattggagacagcgtggtcataggtgacaaggtggttctgaaccccgtcaatgctggtcagcccctacatgctagcagccatcaactggtagataacccaggctgcaatgaggtcaattccgtcaactgcaatacaagctggaaaatagtccttttcatgaaatggagtgataacaaagacgacatattaaaggggggtgacgtggtgaggctgtttcatgctgagcaggagaagtttctcacctgtgacgaacacaggaagaagcagcacgtcttcctgagaaccacgggccggcagtcggccacatctgccaccagttcaaaagccctgtgggaggtggaggtggtccagcatgacccatgtcggggcggagcagggtattggaacagccttttccgtttcaagcatctggccacggggcattacttggcagcagaggtggaccctgatcaggacgcctctcgaagtaggttgcggaatgcccaagaaaagatggtatactccctggtctctgtgcctgaaggcaatgacatctcctccattttcgagctagatcccaccactctgcgtggaggtgacagccttgtcccaaggaactcttatgttcggctcagacacctatgtactaatacctgggttcacagcacaaatattcctattgacaaggaagaagaaaagcccgtgatgctgaaaattggcacctctcctgtgaaggaggataaggaagcatttgccatagttccggtttctcctgctgaagttcgggacctggactttgccaatgatgccagcaaggtgctgggctccattgctgggaagctagagaagggcaccatcacccagaatgaaaggaggtctgtaaccaagctgctagaagatttggtttacttcgtcactggtggaactaattctggtcaagatgttctcgaagttgtcttctccaagcccaacagagaacggcagaaactgatgagagaacagaatattctcaagcagatcttcaagttgttacaagccccattcacagactgcggtgatggcccaatgcttcggctggaagagctcggggaccagcggcacgctcctttcagacacatctgccggctctgctacagggtgctgagacactcgcagcaagactacaggaagaaccaggagtatatagccaagcagtttggcttcatgcagaagcagattggctatgatgtgttggctgaagacactatcactgccctgctccacaataatcggaaactcctggaaaaacacattaccgcggcagagattgacacatttgtcagcctggtgcgaaagaacagggagcccagattcttagattacctctccgacctctgtgtctccatgaacaaatcaattccagtgacccaggaactgatatgtaaagctgtgctgaaccccaccaacgctgacatcctgattgagaccaaattggttctttctcgttttgaatttgaaggtgtctcttccactggagagaatgctctggaggcaggagaagacgaggaagaggtgtggctgttttggagggacagcaacaaagagattcgcagcaagagtgtgagggaattggctcaggatgctaaagaagggcagaaggaggaccgagacgttctcagctactacagatatcagctgaacctctttgcgaggatgtgtctggaccgccaatacctggccatcaacgaaatctcaggccagctggatgtcgatctcattctccgctgcatgtctgacgagaacctgccctatgacctcagggcgtccttctgccgcctcatgcttcacatgcatgtggaccgagatccccaggaacaagtcacccccgtgaaatatgcccgcctctggtcggagattccctcggagatcgccattgacgactatgatagtagtggagcttccaaagatgaaattaaggagagatttgctcagaccatggagtttgtggaggagtatttaagagatgtggtttgtcagaggttccctttctctgataaagagaagaataagcttacgtttgaggttgtaaatttagctaggaatctcatatactttggtttctacaacttctctgaccttctccgattaactaagatccttctggccatattggactgtgtacatgtgacaacaatcttccccattagcaagatggcgaaaggagaagagaataaaggcagtaacgtgatgagatctattcatggcgtgggagagctgatgacccaggtggtgctccggggaggaggctttttgcccatgactcccatggctgctgcccctgaaggcaatgtgaagcaggcagagcctgagaaggaggacatcatggtcatggacaccaagctgaagatcattgagatactccagtttattttgaatgtgaggttggattataggatctcctgcctcctgtgtatatttaagcgagagtttgatgaaagcaattcccagacttcagaaacatcctccggaaacagcagccaagaagggccaagtaatgtaccaggtgctcttgactttgaacacattgaagaacaagcagaaggcatctttggaggaagtgaggagaacaccccactggacttggatgaccacggcggcagaacctttctccgtgtcctgctccacttgacgatgcatgactacccacccctggtgtcaggggccctgcagctcctcttccggcacttcagccagaggcaggaggtgctccaggccttcaaacaggttcaactgctggttaccagccaagatgtggacaactacaaacagatcaaacaagacttggatcaactgaggtccatcgtggaaaagtcagagctttgggtgtacaaagggcagggccccgatgagactatggatggtgcatctggagaaaatgaacataagaaaacggaggagggaaataacaagccacaaaagcatgaaagcaccagcagctacaactacagagtggtcaaagagattttgattcggcttagcaaactctgtgttcaagagagtgcctcagtgagaaagagcaggaagcagcaacagcgtctgctccggaacatgggcgcgcacgccgtggtgctggagctgctgcagattccctatgagaaggccgaagataccaagatgcaagagataatgaggttggctcatgaatttttgcagaatttctgcgcaggcaaccagcagaatcaagctttgctacataaacacataaacctgtttctcaacccagggatcctggaggcagtaaccatgcagcacatcttcatgaacaatttccagctttgcagtgagatcaacgagagagttgttcagcacttcgttcactgcatagagactcacggtcggaatgtccagtatataaagttcttacagacaattgtcaaggcagaagggaaatttattaaaaaatgccaagacatggttatggccgagctggtcaattcgggagaggatgtcctcgtgttctacaacgacagagcctctttccagactctgatccagatgatgcggtcagaacgggatcggatggatgagaacagccctctcatgtaccacatccacttggtcgagctcctggctgtgtgcacggagggtaagaatgtctacacagagatcaagtgcaactccctgctcccgctggatgacatcgttcgcgtggtgacccacgaggactgcatccctgaggttaaaattgcatacattaacttcctgaatcactgctatgtggatacagaggtggaaatgaaggagatttataccagcaatcacatgtggaaattgtttgagaatttccttgtagacatctgcagggcctgtaacaacactagtgacaggaaacatgcagactcgattttggagaagtatgtcaccgaaatcgtcatgagtattgttactactttcttcagctctcccttctcagaccagagtacgactttgcagactcgccagcctgtctttgtgcaactgctgcaaggcgtgttcagggtttaccactgcaactggttaatgccaagccaaaaagcctccgtggagagctgtattcgggtgctgtctgatgtagccaagagccgggccattgccattcccgtggacctggacagccaagtcaacaacctctttctcaagtcccacagcattgtgcagaaaacagccatgaactggcggctctcagcccgcaatgccgcacgcagggactctgttctggcagcttccagagactaccggaatatcattgagagattgcaggacatcgtctccgcgctggaggaccgtctcaggcccctggtgcaggcagagttatctgtgctcgtggatgttctccacagacccgagctgcttttcccagagaacacagacgccagaaggaaatgtgaaagtggcggtttcatttgcaagttaataaagcatacaaaacagctgctagaagaaaatgaagagaagctctgcattaaggtcctacagaccctgagggaaatgatgaccaaagatagaggctatggagaaaagggtgaggcgctcaggcaagttctggtcaaccgttactatggaaacgtcagaccttcgggacgaagagagagccttaccagctttggcaatggcccactgtcagcaggaggacccggcaagcccgggggaggagggggaggttccggatccagctctatgagcaggggtgagatgagtctggccgaggttcagtgtcaccttgacaaggagggggcttccaatctagttatcgacctcatcatgaacgcatccagtgaccgagtgttccatgaaagcattctcctggccattgcccttctggaaggaggcaacaccaccatccagcactcctttttctgtcgcttgacagaagataagaagtcagagaaattctttaaggtgttttatgaccggatgaaggtggcccagcaagaaatcaaagcaacagtgacagtgaacaccagtgacttgggaaataaaaagaaagacgatgaggtagacagggatgccccatcacggaaaaaagctaaagagcccacaacacagataacagaagaggtccgggatcagctcctggaggcctccgctgccaccaggaaagccttcaccactttcaggagggaggctgatcccgacgaccactaccagcctggagagggcacccaggccactgccgacaaggccaaggacgacctggagatgagcgcggtcatcaccatcatgcagcccatcctccgcttccttcagctcctgtgtgaaaaccacaaccgagacctgcagaacttcctccgttgccaaaataacaagaccaactacaatttggtatgtgagaccctgcagtttctggactgtatttgtggaagcacaactggaggccttggtcttctgggcttgtatataaatgaaaagaacgtagcgcttatcaaccaaaccctggaaagtctgaccgaatactgtcaaggaccttgccatgagaaccagaactgcatagccacccatgaatccaatggcattgacatcatcacagccctgatcctcaatgatatcaatcctttgggaaagaagaggatggaccttgtgttagaactgaagaacaatgcctcgaagttgctcctggccatcatggaaagcaggcacgacagtgaaaacgcagagaggatactttataacatgaggcccaaggaactggtggaagtgatcaagaaagcctacatgcaaggtgaagtggaatttgaggatggagaaaacggtgaggatggggcggcgtcccccaggaacgtggggcacaacatctacatattagcccatcagttggctcggcataacaaagaacttcagagcatgctgaaacctggtggccaagtggacggagatgaagccctggagttttatgccaagcacacggcgcagatagagattgtcagattagaccgaacaatggaacagatagtctttcccgtgcccagcatatgtgaattcctaaccaaggagtcaaaactacgaatttactatactacagagagagacgaacaaggcagcaaaatcaatgatttctttctgcggtctgaagacctcttcaatgaaatgaattggcagaagaaactgagagcccagcccgtgttgtactggtgtgcccgcaacatgtctttctggagcagcatttcgtttaacctggccgtcctgatgaacctgctggtggcgtttttctacccgtttaagggagtccgaggaggaaccctggagccccactggtcgggactcctgtggacagccatgctcatctctctggccatcgtcattgccctccccaagccccatggcatccgggccttaattgcctccacaattctacgactgatattttcagtcgggttacaacccacgttgtttcttctgggcgctttcaatgtatgcaataaaatcatctttctaatgagctttgtgggcaactgtgggacattcacaagaggctaccgagccatggttctggatgttgagttcctctatcatttgttgtatctggtgatctgtgccatggggctctttgtccatgaattcttctacagtctgctgctttttgatttagtgtacagagaagagactttgcttaatgtcattaaaagtgtcactcgcaatggacggtccatcatcctgacagcagttctggctctgatcctcgtttacctgttctcaatagtgggctatcttttcttcaaggatgactttatcttggaagtagataggctgcccaatgaaacagctgttccagaaaccggcgagagtttggcaagcgagttcctgttctccgatgtgtgtagggtggagagtggggagaactgctcctctcctgcacccagagaagagctggtccctgcagaagagacggaacaggataaagagcacacatgtgagacgctgctgatgtgcattgtcaccgtgctgagtcacgggctgcggagcgggggtggagtaggagatgtactcaggaaaccgtccaaagaggaacccctgtttgctgctagagttatttatgacctcttgttcttcttcatggtcatcatcattgttcttaacctgatttttggggttatcattgacacttttgctgacctgaggagtgagaagcagaagaaggaagagatcttgaagaccacgtgctttatctgtggcttggaaagagacaagtttgacaacaagactgtcacctttgaagagcacatcaaggaagaacacaacatgtggcactatctgtgcttcatcgtcctggtgaaagtaaaggactccaccgaatatactgggcctgagagttacgtggcagaaatgatcaaggaaagaaaccttgactggttccccaggatgagagccatgtcattggtcagcagtgattctgaaggagaacagaatgagctgagaaacctgcaggagaagctggagtccaccatgaaacttgtcacgaacctttctggccagctgtcggaattaaaggatcagatgacagaacaaaggaagcagaaacaaagaattggtcttctaggacatcctcctcacatgaatgtcaacccacaacaaccagcataagcaaatgaaagaaaggaattgtatttaccttttataattattattagtgtgggtatggctaatgagttctgattcacccacgaaggttacatttatgctgaatacatttgtaaatactcagttttatactgtatgtatatgattgctactctaaaggtttggatatatgtattgtaattagaattgttggcatgatgacatttcatttgtgccaaaaatattaaaaatgccttttttggaaggactaacagaaagcacctgatttgcacttgaaccagattatagatttaaaagtatatgacatgtattttgtatttaaaactagaatagccagtatttatgttttttataaaactgtgcaatacgaattatgcaatcacaatacatttgtagctcccgagtgtcctaaagggagtgcacttctttgaagctggtgtgttaatactatgtaataaatggttaactttcaaatgatgctgctgccaaaattatattaatagtgagtttcaggcccctgggcattttgtaccatgtaattatcctctggtgatgctgtttctcgttagtggcagtagtgcctccgtctcctagtgataatgctccaagtctatgaactgttaaatcagcattcattttaagaaaagcaactttagtttcaaagatacttttaagcttctaaattgatcatttaaactatttctttaaataagagagccaaattagaggctcatactttagcttgtgaagaagataatgaattttttaaagggaactttctatgcaatgttcaggataaatcgatactgctggccaatcagtgtcatctcctgggtaaattttgatgtcgcattataaagacatgcataattgatggtttctagattatctagtccaaacaatagagtttattttttcttcatctgaaccaacatgctacagtagctaagaagtattaaaactatatacatccatataaagatgaaatatgaactatctcattagaagtcatagttgaccacagacatgttattcttctgaaagagccacattttggttttatttcttgtcacatgatttcttttcttgatggatgaaaaatatgaaatgaaatcttttatatctgttgcctagttttgtacatggatctcattttacaagagaatctctctgcta

SEQ ID NO: 963 - protein, 2000 aa, Homo sapien
MSDKMSSFLHIGDICSLYAEGSTNGFISTLGLVDDRCVVQPETGDLNNPPKKFRDCLFKLCPMNRYSAQKQFWKAAKPGANSTTDAVLLNKLHHAADLEKKQNETENRKLLGTVIQYGNVIQLLHLKSNKYLTVNKRLPALLEKNAMRVTLDEAGNEGSWFYIQPFYKLRSIGDSVVIGDKVVLNPVNAGQPLHASSHQLVDNPGCNEVNSVNCNTSWKIVLFMKWSDNKDDILKGGDVVRLFHAEQEKFLTCDEHRKKQHVFLRTTGRQSATSATSSKALWEVEVVQHDPCRGGAGYWNSLFRFKHLATGHYLAAEVDPDQDASRSRLRNAQEKMVYSLVSVPEGNDISSIFELDPTTLRGGDSLVPRNSYVRLRHLCTNTWVHSTNIPIDKEEEKPVMLKIGTSPVKEDKEAFAIVPVSPAEVRDLDFANDASKVLGSIAGKLEKGTITQNERRSVTKLLEDLVYFVTGGTNSGQDVLEVVFSKPNRERQKLMREQNILKQIFKLLQAPFTDCGDGPMLRLEELGDQRHAPFRHICRLCYRVLRHSQQDYRKNQEYIAKQFGFMQKQIGYDVLAEDTITALLHNNRKLLEKHITAAEIDTFVSLVRKNREPRFLDYLSDLCVSMNKSIPVTQELICKAVLNPTNADILIETKLVLSRFEFEGVSSTGENALEAGEDEEEVWLFWRDSNKEIRSKSVRELAQDAKEGQKEDRDVLSYYRYQLNLFARMCLDRQYLAINEISGQLDVDLILRCMSDENLPYDLRASFCRLMLHMHVDRDPQEQVTPVKYARLWSEIPSEIAIDDYDSSGASKDEIKERFAQTMEFVEEYLRDVVCQRFPFSDKEKNKLTFEVVNLARNLIYFGFYNFSDLLRLTKILLAILDCVHVTTIFPISKMAKGEENKGSNVMRSIHGVGELMTQVVLRGGGFLPMTPMAAAPEGNVKQAEPEKEDIMVMDTKLKIIEILQFILNVRLDYRISCLLCIFKREFDESNSQTSETSSGNSSQEGPSNVPGALDFEHIEEQAEGIFGGSEENTPLDLDDHGGRTFLRVLLHLTMHDYPPLVSGALQLLFRHFSQRQEVLQAFKQVQLLVTSQDVDNYKQIKQDLDQLRSIVEKSELWVYKGQGPDETMDGASGENEHKKTEEGNNKPQKHESTSSYNYRVVKEILIRLSKLCVQESASVRKSRKQQQRLLRNMGAHAVVLELLQIPYEKAEDTKMQEIMRLAHEFLQNFCAGNQQNQALLHKHINLFLNPGILEAVTMQHIFMNNFQLCSEINERVVQHFVHCIETHGRNVQYIKFLQTIVKAEGKFIKKCQDMVMAELVNSGEDVLVFYNDRASFQTLIQMMRSERDRMDENSPLMYHIHLVELLAVCTEGKNVYTEIKCNSLLPLDDIVRVVTHEDCIPEVKIAYINFLNHCYVDTEVEMKEIYTSNHMWKLFENFLVDICRACNNTSDRKHADSILEKYVTEIVMSIVTTFFSSPFSDQSTTLQTRQPVFVQLLQGVFRVYHCNWLMPSQKASVESCIRVLSDVAKSRAIAIPVDLDSQVNNLFLKSHSIVQKTAMNWRLSARNAARRDSVLAASRDYRNIIERLQDIVSALEDRLRPLVQAELSVLVDVLHRPELLFPENTDARRKCESGGFICKLIKHTKQLLEENEEKLCIKVLQTLREMMTKDRGYGEKGEALRQVLVNRYYGNVRPSGRRESLTSFGNGPLSAGGPGKPGGGGGGSGSSSMSRGEMSLAEVQCHLDKEGASNLVIDLIMNASSDRVFHESILLAIALLEGGNTTIQHSFFCRLTEDKKSEKFFKVFYDRMKVAQQEIKATVTVNTSDLGNKKKDDEVDRDAPSRKKAKEPTTQITEEVRDQLLEASAATRKAFTTFRREADPDDHYQPGEGTQATADKAKDDLEMSAVITIMQPILRFLQLLCENHNRDLQNFLRCQNNKTNYNLVCETLQFLDCICGSTTGGLGLLGLYINEKNVALINQTLESLTEYCQGPCHENQNCI

SEQ ID NO: 964 - DNA, 2220 bp, Homo sapien
cccacgcgtccgatggaagttaaagggaaaaagcaattcacaggaaagaatacaaagacagcacaagaaaaaaacagatttcataaaaatagtgattctggttcttcaaagacatttccaacaaggaaagttgctaaagaaggtggacctaaagtcacatctaggaactttgagaaaagtatcacaaaacttgggaaaaagggtgtaaagcagttcaagaataagcagcaaggggacaaatcaccaaagaacaaattccagccggcaaataaattcaacaagaagagaaaattccagccagatggtagaagcgatgaatcagcagccaagaagcccaaatgggatgacttcaaaaagaagaagaaagaactgaagcaaagcagacaactcagtgataaaaccaactatgacattgttgttcgggcaaagcagatgtgggagattttaagaagaaaagactgtgacaaagaaaaaagagtaaagttaatgagtgatttgcagaagttgattcaagggaaaattaaaactattgcatttgcacacgattcaactcgtgtgatccagtgttacattcagtatggtaatgaagaacagagaaaacaggcttttgaagaattgcgagatgatttggttgagttaagtaaagccaaatattcgagaaatattgttaagaaatttctcatgtatggaagtaaaccacagattgcagagataatcagaagttttaaaggccacgtgaggaagatgctgcggcatgcggaagcatcagccatcgtggagtacgcatacaatgacaaagccattttggagcagaggaacatgctgacggaagagctctatgggaacacatttcagctttacaagtcagcagatcacccaactctggacaaagtgttagagttacagccagaaaaattagaacttattatggatgaaatgaaacagattctaactccaatggcccaaaaggaagctgtgattaagcactcattggtgcataaagtattcttggacttttttacctatgcaccccccaaactcagatcagaaatgattgaagccatccgcgaagcggtggtctacctggcacacacacacgatggcgccagagtggccatgcactgcctgtggcatggcacgcccaaggacaggaaagtgattgtgaaaacaatgaagacttatgttgaaaaggtggctaatggccaatactcccatttggttttactggcggcatttgattgtattgatgatactaagcttgtgaagcagataatcatatcagaaattatcagttcattgcctagcatagtaaatgacaaatatggaaggaaggtcctattgtacttactaagccccagagatcctgcacatacagtacgagaaatcattgaagttctgcaaaaaggagatggaaatgcacacagtaagaaagatacagaggtccgcagacgggagctcctagaatccatttctccagctttgttaagctacctgcaagaacacgcccaagaagtggtgctagataagtctgcgtgtgtgttggtgtctgacattctgggatctgccactggagacgttcagcctaccatgaatgccatcgccagcttggcagcaacaggactgcatcctggtggcaaggacggagagcttcacattgcagaacatcctgcaggacatctagttctgaagtggttaatagagcaagataaaaagatgaaagaaaatgggagagaaggttgttttgcaaaaacacttgtagagcatgttggtatgaagaacctgaagtcctgggctagtgtaaatcgaggtgccattattctttctagcctcctccagagttgtgacctggaagttgcaaacaaagtcaaagctgcactgaaaagcttgattcctacattggaaaaaaccaaaagcaccagcaaaggaatagaaattctacttgaaaaactgagcacataggtggaaagagttaagagcaagatggaatgattttttctgttctctgttctgtttcccaatgcagaaaagaaggggtagggtccaccatactggtaattggggtactctgtatatgtgtttcttctttgtatacgaatctatttatataaattgtttttttaaatggtcttttttaaaaaaaaaaaaaaaaaaaaaaaaaaaaaaaaaaaaaaaaaaaaaaaaaaaaaaaaaaaaaaaaaaaaaaaaaaaaaaaaaaaaaaa

SEQ ID NO: 965 - protein, 508 aa, Homo sapien
MWEILRRKDCDKEKRVKLMSDLQKLIQGKIKTIAFAHDSTRVIQCYIQYGNEEQRKQAFEELRDDLVELSKAKYSRNIVKKFLMYGSKPQIAEIIRSFKGHVRKMLRHAEASAIVEYAYNDKAILEQRNMLTEELYGNTFQLYKSADHPTLDKVLELQPEKLELIMDEMKQILTPMAQKEAVIKHSLVHKVFLDFFTYAPPKLRSEMIEAIREAVVYLAHTHDGARVAMHCLWHGTPKDRKVIVKTMKTYVEKVANGQYSHLVLLAAFDCIDDTKLVKQIIISEIISSLPSIVNDKYGRKVLLYLLSPRDPAHTVREIIEVLQKGDGNAHSKKDTEVRRRELLESISPALLSYLQEHAQEVVLDKSACVLVSDILGSATGDVQPTMNAIASLAATGLHPGGKDGELHIAEHPAGHLVLKWLIEQDKKMKENGREGCFAKTLVEHVGMKNLKSWASVNRGAIILSSLLQSCDLEVANKVKAALKSLIPTLEKTKSTSKGIEILLEKLST

SEQ ID NO: 966 - DNA, 3445 bp, Homo sapien
gagtgactccaccgcccggagcagcggtgcaggacgcgcgtctccgccgcccgcggtgacttctgcctgcgctccttctctgaacgctcacttccgaggagacgccgacgatgaagacaccgtggaaggttcttctgggactgctgggtgctgctgcgcttgtcaccatcatcaccgtgcccgtggttctgctgaacaaaggcacagatgatgctacagctgacagtcgcaaaacttacactctaactgattacttaaaaaatacttatagactgaagttatactccttaagatggatttcagatcatgaatatctctacaaacaagaaaataatatcttggtattcaatgctgaatatggaaacagctcagttttcttggagaacagtacatttgatgagtttggacattctatcaatgattattcaatatctcctgatgggcagtttattctcttagaatacaactacgtgaagcaatggaggcattcctacacagcttcatatgacatttatgatttaaataaaaggcagctgattacagaagagaggattccaaacaacacacagtgggtcacatggtcaccagtgggtcataaattggcatatgtttggaacaatgacatttatgttaaaattgaaccaaatttaccaagttacagaatcacatggacggggaaagaagatataatatataatggaataactgactgggtttatgaagaggaagtcttcagtgcctactctgctctgtggtggtctccaaacggcacttttttagcatatgcccaatttaacgacacagaagtcccacttattgaatactccttctactctgatgagtcactgcagtacccaaagactgtacgggttccatatccaaaggcaggagctgtgaatccaactgtaaagttctttgttgtaaatacagactctctcagctcagtcaccaatgcaacttccatacaaatcactgctcctgcttctatgttgataggggatcactacttgtgtgatgtgacatgggcaacacaagaaagaatttctttgcagtggctcaggaggattcagaactattcggtcatggatatttgtgactatgatgaatccagtggaagatggaactgcttagtggcacggcaacacattgaaatgagtactactggctgggttggaagatttaggccttcagaacctcattttacccttgatggtaatagcttctacaagatcatcagcaatgaagaaggttacagacacatttgctatttccaaatagataaaaaagactgcacatttattacaaaaggcacctgggaagtcatcgggatagaagctctaaccagtgattatctatactacattagtaatgaatataaaggaatgccaggaggaaggaatctttataaaatccaacttagtgactatacaaaagtgacatgcctcagttgtgagctgaatccggaaaggtgtcagtactattctgtgtcattcagtaaagaggcgaagtattatcagctgagatgttccggtcctggtctgcccctctatactctacacagcagcgtgaatgataaagggctgagagtcctggaagacaattcagctttggataaaatgctgcagaatgtccagatgccctccaaaaaactggacttcattattttgaatgaaacaaaattttggtatcagatgatcttgcctcctcattttgataaatccaagaaatatcctctactattagatgtgtatgcaggcccatgtagtcaaaaagcagacactgtcttcagactgaactgggccacttaccttgcaagcacagaaaacattatagtagctagctttgatggcagaggaagtggttaccaaggagataagatcatgcatgcaatcaacagaagactgggaacatttgaagttgaagatcaaattgaagcagccagacaattttcaaaaatgggatttgtggacaacaaacgaattgcaatttggggctggtcatatggagggtacgtaacctcaatggtcctgggatcgggaagtggcgtgttcaagtgtggaatagccgtggcgcctgtatcccggtgggagtactatgactcagtgtacacagaacgttacatgggtctcccaactccagaagacaaccttgaccattacagaaattcaacagtcatgagcagagctgaaaattttaaacaagttgagtacctccttattcatggaacagcagatgataacgttcactttcagcagtcagctcagatctccaaagccctggtcgatgttggagtggatttccaggcaatgtggtatactgatgaagaccatggaatagctagcagcacagcacaccaacatatatatacccacatgagccacttcataaaacaatgtttctctttaccttagcacctcaaaataccatgccatttaaagcttattaaaactcatttttgttttcattatctcaaaactgcactgtcaagatgatgatgatctttaaaatacacactcaaatcaagaaacttaaggttacctttgttcccaaatttcatacctatcatcttaagtagggacttctgtcttcacaacagattattaccttacagaagtttgaattatccggtcgggttttattgtttaaaatcatttctgcatcagctgctgaaacaacaaataggaattgtttttatggaggctttgcatagattccctgagcaggattttaatctttttctaactggactggttcaaatgttgttctcttctttaaagggatggcaagatgtgggcagtgatgtcactagggcagggacaggataagagggattagggagagaagatagcagggcatggctgggaacccaagtccaagcataccaacacgagcaggctactgtcagctcccctcggagaagagctgttcacagccagactggcacagttttctgagaaagactattcaaacagtctcaggaaatcaaatatgcaaagcactgacttctaagtaaaaccacagcagttgaaaagactccaaagaaatgtaagggaaactgccagcaacgcaggcccccaggtgccagttatggctataggtgctacaaaaacacagcaagggtgatgggaaagcattgtaaatgtgcttttaaaaaaaaatactgatgttcctagtgaaagaggcagcttgaaactgagatgtgaacacatcagcttgccctgttaaaagatgaaaatatttgtatcacaaatcttaacttgaaggagtccttgcatcaatttttcttatttcatttctttgagtgtcttaattaaaagaatattttaacttccttggactcattttaaaaaatggaacataaaatacaatgttatgtattattattcccattctacatactatggaatttctcccagtcatttaataaatgtgccttcattttttc

SEQ ID NO: 967 - protein, 766 aa, Homo sapien
MKTPWKVLLGLLGAAALVTIITVPVVLLNKGTDDATADSRKTYTLTDYLKNTYRLKLYSLRWISDHEYLYKQENNILVFNAEYGNSSVFLENSTFDEFGHSINDYSISPDGQFILLEYNYVKQWRHSYTASYDIYDLNKRQLITEERIPNNTQWVTWSPVGHKLAYVWNNDIYVKIEPNLPSYRITWTGKEDIIYNGITDWVYEEEVFSAYSALWWSPNGTFLAYAQFNDTEVPLIEYSFYSDESLQYPKTVRVPYPKAGAVNPTVKFFVVNTDSLSSVTNATSIQITAPASMLIGDHYLCDVTWATQERISLQWLRRIQNYSVMDICDYDESSGRWNCLVARQHIEMSTTGWVGRFRPSEPHFTLDGNSFYKIISNEEGYRHICYFQIDKKDCTFITKGTWEVIGIEALTSDYLYYISNEYKGMPGGRNLYKIQLSDYTKVTCLSCELNPERCQYYSVSFSKEAKYYQLRCSGPGLPLYTLHSSVNDKGLRVLEDNSALDKMLQNVQMPSKKLDFIILNETKFWYQMILPPHFDKSKKYPLLLDVYAGPCSQKADTVFRLNWATYLASTENIIVASFDGRGSGYQGDKIMHAINRRLGTFEVEDQIEAARQFSKMGFVDNKRIAIWGWSYGGYVTSMVLGSGSGVFKCGIAVAPVSRWEYYDSVYTERYMGLPTPEDNLDHYRNSTVMSRAENFKQVEYLLIHGTADDNVHFQQSAQISKALVDVGVDFQAMWYTDEDHGIASSTAHQHIYTHMSHFIKQCFSLP

SEQ ID NO: 968 - DNA, 1355 bp, Homo sapien
cagtggctggtaggcagtggctgggaggcagcggcccaattagtgtcgtgcggcccgtggcgaggcgaggtccggggagcgagcgagcaagcaaggcgggaggggtggccggagctgcggcggctggcacaggaggaggagcccgggcgggcgaggggcggccggagagcgccagggcctgagctgccggagcggcgcctgtgagtgagtgcagaaagcaggcgcccgcgcgctagccgtggcaggagcagcccgcacgccgcgctctctccctgggcgacctgcagtttgcaatatgactttggaggaattctcggctggagagcagaagaccgaaaggatggataaggtgggggatgccctggaggaagtgctcagcaaagccctgagtcagcgcacgatcactgtcggggtgtacgaagcggccaagctgctcaacgtcgaccccgataacgtggtgttgtgcctgctggcggcggacgaggacgacgacagagatgtggctctgcagatccacttcaccctgatccaggcgttttgctgcgagaacgacatcaacatcctgcgcgtcagcaacccgggccggctggcggagctcctgctcttggagaccgacgctggccccgcggcgagcgagggcgccgagcagcccccggacctgcactgcgtgctggtgacgaatccacattcatctcaatggaaggatcctgccttaagtcaacttatttgtttttgccgggaaagtcgctacatggatcaatgggttccagtgattaatctccctgaacggtgatggcatctgaatgaaaataactgaaccaaattgcactgaagtttttgaaatacctttgtagttactcaagcagttactccctacactgatgcaaggattacagaaactgatgccaaggggctgagtgagttcaactacatgttctgggggcccggagatagatgactttgcagatggaaagaggtgaaaatgaagaaggaagctgtgttgaaacagaaaaataagtcaaaaggaacaaaaattacaaagaaccatgcaggaaggaaaactatgtattaatttagaatggttgagttacattaaaataaaccaaatatgttaaagtttaagtgtgcagccatagtttgggtatttttggtttatatgccctcaagtaaaagaaaagccgaaagggttaatcatatttgaaaaccatattttattgtattttgatgagatattaaattctcaaagttttattataaattctactaagttattttatgacatgaaaagttatttatgctataaattttttgaaacacaatacctacaataaactggtatgaataattgcatcatt

SEQ ID NO: 969 - protein, 165 aa, Homo sapien
MTLEEFSAGEQKTERMDKVGDALEEVLSKALSQRTITVGVYEAAKLLNVDPDNVVLCLLAADEDDDRDVALQIHFTLIQAFCCENDINILRVSNPGRLAELLLLETDAGPAASEGAEQPPDLHCVLVTNPHSSQWKDPALSQLICFCRESRYMDQWVPVINLPER

SEQ ID NO: 970 - DNA, 6076 bp, Homo sapien
gattcctgcagggagggaggagagaagggcggcagtgggagggggaggtacctggaactgggagtgatgtcagctcccagctcggtgcctgcccggattcctgacatggtgtagtgcaggcagggtggggaaaggacggggaaggactcgtgtgctgcgagctggcggccgggccggagtgctggggctttgaactccgagaggaggtggaccagaacttttggaactagtgccggcggctctccaccccccagtataaaagaacgtgtggatcactttgctgagtacatccaagatttgaagaactgaaataaatcagctttaaacctgctttttaaaaatatctgggttggaatttgcccctgacaaataataaaatgatgagtgatgcaagtgacatgttggctgcagcgttggagcagatggatggtatcatagcaggttctaaggctctggaatattccaatgggatttttgattgccaatctcccacctctccattcatgggaagtttgcgagctctgcaccttgtggaagacctgcgtggattgttagagatgatggaaacagatgagaaagaaggcttgagatgccagatcccagattcaacagcagaaacgcttgttgaatggcttcagagtcaaatgacaaatggacacctaccagggaacggagatgtgtatcaagaaaggctggcacgtttagaaaatgataaagaatccctcgttcttcaggtaagtgtgttaacagaccaggtggaggctcagggagagaagattcgagatttggagttttgtcttgaagagcacagagagaaggtgaatgccacagaagaaatgctgcagcaggagcttctaagtaggacatccttagaaactcagaagttggatctgatggctgaaatatctaacttgaagttgaaactgacagctgtagagaaggacagattggattatgaagataagttcagagacacagaggggctgattcaggagatcaatgatttgaggttaaaagttagtgaaatggacagtgagagacttcagtatgaaaaaaagcttaaatcaaccaaagatgaactggcatctttaaaagaacaactagaagaaaaggaatctgaagtaaaaaggctacaagaaaaattggtttgcaagatgaaaggagaaggggttgaaattgttgatagagatgaaaattttaaaaagaagctcaaagaaaaaaacatcgaagtacaaaaaatgaaaaaagctgtggagtccttgatggcagcaaatgaagaaaaggatcggaaaatagaagatcttcgacagtgcctgaacaggtacaagaaaatgcaagacacggtggtactggcccaaggtaaaaaaggcaaagatggagaatatgaagagctgctcaattccagttccatctcctctttgctggatgcacagggtttcagtgatctggagaaaagtccatcacccactccagtaatgggatctcccagttgtgacccatttaacacaagtgttcccgaagagttccatactaccatcttgcaagtttccatcccttcattattgccagcaactgtaagcatggaaacttctgaaaaatcaaagttgactcctaagccagagacttcatttgaagaaaatgatggaaacataatccttggtgccactgttgatacccaactgtgtgataaacttttaacttcaagtctgcagaagtccagcagcctgggcaatctgaagaaagagacatctgatggggaaaaggaaactattcagaagacttcagaggacagagctccggcagaaagcaggccatttgggacccttcctcccaggcccccagggcaggacacctccatggatgacaaccccttcggcactcgaaaagtcagatcttcctttggccggggcttttttaaaatcaaaagtaacaagagaacagcaagtgcaccaaacttagatcgtaaacgaagtgccagtgcacccaccctagctgaaacagaaaaagagacagcagagcacctagatctggctggtgcttcttctcggccaaaagattcacagaggaacagtcccttccagataccgcctccatctccagattccaaaaagaaatccagaggtatcatgaaactctttggaaaacttaggagaagtcaatcaactacattcaacccagatgacatgtctgagcctgaattcaaaagaggagggacaagggcaaccgcggggccccgattaggttggtctcgagacttgggacagtctaacagtgacttggatatgccatttgccaagtggaccaaggagcaggtttgcaattggctgatggaacagggcttgggctcgtacctgaattctggcaagcactggattgcatctggccaaacgcttttgcaggcttctcaacaagatctagagaaggaacttggaatcaagcattcacttcatcgaaagaaactccagctagcactccaagccctgggatctgaagaagaaaccaatcatgggaagctggatttcaactgggtcactagatggttggatgacattggcctccctcaatataagacccagtttgatgaaggacgggttgatggtcgaatgctacattacatgactgttgatgacttactgtctctgaaggttgtaagtgtgctacaccatctcagtatcaaaagggccatccaggtcctgaggatcaataactttgaaccaaactgtctacggaggcggccatctgatgagaataccatcgccccatcagaagttcagaagtggactaaccatcgagtgatggagtggctgcgctccgtggacttggcagaatatgcgcccaatctcagaggcagtggtgtccatggtgggctcatggttctagagcctcgttttaacgtagaaacaatggctcagttattgaacatcccacccaataagactttgctgcgaagacatttggccactcatttcaaccttctgattggggctgaggcacagcaccagaagcgagatgccatggagctgccggattatgtacttctaacagctactgccaaagtgaagccaaagaaacttgcctttagcaattttgggaatttgagaaagaagaaacaggaagatggtgaagaatatgtttgtccaatggaattgggacaggcatcaggaagtgcatctaagaaaggatttaaacctggtttggatatgcgcctgtatgaggaagatgatttggaccggttagagcagatggaagattcagaagggacagtgagacagataggtgcattctctgaaggcatcaacaatctgacgcacatgttaaaagaagatgacatgtttaaagattttgctgcccgttcccccagtgccagcattacagatgaagactcaaacgtttgaccgtagcacctggatgaacattaggagtgcttagtcttttttctacttgcttttccaaacactcacagtatatacaacaggcagcggattgtctattgtttgttgttccaacttctgctgtcgagaagtttaaacagaaagcaggagtaatgtgccgattctgaagttgccacaaaaaataagacactggtgaatgagagtataattgtttttcttctatttaatgtaaaaatctgtgatatattatatttaaagtgttgcatttaagatgagtattttaccagagtgtttccattcatatccgcggtatggaggatttgaggaacagtaaccaggatgtgaatgattttgttacatcagtgttcactgtagccacctaagtaggacattatatgatttcagaatcaatatgtggaacttctttaagcattcagtgtgcccactaaatgccagccacacctccacttgcctcttattgtcttatttttatatatttttctaaatatatgtatatatacagtacatagaaaatagaacttttattttgtgacctaaggacgatggtgaaaagatcacgttttcaaaacaatctggtgatcagaatgttcatataccagctggtttctgaagaggtcagaatgatctttctccatactgacttttaacaatgttgatcattgaggctaaattaatatatatgaaatattcctttttgatgacaccacaaaattgttgaacagtttaagaatttcaaccttaatcttggatccctttacctcatatggaagaacttgagggacattagtatacttttttttaagatggagtcttgctctgtcacccaggttggagtgccatggcatgatcttggctcactgcaacctccacctcctgggtcaagccattctgcttcagccccaagtaggtgggactccaggcatgcaccaccatgcctggctaatttttgcatttttagtagagacagggtttcaccatattggccaggctgggactcgaactcctgaccttgtgatctgcccgcctcagcctcccaaagtactgggattataggcatgagccaccacgcccagcctgttatttttttattattattgtttttttttagtgacagagtctcattctgttgcccatgctggagtgcagtggcgtgatcatagctcactgcagccttgaattcctaggctccagtgatcctctcacctcagcttccctaatagctaggattacaggtgtgtggcctcccaccccaccccacccttcacacctggctgatttttcaaaaagtttttttgtagaaacagggtctcaccatgttgtccagcctggtctcaaactcctgtcctcaagtgatcctcccacctcagcctttcaaagtgctggaattacaggtgtgagccactctgcctggcctaccactaacttgaatacattcagaatcacctcctctccccaaaatttgtagaaatagtttttgaggaagccaaaagcaaagcagaaacctttacagtattgtttcttttctctttgttaactgtgtcattacagcaaaatactagcagtctgcctaaacatgttcattgtacatttctcaggctatcaatgaatggaggtttttaaaaagttgaatatttgtctgaacattttatttcaaagttcaaaaaaacagaggctgcaaaattcattttataatggctattttgtgacgataagatgtagttcatgtttttctgtagcactgggcccaaatattctttgtaaagaaaatcgctgcagcaaaaactgttactgtgtttattatatttgtagaagtattagaaaaatattctattttttattcagtgctgcgtaattacccatggtagccaaccctacaaaagacaggttttcacaaattgaggtggaggtgggcggttcagtatctgccactggacttgattataaactgtatttgaatatcagtggtattatcttttaagttgtcagcaagttaccaaggtattcattaaagaacttgtaatatcaaattactatttattcataacaattgatttgatgctaataataattttctttaaactctaccattcattatgtggtaactgtattgaacttactttatttggattttattttaatgtgactagatgtcaccacttcaaaaaatcaatttgttcttagaacctggttgaaaataccaggaaactgttacagacgccattttttttttttttgagacggagtcttgctctgttgcccaggctggagtgcagtggcacaatctcagctcactgcaagctccgcctcctgggttcacgccattctcccacctcagcttcccaagcagctgggactacaggtacctgccaccacgcctggctaattttgtttttgtatttttagtagagacggggtttcaccgtgttagccaggaaggtctcaatctcctgacctcgtgaatcgcccccctcggtctcccaaagtgctgggattacaggcgtgagccaccatgcccggcccaaatattttttattcaggatggtataacctaactgataataggtaataaggttaaatttttttatgacgtattttatttacaaatatcatacactgctggtgttaccatatgaaaggaaataaagtcaattgataattgcctc

SEQ ID NO: 971 - protein, 1005 aa, Homo sapien
MMSDASDMLAAALEQMDGIIAGSKALEYSNGIFDCQSPTSPFMGSLRALHLVEDLRGLLEMMETDEKEGLRCQIPDSTAETLVEWLQSQMTNGHLPGNGDVYQERLARLENDKESLVLQVSVLTDQVEAQGEKIRDLEFCLEEHREKVNATEEMLQQELLSRTSLETQKLDLMAEISNLKLKLTAVEKDRLDYEDKFRDTEGLIQEINDLRLKVSEMDSERLQYEKKLKSTKDELASLKEQLEEKESEVKRLQEKLVCKMKGEGVEIVDRDENFKKKLKEKNIEVQKMKKAVESLMAANEEKDRKIEDLRQCLNRYKKMQDTVVLAQGKKGKDGEYEELLNSSSISSLLDAQGFSDLEKSPSPTPVMGSPSCDPFNTSVPEEFHTTILQVSIPSLLPATVSMETSEKSKLTPKPETSFEENDGNIILGATVDTQLCDKLLTSSLQKSSSLGNLKKETSDGEKETIQKTSEDRAPAESRPFGTLPPRPPGQDTSMDDNPFGTRKVRSSFGRGFFKIKSNKRTASAPNLDRKRSASAPTLAETEKETAEHLDLAGASSRPKDSQRNSPFQIPPPSPDSKKKSRGIMKLFGKLRRSQSTTFNPDDMSEPEFKRGGTRATAGPRLGWSRDLGQSNSDLDMPFAKWTKEQVCNWLMEQGLGSYLNSGKHWIASGQTLLQASQQDLEKELGIKHSLHRKKLQLALQALGSEEETNHGKLDFNWVTRWLDDIGLPQYKTQFDEGRVDGRMLHYMTVDDLLSLKVVSVLHHLSIKRAIQVLRINNFEPNCLRRRPSDENTIAPSEVQKWTNHRVMEWLRSVDLAEYAPNLRGSGVHGGLMVLEPRFNVETMAQLLNIPPNKTLLRRHLATHFNLLIGAEAQHQKRDAMELPDYVLLTATAKVKPKKLAFSNFGNLRKKKQEDGEEYVCPMELGQASGSASKKGFKPGLDMRLYEEDDLDRLEQMEDSEGTVRQIGAFSEGINNLTHMLKEDDMFKDFAARSPSASITDEDSNV

SEQ ID NO: 972 - DNA, 5361 bp, Homo sapien
gccagcgatcagagcagcgctgggtgttcaggggccaagatggcggcgcgccggggacggagagacggagtcgcgccgcccccgagtgggggccccggtccggaccctggcgggggagcccgcggcagtggttggcgaagtcgaagccaagcgccgtatgggactttgggcgctgtgagcggcggcgagcaggtgctgctgcatgaggaggcgggtgattctggctttgtcagtctctctcggcagggcccatctctgagggacaaggacctggaaatggaggagctaatgctgcaggatgagacactgctggggaccatgcagagctacatggatgcctcccttatctccctcattgaggattttgggagccttggagagagcaggttatctctggaggaccacaatgaagtgtcgctgctcacggctctgacggagatcttggacaatgcagattctgagaacctttctccatttgacagcattcctgattcggagctgcttgtgtcaccccgggagggctcctctctgcacaagctgcttactctctctcggacacccccagaacgtgacctcatcaccccagttgacccactggggcccagtacgggcagcagtagagggagtggggttgaaatgtctcttccagatccctcttgggacttctccccaccctctttcttagagacctcttcccccaagcttcctagctggagacccccaagatcaagaccacgctggggccaatccccacctccccagcagcgcagtgatggagaagaagaggaggaggtggccagcttcagtggccagattcttgccggggagcttgacaactgtgtgagcagtatcccggacttccccatgcatttggcctgccctgaggaggaagataaagcaacagcagcagagatggcagtgccagcagctggtgatgagagcatctcctccctgagtgagctggtgcgggccatgcacccatactgcctgcccaacctcacccacctggcatcacttgaggatgagcttcaggagcagccagatgatttgacactgcctgagggctgcgtagtgctggagattgtggggcaggcagccacagctggcgatgacctggagatcccagttgtggtgcgacaggtctctcctggaccccggcctgtgctcctggatgactcgctagagactagttctgccttgcagctgcttatgcctacactggagtcagagacagaggctgctgtgcccaaggtaaccctctgctctgagaaagaggggttgtcattgaactcagaggagaagctggactcagcctgcttattgaagcccagggaggtcgtggagccggtggtgcccaaggagcctcagaacccacctgccaatgcagcaccaggttcccagagagctcgaaagggcaggaagaagaagagcaaggagcagccagcagcctgtgtggaaggctatgccaggaggctgaggtcatcttctcgcgggcagtctactgtaggtacagaagtgacctctcaggtagacaacttgcagaaacagcctcaggaagaacttcaaaaagagtctgggcctctccagggtaaggggaagccccgggcttgggctcgggcctgggcagctgccttggagaattctagccctaagaacttggagagaagtgctggacaaagtagtcctgctaaagaaggccctctagacctctacccaaagctggctgacactatccaaaccaatcctataccaacccatctctcattggtcgactctgcccaagccagccccatgccagttgactctgttgaagctgatcccactgcagttggccctgttctagctggccctgtacctgttgaccctgggttggttgaccttgcttcaaccagctcagaactggttgagcctctcccggctgagccagtgctgatcaacccagtcctggctgactcagcagcagttgaccctgcagtggttcccatctcagataacttgccaccagttgatgctgtcccgtctggcccagcaccagttgatctagcactggttgaccctgttcctaatgacctgactccagttgacccagtgctagttaagtccagaccaactgatcccagacgtggtgcagtgtcatcagccctggggggttcagcaccccagctcctcgtggagtcagagtccttggacccaccaaagaccatcatccctgaagtcaaagaggttgtggattctctgaaaattgaaagtggtaccagtgctacaacccatgaagccagacctcggcctctcagcttatctgagtaccggcgacgaaggcagcaacgccaagcagaaacagaagagagaagtccacagcccccaactgggaagtggcctagccttccagagactcccacagggctggcagacatcccttgtcttgtcatcccaccagccccagccaagaagacagctctgcagagaagccctgaaacaccccttgagatttgccttgtgcctgtaggtcccagccctgcttctcctagtcctgagccacctgtaagcaaacctgtggcctcatctcccactgagcaggtgccatcccaggagatgccactgttggcgagaccttcccctcctgtgcagtctgtgtcccctgctgtgcccacacctccctcgatgtctgctgccctgcctttccctgcaggtgggcttggcatgccccccagtctgcccccacctcccttgcagcctcctagtcttccattgtctatggggccagtactacctgatccgtttactcactatgcccccttgccatcctggccttgttatcctcatgtgtccccttctggctatccttgcctgccccccccaccaacggtgcccctagtgtctggtactcctggtgcctatgccgtgcctcccacttgcagtgtgccttgggcaccccctcctgccccagtctcaccttacagttccacatgtacctatgggcccttgggatggggcccagggcctcaacatgctccattctggtctactgttcccccacctcctttgcctccagcctccattgggagagctgttccccaacctaaaatggagtctaggggcactccagctggccctcctgaaaatgtacttcccttgtcgatggctcctcccctcagtcttgggctacctggccatggagctcctcagacagagcctaccaaggtggaggtcaagccagtgcctgcatctccccatccgaaacacaaggtgtctgccctggtgcaaagtccccagatgaaggctctagcatgtgtgtctgctgaaggtgtgactgttgaggagcctgcatcagagaggctaaagcctgagacccaagagaccaggcccagggagaagccccccttgcctgctaccaaggctgttcccacaccaaggcagagcactgtccccaagctgcctgctgtccacccagcccgtctaaggaagctgtccttcctgcctaccccacgtactcagggttctgaagatgtggtacaggctttcatcagtgagattggaattgaggcatcggacctgtccagtctgctggagcagtttgagaaatcagaagccaaaaaggagtgtcctcctccggctcctgctgacagcttggctgtaggaaactcaggcggcgttgacattccccaggagaagaggcccctagaccggttacaagccccagaactggccaacgtggcagggctcacccctccagctacccctccccaccagttatggaagcccctggctgctgtctcactgctggccaaagccaaatctcctaagtccaccgcccaggagggaaccctgaagcctgaaggagttacggaggccaaacatccagctgcagttcgcctccaagaaggggtccatggccctagtcgagtccatgtgggctctggggaccatgactattgtgtccggagcaggacccccccaaaaaagatgcctgccctagtcattccagaggtgggctcccgatggaatgtcaagcgccatcaggacatcaccatcaaacctgtcttgtccttgggcccagctgcccctccgcccccatgcatagctgcctcccgggagccgcttgatcacaggactagcagtgagcaggcagatccctcagcaccctgccttgccccatccagcttgctgtcccctgaggcctcaccctgccggaatgacatgaacactaggactccccctgaaccctcagccaagcagcggtcaatgcgctgttaccgaaaagcctgcaggtcagccagcccctcaagccagggctggcagggccgccgaggccgcaacagccgttctgtcagctctgggtccaaccggactagcgaagcatcttcctcatcctcatcatcgtcttcctcatcccgatctcggtccaggtccctctcccccccacacaagaggtggcgaaggtccagctgtagttcctctggacgttctcgaagatgctcttcctcttcttcgtcatcatcttcctcttcgtcttcctcatcctcatcatccagttctcgaagccgctcacgatccccatccccccgccggagaagtgacaggaggcggcggtacagctcttatcgttcacatgaccattaccaaaggcaaagagtgctacaaaaggagcgtgcaatagaagaaagaagggtggtcttcattggaaagatacctggccgcatgactcgatcagagctgaaacagaggttctccgtttttggagagattgaggagtgcaccatccacttccgtgtccaaggggacaactacggcttcgtcacttatcgctatgctgaggaggcatttgcagccattgagagtggccacaagctgcggcaggcagatgagcagccctttgatctctgctttgggggccgaaggcagttctgcaagaggagctattctgatcttgactccaaccgggaagactttgacccagcacctgtaaagagcaaatttgattctcttgactttgacacattgttgaaacaggcccagaagaacctcaggaggtaaccttgggcccttccctgctatcctttttctcctttggaggtgcccaacctcctccacccccttcccctactctaggggagagagctgctagtgagatgactgttttataaagaaatggaaaaaagtgaaataaaaaatatgttgaatcagattttttaaaaggggtatttgtttttttataacaggtattgaaacaagttaacttgcattcctatgtaagataggaggggctgaggggatccccagtgtttggaacataagtcactatgcagactaataaacatcaactagagagagaaaaaaaaaaaaaaaaaaaaaaaaaaaaaa

SEQ ID NO: 973 - protein, 1664 aa, Homo sapien
MAARRGRRDGVAPPPSGGPGPDPGGGARGSGWRSRSQAPYGTLGAVSGGEQVLLHEEAGDSGFVSLSRQGPSLRDKDLEMEELMLQDETLLGTMQSYMDASLISLIEDFGSLGESRLSLEDHNEVSLLTALTEILDNADSENLSPFDSIPDSELLVSPREGSSLHKLLTLSRTPPERDLITPVDPLGPSTGSSRGSGVEMSLPDPSWDFSPPSFLETSSPKLPSWRPPRSRPRWGQSPPPQQRSDGEEEEEVASFSGQILAGELDNCVSSIPDFPMHLACPEEEDKATAAEMAVPAAGDESISSLSELVRAMHPYCLPNLTHLASLEDELQEQPDDLTLPEGCVVLEIVGQAATAGDDLEIPVVVRQVSPGPRPVLLDDSLETSSALQLLMPTLESETEAAVPKVTLCSEKEGLSLNSEEKLDSACLLKPREVVEPVVPKEPQNPPANAAPGSQRARKGRKKKSKEQPAACVEGYARRLRSSSRGQSTVGTEVTSQVDNLQKQPQEELQKESGPLQGKGKPRAWARAWAAALENSSPKNLERSAGQSSPAKEGPLDLYPKLADTIQTNPIPTHLSLVDSAQASPMPVDSVEADPTAVGPVLAGPVPVDPGLVDLASTSSELVEPLPAEPVLINPVLADSAAVDPAVVPISDNLPPVDAVPSGPAPVDLALVDPVPNDLTPVDPVLVKSRPTDPRRGAVSSALGGSAPQLLVESESLDPPKTIIPEVKEVVDSLKIESGTSATTHEARPRPLSLSEYRRRRQQRQAETEERSPQPPTGKWPSLPETPTGLADIPCLVIPPAPAKKTALQRSPETPLEICLVPVGPSPASPSPEPPVSKPVASSPTEQVPSQEMPLLARPSPPVQSVSPAVPTPPSMSAALPFPAGGLGMPPSLPPPPLQPPSLPLSMGPVLPDPFTHYAPLPSWPCYPHVSPSGYPCLPPPPTVPLVSGTPGAYAVPPTCSVPWAPPPAPVSPYSSTCTYGPLGWGPGPQHAPFWSTVPPPPLPPASIGRAVPQPKMESRGTPAGPPENVLPLSMAPPLSLGLPGHGAPQTEPTKVEVKPVPASPHPKHKVSALVQSPQMKALACVSAEGVTVEEPASERLKPETQETRPREKPPLPATKAVPTPRQSTVPKLPAVHPARLRKLSFLPTPRTQGSEDVVQAFISEIGIEASDLSSLLEQFEKSEAKKECPPPAPADSLAVGNSGGVDIPQEKRPLDRLQAPELANVAGLTPPATPPHQLWKPLAAVSLLAKAKSPKSTAQEGTLKPEGVTEAKHPAAVRLQEGVHGPSRVHVGSGDHDYCVRSRTPPKKMPALVIPEVGSRWNVKRHQDITIKPVLSLGPAAPPPPCIAASREPLDHRTSSEQADPSAPCLAPSSLLSPEASPCRNDMNTRTPPEPSAKQRSMRCYRKACRSASPSSQGWQGRRGRNSRSVSSGSNRTSEASSSSSSSSSSSRSRSRSLSPPHKRWRRSSCSSSGRSRRCSSSSSSSSSSSSSSSSSSSSRSRSRSPSPRRRSDRRRRYSSYRSHDHYQRQRVLQKERAIEERRVVFIGKIPGRMTRSELKQRFSVFGEIEECTIHFRVQGDNYGFVTYRYAEEAFAAIESGHKLRQADEQPFDLCFGGRRQFCKRSYSDLDSNREDFDPAPVKSKFDSLDFDTLLKQAQKNLRR

SEQ ID NO: 974 - DNA, 2448 bp, Homo sapien
cagagtttgaaaaaacggatggaagtaccagactatgaaatgttcccagcaagttcttcatctccatctgagaccacctcagcctggatttcattgtccatgtcattatcagcattttggtccaagccattcaacaagtctctaggaagttccaaactgtccaacatttccctgccttcttctgagccctccaaactgttccaacctctgccagttccaaagttgcttccacattttcaggttcaccaggctggtttaacctgcgattattcagaacttcctcaccatatcagcacagaacaagaaatagagtgtcttattcaatctgtgcattatttgctgaaaaatttaccaaatcctactcttgtgacaattgcaaggtcaagtctggatgattactgtccttctgaccaagttgacactattcaagaaaaggtcctcaatatgctacgtgccctctatggaaatctagacctccaagtgtatgcagcagagtctcctccatcttgaaacaaacaaaacattaggctcctgttgtatcttggtttagtaacaggcccttaattaacttatttgtacatgagtcttccagagaacactgttttatattaactttcagttgaaatctttcagatattttgaatctctgaacaaccattgtcagttgtgaatgatggtaaattttttggcatcaagtctcataaccccaactgatagaactgttgcttatctgtcttccttaagtattttttagggttttgttttttttttttgtttgtttgtttgtttgtcttcacttttcccccaggtctgttgagctgtatgagattcattcatacttcatttattcattcaactaatatttgttgaacacttacatgtaccagacattattaagtgctgggtatatggtaatgaacagaatagacaaggcccctgcccttttaggggagacagatgagaagtaaattacgggttatgagaaatgttatgaaggaaaggacaacaacagacatgtcttagtacttagggtatcatggctttataggaaagtaacattctctatctttttttttttttttaattttataaaaatagagatggggtctcaccatgttacccaggctggtctcaaactcctgggcacaagcaatccacctgccttcgcctcccgaagtgctgggattacagatgtaagtcactaccccagccagaaactaacattctcaaaagctactaccaaaaaaaccccacaaatttgccaatccatgaaagtatcataggaagtctacctttccaaggaatttggcattgtggccctgctcttgccaaatgctctccagcattgttggtatcaaggtggtctggttgagtaaacttgaccaaacaaaaattaactgttttttgcttttctgtttttgttttgctgatcaaaaaagcccttcagggtcttttgtgcatccaggaggtcattgtagatatcaataatatagtgcctaagtgccactttattgccaagtctagattgatacttttttcagataaaccagctttttatgtaaagagtaagggaaaaagttaaatctttaattctgacctgccataaatacccaaagatataacctgtcttccaccacccccctcataactaagacatccttcctgagtcactcttaatcatgaaacttgattttctcaattggccagtcttctgatctttagtatctctttagttcagtaatttttacctacctacttgatttattttcctttaaaaggtgaaatgacatttaaagaaaaacaaacacccatcattcctcagtcccaacacagcagttcttttcactcttgcttgtaactttcaggccttacccacatgtgttcctatagagttgcatgtagctaaaattatagtgtgctgcctaactttgtgctaataacgaaggacacacattatcattgcctcacagtggatggcacctgaccccatttttccaaggattctattttccagtgaatttttgtcaccgagttaatttcccaagtctgatagcatgaatgcttatttgtgctgtgaaaagcagagcagcctgactcagctttccattttcataggataatatgtgccaaaaaaggtttattttcttggtaaaatcaggattgtagaattgtgctatttttaatttttaaaatttttggttagagcttatagacattacttttatgattattttgcgtgctaaataagttaaagggtatgttttgaactatagcactaattaatgtgtgtgatcctagtatgttgatagctttgattttgtgagtggtttactagtcatttattatgattcccatgaactctgatatgattcattgtggttttaactcaggttgaataaaagcatccatttcttttaaaaaaaaaaaaaagaaaaaaaaaaaaaaaaa

SEQ ID NO: 975 - DNA, 5632 bp, Homo sapien
gacaaagagaactaatgctttgtgctgattcatatttgaatcgaggcattgggaaccctgtatgccttgtttgtggaaagaaccagtgacaccatcactgagcttcctaaaagttcgaagaagttagaggactatacactttcttttgaacttttataataaatatttgctctggtttttggaacccagggctgttagaggggtgagtgacaagtcttacaagtggccttattccaactccagaaattgcccaacggaactttgagattatatgcaatcgaaagtgacaggaaacatgccaactcaatccctcttaatgtacatggatgggccagaagtgattggcagctctcttggcagtccgatggagatggaggatgccttgtcaatgaaagggaccgctgttgttccattccgagctacacaagaaaaaaatgtcatccaaatcgaggggtatatgcccttggattgcatgttctgcagccagaccttcacacattcagaagaccttaataaacatgtcttaatgcaacaccggcctaccctctgtgaaccagcagttcttcgggttgaagcagagtatctcagtccgcttgataaaagtcaagtgcgaacagaacctcccaaggaaaagaattgcaaggaaaatgaatttagctgtgaggtatgtgggcagacatttagagtcgcttttgatgttgagatccacatgagaacacacaaagattctttcacttacgggtgtaacatgtgcggaagaagattcaaggagccttggtttcttaaaaatcacatgcggacacataatggcaaatcgggggccagaagcaaactgcagcaaggcttggagagtagtccagcaacgatcaacgaggtcgtccaggtgcacgcggccgagagcatctcctctccttacaaaatctgcatggtttgtggcttcctatttccaaataaagaaagtctaattgagcaccgcaaggtgcacaccaaaaaaactgctttcggtaccagcagcgcgcagacagactctccacaaggaggaatgccgtcctcgagggaggacttcctgcagttgttcaacttgagaccaaaatctcaccctgaaacggggaagaagcctgtcagatgcatccctcagctcgatccgttcaccaccttccaggcttggcagctggctaccaaaggaaaagttgccatttgccaagaagtgaaggaatcggggcaagaagggagcaccgacaacgacgattcgagttccgagaaggagcttggagaaacaaataagggcagttgtgcaggcctctcgcaagagaaagagaagtgcaaacactcccacggcgaagcgccctccgtggacgcggatcccaagttacccagtagcaaggagaagcccactcactgctccgagtgcggcaaagctttcagaacctaccaccagctggtcttgcactccagggtccacaagaaggaccggagggccggcgcggagtcgcccaccatgtctgtggacgggaggcagccggggacgtgttctcctgacctcgccgcccctctggatgaaaatggagccgtggatcgaggggaaggtggttctgaagacggatctgaggatgggcttcccgaaggaatccatctggataaaaatgatgatggaggaaaaataaaacatcttacatcttcaagagagtgtagttattgtggaaagtttttccgttcaaattattacctcaatattcatctcagaacgcatacaggtgaaaaaccatacaaatgtgaattttgtgaatatgctgcagcccagaagacatctctgaggtatcacttggagagacatcacaaggaaaaacaaaccgatgttgctgctgaagtcaagaacgatggtaaaaatcaggacactgaagatgcactattaaccgctgacagtgcgcaaaccaaaaatttgaaaagattttttgatggtgccaaagatgttacaggcagtccacctgcaaagcagcttaaggagatgccttctgtttttcagaatgttctgggcagcgctgtcctctcaccagcacacaaagatactcaggatttccataaaaatgcagctgatgacagtgctgataaagtgaataaaaaccctacccctgcttacctggacctgttaaaaaagagatcagcagttgaaactcaggcaaataacctcatctgtagaaccaaggcggatgttactcctcctccggatggcagtaccacccataaccttgaagttagccccaaagagaagcaaacggagaccgcagctgactgcagatacaggccaagtgtggattgtcacgaaaaacctttaaatttatccgtgggggctcttcacaattgcccggcaatttctttgagtaaaagtttgattccaagtatcacctgtccattttgtaccttcaagacattttatccagaagttttaatgatgcaccagagactggagcataaatacaatcctgacgttcataaaaactgtcgaaacaagtccttgcttagaagtcgacgtaccggatgcccgccagcgttgctgggaaaagatgtgcctcccctctctagtttctgtaaacccaagcccaagtctgctttcccggcgcagtccaaatccctgccatctgcgaaggggaagcagagccctcctgggccaggcaaggcccctctgacttcagggatagactctagcactttagccccaagtaacctgaagtcccacagaccacagcagaatgtgggggtccaaggggccgccaccaggcaacagcaatctgagatgtttcctaaaaccagtgtttcccctgcaccggataagacaaaaagacccgagacaaaattgaaacctcttccagtagctccttctcagcccaccctcggcagcagtaacatcaatggttccatcgactaccccgccaagaacgacagcccgtgggcacctccgggaagagactatttctgtaatcggagtgccagcaatactgcagcagaatttggtgagccccttccaaaaagactgaagtccagcgtggttgcccttgacgttgaccagcccggggccaattacagaagaggctatgaccttcccaagtaccatatggtcagaggcatcacatcactgttaccgcaggactgtgtgtatccgtcgcaggcgctgcctcccaaaccaaggttcctgagctccagcgaggtcgattctccaaatgtgctgactgttcagaagccctatggtggctccgggccactttacacttgtgtgcctgctggtagtccagcatccagctcgacgttagaaggaaaaaggcctgtgtcatatcaacacttatctaacagcatggcacaaaagagaaactatgagaattttattgggaatgcacattatcgaccaaatgacaaaaaaacttgattcactaattagggggaaaaaaggtcttggtggatgtcagtgcttactccccatgaaattaaattttacttcatcctttgagaagcgaatggtgaaagctactgaaataagctgtgattgtactgtacataaaacatatgaggaatctgcaaggaacactacagttgtgtaaagttgttctgttaacttttgtaccaaatagcaatacaaactagttggaacagttggaacttacatacatggggactggaaatctctattttgtccctgaataatatttttcttagaattgaccaaataagaagtggaatttttgcatacttgagcgctgctgaaaagaaatcatttgggttgggtggggcgggatgggggaaaagtatataatgcttgcacctcaggtaaaaatctgtaaatatctaagttgtaaacctgcttgttcaaatactgtgtgtattccttttctctaatgcagctcatcacttggagcagtttctgctattgtgctctttcatttaaaatgtatgtttttttttttttaaactgtcaatgattttgtattatgttgaatccacccaaatctattgttgtcttaaaattgttaatggaagtattgaccctctatgatatgtgctgcagatatcgaggtcagccattcggaagctggcagcattttatcgcaactttgagcatctcagatggggaaggcaccttcttcctcgcctctccagattgtcctggaacctccaggatccttgactgagggcgttgggatggcttgtaggatttttaagagagtgtgtctacagacaagcattttctctgtagagcagccacacgttgtataaacataaactgtatgtgcagttatttaaatttgtttctgtcaaattaatcatttttgttggacgattcagtggcgggggggttttgcctaaattagtatataaaaacaaaaatgctaaattatatctgtgaattgcaggtattggggaacagttttaagggaaattttggggggaacattttaggtttgtatttggtagtcttaatgtatctggcatttgggtgaactgtggacatactagagttgattatagacacattgattttgaataaggaactgctggccgagcccgctgggagtctagaaagagaaaatctgtttctagacctcagttattttcccatttttggttgttttgaagcagtaacatttttctcagtgcacatgcaatttgggttttagagaagatggccaccagctggcttcctagatattttaaacttttgttctttaatatgctgtccatggctgagtttattagtacatgggcttagtgaccacaaaatattttattaagaaactgtttcaaaaataaatttgcactgttcatttttctggcctcgctgttctccatagagcaagggtaatcctagaaaaaattttttttttttaaattatgcaacgtaagatgtcctccttgatagaagtcttagctcctgtgttacaagggagaactcatttgagatcagtctgttggcattgcaatgaagtgctttgtatcaggaaagtgtacactattgaccttttttcctgttcacaagctgagccatatgtacataatctagattttgttttcatagttttgcacttttatagcctatttttgaagattaacacatttgcaagatgattgactcaatctttgcctaatccaatgagtgttacagagagcttgctgtgactagaaccataaatcttaaagggggtatgtgataatagagggctggaatttaaacctgtatttaaaaaaaagaatcaccaaatctatttgaaaacaagtcgatttgtattatgctggaattttttgggctttcagatttctctttttaaccacatttctgaatgtataaaaataccaattattttcctacagccctttgtacttcaaaatatgtttttgtgtccatcagtattaactattggtatactactggttttatatttttttttctttgagacaacagtacatataatagaggtacaattcgttggatttttgtttatgtatttatttcattccagtttgatttattttaattgttgatacttaagttgtcaaacagtagacattacgtgttttatttatgatatatttcagcttaaagttatgttattatatgtggaagtgtaaatatagatttggtgttttg

SEQ ID NO: 976 - protein, 1048 aa, Homo sapien
MQSKVTGNMPTQSLLMYMDGPEVIGSSLGSPMEMEDALSMKGTAVVPFRATQEKNVIQIEGYMPLDCMFCSQTFTHSEDLNKHVLMQHRPTLCEPAVLRVEAEYLSPLDKSQVRTEPPKEKNCKENEFSCEVCGQTFRVAFDVEIHMRTHKDSFTYGCNMCGRRFKEPWFLKNHMRTHNGKSGARSKLQQGLESSPATINEVVQVHAAESISSPYKICMVCGFLFPNKESLIEHRKVHTKKTAFGTSSAQTDSPQGGMPSSREDFLQLFNLRPKSHPETGKKPVRCIPQLDPFTTFQAWQLATKGKVAICQEVKESGQEGSTDNDDSSSEKELGETNKGSCAGLSQEKEKCKHSHGEAPSVDADPKLPSSKEKPTHCSECGKAFRTYHQLVLHSRVHKKDRRAGAESPTMSVDGRQPGTCSPDLAAPLDENGAVDRGEGGSEDGSEDGLPEGIHLDKNDDGGKIKHLTSSRECSYCGKFFRSNYYLNIHLRTHTGEKPYKCEFCEYAAAQKTSLRYHLERHHKEKQTDVAAEVKNDGKNQDTEDALLTADSAQTKNLKRFFDGAKDVTGSPPAKQLKEMPSVFQNVLGSAVLSPAHKDTQDFHKNAADDSADKVNKNPTPAYLDLLKKRSAVETQANNLICRTKADVTPPPDGSTTHNLEVSPKEKQTETAADCRYRPSVDCHEKPLNLSVGALHNCPAISLSKSLIPSITCPFCTFKTFYPEVLMMHQRLEHKYNPDVHKNCRNKSLLRSRRTGCPPALLGKDVPPLSSFCKPKPKSAFPAQSKSLPSAKGKQSPPGPGKAPLTSGIDSSTLAPSNLKSHRPQQNVGVQGAATRQQQSEMFPKTSVSPAPDKTKRPETKLKPLPVAPSQPTLGSSNINGSIDYPAKNDSPWAPPGRDYFCNRSASNTAAEFGEPLPKRLKSSVVALDVDQPGANYRRGYDLPKYHMVRGITSLLPQDCVYPSQALPPKPRFLSSSEVDSPNVLTVQKPYGGSGPLYTCVPAGSPASSSTLEGKRPVSYQHLSNSMAQKRNYENFIGNAHYRPNDKKT

SEQ ID NO: 977 - DNA, 6196 bp, Homo sapien
tgaggaactgcgtgtggagtcagcccagtctggatgcacaggaggatgctggcggcacagtgagtgaggcctggtgccagagctgtgcggaccccttgttggccatggagcagcaggcccagaggccctctccccagccctgcttgcctgcctcggagaggacagaggcctaggcccacgggggagggtgttggcagacagatgccctccaggccctggggcctccttaacggccccttaacgacacgcgtgccaagggtggaggatgccagccaaggggcgctacttcctcaacgagggcgaggagggccctgaccaagatgcgctctacgagaagtaccagctcaccagccagcatgggccgctgctgctcacgctcctgctggtggccgccactgcctgcgtggccctcatcatcattgccttcagccagggggacccctccagacaccaggccattctgggcatggcgttcctggtgctggcggtgtttgcggccctctctgtgctgatgtacgtcgagtgtctcctgcggcgctggctcagggccttggcgctgctcacctgggcctgcttggtggcgctgggctatgtgctggtgttcgacgcatggacaaaggcggcctgtgcgtgggagcaggtgcccttcttcctgttcattgtcttcgtggtgtacacactactgcccttcagcatgcggggcgctgtcgccgttggggccgtctccactgcctcccacctcctggtgctcggttctttgatgggaggcttcacgacacccagtgtccgggtggggctgcagctgctggccaacgcagtcatcttcctgtgtgggaacctgacaggcgccttccacaagcaccaaatgcaggatgcgtcccgggacctcttcacctacactgtgaagtgcatccagatccgccggaagctgcgcatcgagaagcgccagcaggagaacctgctgctgtcagtgcttccggcccacatctccatgggcatgaagctggccatcatcgaacggctcaaggagcatggtgaccgtcgctgcatgcctgacaacaacttccacagcctctacgtcaagaggcaccagaatgtcagcatcctctatgcggacatcgtgggcttcacgcagctggccagcgactgttctcccaaggagctggtggtggtgctgaatgagctctttggcaagttcgaccagatcgccaaggccaacgagtgcatgcgaatcaagatcctcggcgactgctactactgtgtatcgggcctgcccgtgtcgctgcctacccacgcccggaactgcgtgaagatggggctggacatgtgccaggccatcaagcaggtgcgggaggccacgggcgtggacatcaacatgcgtgtgggcatacactcggggaatgtgctgtgcggggtcatcgggctgcgcaagtggcagtatgacgtgtggtcccacgacgtgtccctggccaaccggatggaggcagccggagtacccggccgggtgcacatcacggaggccacgctaaagcacctggacaaggcgtacgaggtggaggatgggcacgggcagcagcgggacccctacctcaaggagatgaacatccgcacctacctggtcatcgacccccggagccagcagccacccccgcccagccaacacctccccaggcccaagggggacgcggccctgaagatgcgggcgtcagtgcgcatgacccggtacctcgagtcctggggggcggcacggccctttgcacatctcaaccaccgtgagagcgtgagcagtggtgagacccacgtccccaacgggcggaggcctaagagcgttccccagcgccaccgccggaccccagacagaagcatgtcccccaaggggcggtcggaggatgactcgtacgatgacgagatgctgtcagccattgaggggctcagctccacgaggccctgctgctccaagtccgatgacttctacacctttgggtccatcttcctggagaagggctttgagcgcgagtaccgcctggcacccatcccccgggcccgccacgactttgcctgcgccagcctgatcttcgtctgcatcctgctcgtccatgtcctgctcatgcccaggacggcggcactgggtgtgtccttcgggctggtggcctgtgtactggggctggtgctgggcctgtgctttgccaccaagttctcgaggtgctgcccagctcgggggacgctctgcactatctctgagagggtggagacacagcccctgctgaggctgaccctggccgtcctgaccatcggcagcctgctcactgtggccatcatcaacctgcccctgatgcctttccaagttccagagctgcctgttggcaatgagacaggcctactggccgcgagcagcaagacaagagccctgtgtgagcccctcccgtactacacctgcagctgtgtcctgggcttcatcgcctgctcggtcttcctgaggatgagcctggagccaaaggttgtgctgctgacagtggccctggtggcctacctggtgctcttcaacctctccccatgctggcagtgggactgctgcggccaaggcctgggcaacctcaccaagcccaacggcaccaccagtggcacccctagctgttcctggaaggacctgaagaccatgaccaatttctacctggtcctgttctacatcaccctgcttacactctccagacagattgactattactgccgcttggactgcctatggaagaagaagttcaagaaggagcacgaggagtttgagaccatggagaacgtgaaccgccttcttctggagaacgtcctgccagcccacgtggctgcccactttatcggtgacaagttaaacgaggactggtaccatcagtcctatgactgcgtctgtgtcatgtttgcctccgtgccggacttcaaagtgttctacacagagtgcgatgtcaacaaagaagggctggagtgcctacgcctgctcaatgagatcattgccgacttcgacgagctcctactgaagcccaagttcagcggcgtggagaagatcaagaccatcggcagcacgtacatggcagctgcagggctcagcgtcgcctcagggcacgagaaccaggagctggagcggcagcatgcccacattggtgtcatggtggagttcagcatcgccctgatgagtaagctggacggcatcaacaggcactccttcaactccttccgcctccgcgtcggcataaaccatgggcctgtgattgctggagtgattggggcccgaaaacctcagtatgacatctggggaaacactgtcaatgtggccagccgaatggaaagcactggagaacttgggaaaatccaggttaccgaggagacctgcaccatcctccagggcctcgggtactcttgtgaatgccgtggcctgatcaacgtcaaaggcaaaggcgagctgaggacttactttgtctgtacggacactgccaagtttcaggggctggggctgaactgagggctcctgctggattccgaaaaggccgggaagccagtctccttccctgaagcaagcccaggagaagactctccgccccacgccaatcccaaaggcatgcagatggctgtgcatgttggcttctttggacctgcactggaggatttctcagacacatgcaccagattctggctcgaagcagccactgagccataatgcgcaggggaggccagaagctctgtgcctggtctgtaacagtttccaggccagctggagaatgttcactggttcggggctgactttgagatctttgttccctgaggtgccaggcaggcaactttagcacatgatgaaaacagacttccacctcagtggcctgtgggcacgcacaagtgaggtctgtttttctagacaccaagggggagtaagctgagctgtctagcacggattggagactccctctccctggtgggcctggcaatgacagcatttctcacagaggcattctggtaaatgaagctgaaaggggtgttttacatctgtaaacggtttcaaacaggtagagagaaaaacaccacaattaacactgttactttttgccttgtctggcatgtttgttttaaatgaatacattaatggggtttttatccttttgaatgacttttcagacactagacataaatctcttccctccagtgtatgctctgcctttttaaccactgacatgtaaggaggactactgtctagcatcagcttatggggtcagctggctgtggggatagagtcctgaggaatgtggtcacagcaagaaggcggggagcagcagagccttgcctttgaatgaggcagcttgtgaggcaagcattctggagagaggtgctttgaaagtaaggtgcggcctttcacctcttccttgattactcacacatctttgcgttctcccctgccgtccttcaactgtatcttacttttcttaccagaaaggaatggagtctgtttagagacaacttggacaacctgtgagtgcatctcttctttcctttagtcttcacagctaactctggagagcttcaaaactagaaggatctactccgcatgggtgcatgcagaggctcctggatctgggaagcccgccccctcacaaatgctgagccgttcttgctctgaaactgcgtgagtcaaggcaaatgcaaaaagccaggttttggggatgtgtcttactgtgcttcaacttcccaaggaattgaaagtcaacctaactgtaacaacagggtgagaaatgaccaaactgcccgtgactttttctgaatggacttcataaccggaagacttaaccggtggcctcatcaccagagcatcgccaggatttctaatgcactcagtttccctacatagcagggattcttagctaggtgtccccatgaaccccgtaaagttctacacaaagtcttgcatacaggagcctttacaagatgattatacagggttgcagattgggtgactgaccagacttgttggggtcctgggatgagttgccccgggctgcaaattaagagtacagctaagtgcgggggtggcggtggagggaacgaaaattgaacctgtctgcctgtgctgtgtcgtgtggctttatcagcccgaggaagggcaggtgtattctaatttgcacaaaggtgctgggtagactagtggcagctctcatgtgctgcacataagtggaatcagtatgaatagaagaacttgctgtataaaggaatttcatggcaacaatgctggtaagggcaattagcctcgcttaagttgccttttttacacaccaaaactttttacatgaagggctggtttcacatgaatactatactgaaatctgtgccacaccaaaactttttacatgaagggctggtttcacatgaatactatactgaaatctgtgctctcaagatctagcagtgaccagggctgcccggcgggggctctcctggcaagtcaggaaggtttctgttgctaatataacatagaaacacattagtgcactgggcctctctgaggtcagcatatttgtactcttggaatatttgtttttttcttcagtaacaacagaaaccccagttgggagtttaacaaataactgactaccactcactcatgcatttttatttccaattaaagcaaagcactgtgctgtgctcagataataatagtttgtaagtaaaagtttttagttttcagtgttcaggttatagaatataactgaccataaaaattacctgcaggtattttctttttatgaacttgtttttaaattaccaagtaattactggtgtcattttgttttatgacagacacacgtatctaacaaacaaacaaacagtgaccttctccatgggtcaaggacttccttacaatttctcctgagttaacttttgtgaaaataatacctaaggttttctggcttattgaggaaatttcctaacaaacaaacaaacaaacaaacagaagagaagatcattaaccactgtatactttgtgtatataataggtcagtgtaaagaaatatgatttgaggtggtgcatgcaagtaactagggtttattctatataatgaatatttatagatctgtaacatttgtttcaaaatgctgtttcatttttataaagtaccagtgtttagctgctttttatacattaaattagcaatttgaaaaactc

SEQ ID NO: 978 - protein, 1080 aa, Homo sapien
MPAKGRYFLNEGEEGPDQDALYEKYQLTSQHGPLLLTLLLVAATACVALIIIAFSQGDPSRHQAILGMAFLVLAVFAALSVLMYVECLLRRWLRALALLTWACLVALGYVLVFDAWTKAACAWEQVPFFLFIVFVVYTLLPFSMRGAVAVGAVSTASHLLVLGSLMGGFTTPSVRVGLQLLANAVIFLCGNLTGAFHKHQMQDASRDLFTYTVKCIQIRRKLRIEKRQQENLLLSVLPAHISMGMKLAIIERLKEHGDRRCMPDNNFHSLYVKRHQNVSILYADIVGFTQLASDCSPKELVVVLNELFGKFDQIAKANECMRIKILGDCYYCVSGLPVSLPTHARNCVKMGLDMCQAIKQVREATGVDINMRVGIHSGNVLCGVIGLRKWQYDVWSHDVSLANRMEAAGVPGRVHITEATLKHLDKAYEVEDGHGQQRDPYLKEMNIRTYLVIDPRSQQPPPPSQHLPRPKGDAALKMRASVRMTRYLESWGAARPFAHLNHRESVSSGETHVPNGRRPKSVPQRHRRTPDRSMSPKGRSEDDSYDDEMLSAIEGLSSTRPCCSKSDDFYTFGSIFLEKGFEREYRLAPIPRARHDFACASLIFVCILLVHVLLMPRTAALGVSFGLVACVLGLVLGLCFATKFSRCCPARGTLCTISERVETQPLLRLTLAVLTIGSLLTVAIINLPLMPFQVPELPVGNETGLLAASSKTRALCEPLPYYTCSCVLGFIACSVFLRMSLEPKVVLLTVALVAYLVLFNLSPCWQWDCCGQGLGNLTKPNGTTSGTPSCSWKDLKTMTNFYLVLFYITLLTLSRQIDYYCRLDCLWKKKFKKEHEEFETMENVNRLLLENVLPAHVAAHFIGDKLNEDWYHQSYDCVCVMFASVPDFKVFYTECDVNKEGLECLRLLNEIIADFDELLLKPKFSGVEKIKTIGSTYMAAAGLSVASGHENQELERQHAHIGVMVEFSIALMSKLDGINRHSFNSFRLRVGINHGPVIAGVIGARKPQYDIWGNTVNVASRMESTGELGKIQVTEETCTILQGLGYSCECRGLINVKGKGELRTYFVCTDTAKFQGLGLN

SEQ ID NO: 979 - DNA, 2281 bp, Homo sapien
cggggcggcggcggcggcgtgaagtcactgctgctctgggttcgggttggcgactgaaggcggtaccggcctcccggaacagcccgggggagggcttaggtgcagaagggcaggctggccgcggccggtttggtctggggaccacgggctggagcaggtggaaatttaaaattgtttacagtcaacactgtttccagccatgggtttgtctccatctgctcctgctgttgcagttcaggcctcaaatgcttcagcgtccccaccttcaggatgcccgatgcatgaagggaaaatgaaaggctgtccagtgaatacagagccatctggcccaacctgtgagaagaaaacatactctgtgcctgcccaccaggaacgcgcctatgagtacgtggagtgtcccattaggggcactgcggctgagaataaggagaacctagatccttcaaatctgatgccaccaccaaatcaaacaccagctccagatcagccatttgcattgtctactgtcagagaagagtcatccattccgagagcagattcagagaaaaagtgggtttacccttctgagcagatgttctggaatgcaatgttaaagaaagggtggaagtggaaggatgaggatatcagtcagaaggatatgtataatatcattagaattcacaatcagaataacgagcaggcttggaaggagattttgaagtgggaagcccttcatgctgcagagtgtccttgtggtccatcattgatccggtttggagggaaagcaaaagagtattcaccaagggcacgaattcgttcctggatggggtatgagttgccttttgataggcacgattggatcataaaccgttgcgggacagaagttagatatgtgattgattattatgatggtggtgaagtcaacaaggactaccagttcaccatcctggacgtccgtcctgccttagattcactttcggcagtatgggacagaatgaaagtcgcttggtggcgttggacctcgtaaagcactgtttcagatggaaaaatataaactatttttttctgagcgatacattaaactattttccccagattgaattgcactcatgatgtaatgggaacttcaagtgggtaatcacactttttccttcacttaacgaaggatactatgcactgttcacttttgacttgtgttgtaccttgcagtttatagcagatcattttgttttcttcctacttagcttaagtgggaagcagtctctcagtttttcctttacctgcagtattgtctgtatatttcatctcgaaaagcctgaacaacctctgaaaaagagcttttaaaaagtgatgaaagttgcttttttttcttactattttctcaggaatactccagagatgtaaagcctgagagtccatggtgatgctcaagagctttcatctggccaaatattttaactaaagctgttcattataaataagaggtgattataccttttttaaaaaaagttaccattatttctaaagcccctatggtatgattgtgacctttaacaaaatgcaaaggtatacactggaaaggtactcagcaaaattctctccaaattctgatttatatgaatttcttggactggatagagtactttcaactataccttcctttggaacataccttttaaaaaatgttccctttaaatcctgttattctaatatgtaactctgctcccaacaaacaggtctcctcattgtccttggcatttgacaagttatcccaacttcgaatctcatttcttcctttgctggcagcctccacccttccccacatcagtcggcctaatccaaaccttgaaagcctggcttaagtcccagtatcagtgatggtccccctctaaaacatgattttatatttggctgagtgttaaaattcacaagatgagcatttttttcccagatggagaacgcttcaactcagtctagattttttttgtttgttttaaggaagctctaagtttgccattgaaactttttgtaccagtaatccataaactggttgttctatttatagcagcatgttacaaatgactgctttttttttttaactgtctatactattaaatcctttaatttatcctgaatgctgtagtgttaaattagtggatgaaattggcagtctgtgggtgattaatttggtatggatttgtcagttttgtgtggagtttaagaaatagaacagccttaaactctacatttcaaaatacttgtatattttaaaataaagctgattagttcacaggttttgaaa

SEQ ID NO: 980 - protein, 237 aa, Homo sapien
MKGCPVNTEPSGPTCEKKTYSVPAHQERAYEYVECPIRGTAAENKENLDPSNLMPPPNQTPAPDQPFALSTVREESSIPRADSEKKWVYPSEQMFWNAMLKKGWKWKDEDISQKDMYNIIRIHNQNNEQAWKEILKWEALHAAECPCGPSLIRFGGKAKEYSPRARIRSWMGYELPFDRHDWIINRCGTEVRYVIDYYDGGEVNKDYQFTILDVRPALDSLSAVWDRMKVAWWRWTS

SEQ ID NO: 981 - DNA, 3702 bp, Homo sapien
gtttgttagggagtcgtgtgcgtgccttggtcgcttctgtagctccgagggcaggttgcggaagaaagcccaggcggtctgtggcccagaggaaaggcctgcagcaggacgaggacctgagccaggaatgcaggatggcggcggtgaagaaggaagggggtgctctgagtgaagccatgtccctggagggagatgaatgggaactgagtaaagaaaatgtacaacctttaaggcaagggcggatcatgtccacgcttcagggagcactggcacaagaatctgcctgtaacaatactcttcagcagcagaaacgggcatttgaatatgaaattcgattttacactggaaatgaccctctggatgtttgggataggtatatcagctggacagagcagaactatcctcaaggtgggaaggagagtaatatgtcaacgttattagaaagagctgtagaagcactacaaggagaaaaacgatattatagtgatcctcgatttctcaatctctggcttaaattagggcgtttatgcaatgagcctttggatatgtacagttacttgcacaaccaagggattggtgtttcacttgctcagttctatatctcatgggcagaagaatatgaagctagagaaaactttaggaaagcagatgcgatatttcaggaagggattcaacagaaggctgaaccactagaaagactacagtcccagcaccgacaattccaagctcgagtgtctcggcaaactctgttggcacttgagaaagaagaagaggaggaagtttttgagtcttctgtaccacaacgaagcacactagctgaactaaagagcaaagggaaaaagacagcaagagctccaatcatccgtgtaggaggtgctctcaaggctccaagccagaacagaggactccaaaatccatttcctcaacagatgcaaaataatagtagaattactgtttttgatgaaaatgctgatgaggcttctacagcagagttgtctaagcctacagtccagccatggatagcaccccccatgcccagggccaaagagaatgagctgcaagcaggcccttggaacacaggcaggtccttggaacacaggcctcgtggcaatacagcttcactgatagctgtacccgctgtgcttcccagtttcactccatatgtggaagagactgcacaacagccagttatgacaccatgtaaaattgaacctagtataaaccacatcctaagcaccagaaagcctggaaaggaagaaggagattctctacaaagggttcagagccatcagcaagcgtctgaggagaagaaagagaagatgatgtattgtaaggagaagatttatgcaggagtaggggaattctcctttgaagaaattcgggctgaagttttccggaagaaattaaaagagcaaagggaagccgagctattgaccagtgcagagaagagagcagaaatgcagaaacagattgaagagatggagaagaagctaaaagaaatccaaactactcagcaagaaagaacaggtgatcagcaagaagagacgatgcctacaaaggagacaactaaactgcaaattgcttccgagtctcagaaaataccaggaatgactctatccagttctgtttgtcaagtaaactgttgtgccagagaaacttcacttgcggagaacatttggcaggaacaacctcattctaaaggtcccagtgtacctttctccatttttgatgagtttcttctttcagaaaagaagaataaaagtcctcctgcagatcccccacgagttttagctcaacgaagaccccttgcagttctcaaaacctcagaaagcatcacctcaaatgaagatgtgtctccagatgtttgtgatgaatttacaggaattgaacccttgagcgaggatgccattatcacaggcttcagaaatgtaacaatttgtcctaacccagaagacacttgtgactttgccagagcagctcgttttgtatccactccttttcatgagataatgtccttgaaggatctcccttctgatcctgagagactgttaccggaagaagatctagatgtaaagacctctgaggaccagcagacagcttgtggcactatctacagtcagactctcagcatcaagaagctgagcccaattattgaagacagtcgtgaagccacacactcctctggcttctctggttcttctgcctcggttgcaagcacctcctccatcaaatgtcttcaaattcctgagaaactagaacttactaatgagacttcagaaaaccctactcagtcaccatggtgttcacagtatcgcagacagctactgaagtccctaccagagttaagtgcctctgcagagttgtgtatagaagacagaccaatgcctaagttggaaattgagaaggaaattgaattaggtaatgaggattactgcattaaacgagaatacctaatatgtgaagattacaagttattctgggtggcgccaagaaactctgcagaattaacagtaataaaggtatcttctcaacctgtcccatgggacttttatatcaacctcaagttaaaggaacgtttaaatgaagattttgatcatttttgcagctgttatcaatatcaagatggctgtattgtttggcaccaatatataaactgcttcacccttcaggatcttctccaacacagtgaatatattacccatgaaataacagtgttgattatttataaccttttgacaatagtggagatgctacacaaagcagaaatagtccatggtgacttgagtccaaggtgtctgattctcagaaacagaatccacgatccctatgattgtaacaagaacaatcaagctttgaagatagtggacttttcctacagtgttgaccttagggtgcagctggatgtttttaccctcagcggctttcggactgtacagatcctggaaggacaaaagatcctggctaactgttcttctccctaccaggtagacctgtttggtatagcagatttagcacatttactattgttcaaggaacacctacaggtcttctgggatgggtccttctggaaacttagccaaaatatttctgagctaaaagatggtgaattgtggaataaattctttgtgcggattctgaatgccaatgatgaggccacagtgtctgttcttggggagcttgcagcagaaatgaatggggtttttgacactacattccaaagtcacctgaacaaagccttatggaaggtagggaagttaactagtcctggggctttgctctttcagtgagctaggcaatcaagtctcacagattgctgcctcagagcaatggttgtattgtggaacactgaaactgtatgtgctgtaatttaatttaggacacatttagatgcactaccattgctgttctactttttggtacaggtatattttgacgtcactgatattttttatacagtgatatacttactcatggccttgtctaacttttgtgaagaactattttattctaaacagactcattacaaatggttaccttgttatttaacccatttgtctctacttttccctgtacttttcccatttgtaatttgtaaaatgttctcttatgatcaccatgtattttgtaaataataaaatagtatctgttaaaaaaaaaaaaaaaaaaaaaaaaaaaaaaaaaaaaaaaaaaaaaaaaaaaaaa

SEQ ID NO: 982 - protein, 1050 aa, Homo sapien
MAAVKKEGGALSEAMSLEGDEWELSKENVQPLRQGRIMSTLQGALAQESACNNTLQQQKRAFEYEIRFYTGNDPLDVWDRYISWTEQNYPQGGKESNMSTLLERAVEALQGEKRYYSDPRFLNLWLKLGRLCNEPLDMYSYLHNQGIGVSLAQFYISWAEEYEARENFRKADAIFQEGIQQKAEPLERLQSQHRQFQARVSRQTLLALEKEEEEEVFESSVPQRSTLAELKSKGKKTARAPIIRVGGALKAPSQNRGLQNPFPQQMQNNSRITVFDENADEASTAELSKPTVQPWIAPPMPRAKENELQAGPWNTGRSLEHRPRGNTASLIAVPAVLPSFTPYVEETAQQPVMTPCKIEPSINHILSTRKPGKEEGDSLQRVQSHQQASEEKKEKMMYCKEKIYAGVGEFSFEEIRAEVFRKKLKEQREAELLTSAEKRAEMQKQIEEMEKKLKEIQTTQQERTGDQQEETMPTKETTKLQIASESQKIPGMTLSSSVCQVNCCARETSLAENIWQEQPHSKGPSVPFSIFDEFLLSEKKNKSPPADPPRVLAQRRPLAVLKTSESITSNEDVSPDVCDEFTGIEPLSEDAIITGFRNVTICPNPEDTCDFARAARFVSTPFHEIMSLKDLPSDPERLLPEEDLDVKTSEDQQTACGTIYSQTLSIKKLSPIIEDSREATHSSGFSGSSASVASTSSIKCLQIPEKLELTNETSENPTQSPWCSQYRRQLLKSLPELSASAELCIEDRPMPKLEIEKEIELGNEDYCIKREYLICEDYKLFWVAPRNSAELTVIKVSSQPVPWDFYINLKLKERLNEDFDHFCSCYQYQDGCIVWHQYINCFTLQDLLQHSEYITHEITVLIIYNLLTIVEMLHKAEIVHGDLSPRCLILRNRIHDPYDCNKNNQALKIVDFSYSVDLRVQLDVFTLSGFRTVQILEGQKILANCSSPYQVDLFGIADLAHLLLFKEHLQVFWDGSFWKLSQNISELKDGELWNKFFVRILNANDEATVSVLGELAAEMNGVFDTTFQSHLNKALWKVGKLTSPGALLFQ

SEQ ID NO: 983 - DNA, 2665 bp, Homo sapien
ggctctgggcatcaccagcggccccagggaaaaagaaagaaatgggaaacagcatgaaatccacccctgcgcctgccgagaggcccctgcccaacccggagggactggatagcgacttccttgccgtgctaagtgactacccgtctcctgacatcagccccccgatattccgccgaggggagaaactgcgtgtgatttctgatgaagggggctggtggaaagctatttctcttagcactggtcgagagagttacatccctggaatatgtgtggccagagtttaccatggctggctgtttgagggcctgggcagagacaaggccgaggagctgctgcagctgccagacacaaaggtcggctccttcatgatcagagagagtgagaccaagaaagggttttactcactgtcggtgagacacaggcaggtaaagcattaccgcattttccgtctgccgaacaactggtactacatttccccgaggctcaccttccagtgcctggaggacctggtgaaccactattctgaggtggctgatggcctgtgctgtgtgctcaccacgccctgcctgacacaaagcacggctgccccagcagtgagggcctccagctcacctgtcaccttgcgtcagaagactgtggactggaggagagtgtccagactgcaggaggaccccgagggaacagagaacccgcttggggtagacgagtcccttttcagctatggccttcgagagagcattgcctcttacctgtccctgaccagtgaggacaacacctcctttgatcgaaagaagaaaagcatctccctgatgtatggtggcagcaagagaaagagctcattcttctcatcaccaccttactttgaggactagccaagaacagacacaatggttcatgcccaaaaggaacagaagttccaactattgcctgggatcttgcgaaaagcgaggttccctgatccctgggagcctcacgtattttagaagccaagagaagccacatggagactcaaattcgcatcttctctatccacatcatgaccaaaggaacccctccctggtgtctgatcagggctgtggcatcacaaaacattggatcatgacatgtcgggcgatgcttggaaaagcccagcatgtatgtatgcacacattgtgtgtgtgggaaggacaaagccactctcacaagaaagggcaccaggactgctctccaaggaactggacctgtccagacagttacactccaaggtcattggagagaacttctgtatgggcaagcctgagagggagaggaaacaaaagctgtgtcctggcagaaggtctgggtttgcagatgggtgccctgaatggaactactttaactaatccatagggacttctggtatgctttcctctctttttaaaggaacttcgtgacactaaacattagcccaaaggacttcttagccttcaattgggagatacctttggtctgctcctgcaccaaagccatatgggtggaagtcagttggcctccctggttctgcagagggccagaagaatgagagagaggaagactgctggcagggaaatcgaggaggcgagactagaactgcaccagcttccctgatgtctgcagccatggctttgcagcgcaaacagaacttctctgggatgctgggattcttgcctgtatgaatgcatcaagtattcatttattgcccgaataggcattgcattaagtcctctgttaggtgtcaggcaagccaaaaaaaaaaaaaagatgctaagtcctaacccccaacagaagtgttcacagtgtagacgggaaaaaatgtataaacaaatgtgtaaaaagagaaatcagctcatggcttaggatggaattagagacaggtgagggacactcaggagctcattttccagctgctcttcagagtggaagggctggctggatcgggtaggtaagaatagctggattttttagaaaagaaatggatacagtctaaagaattaactcacccggtactttattctaagaagggtctggcatccatatgaggaaaaatgctcagctccaggaaagatggggagtccaagtggattaatgatgtcatgcataattttaagagacaagggagaaaacacaatgtatagccagagaaggagaagctcccatccaaatcctactaggaagagagtgggctgcagatgaatctgtgactcatgtttccctgtttcaaagggatcctggggaaggaggggaacatgcttgcagtatctctccctgtctgtctgctcacataagcattccgtccatctaagctcatcgtgctactggtatgtgtatgtgcagttacacagtttcctgtatcataaatcctagtgtgtttatacaaggagacatctgtggtttccccaaccgttccaaaaggctatttcaaaggaaccagcccacgtatgagaaatgaatgtaacactgtggacattgacttcccgcataaggcagggtgaccccctgaactccagatgtttgcacagtatcttatgtgttgttttccgttgtgacgaatgtgattggaacatttggggagcacccagagggatttttcagtgggaagcattacactttgctaaatcatgtatttattcctgattaaaacaaacctaataaatatttaacccttggc

SEQ ID NO: 984 - protein, 276 aa, Homo sapien
MGNSMKSTPAPAERPLPNPEGLDSDFLAVLSDYPSPDISPPIFRRGEKLRVISDEGGWWKAISLSTGRESYIPGICVARVYHGWLFEGLGRDKAEELLQLPDTKVGSFMIRESETKKGFYSLSVRHRQVKHYRIFRLPNNWYYISPRLTFQCLEDLVNHYSEVADGLCCVLTTPCLTQSTAAPAVRASSSPVTLRQKTVDWRRVSRLQEDPEGTENPLGVDESLFSYGLRESIASYLSLTSEDNTSFDRKKKSISLMYGGSKRKSSFFSSPPYFED

SEQ ID NO: 985 - DNA, 1366 bp, Homo sapien
cctgattctaggctggtcactactccgagcctgtgacgtttgcggcaccaggccgtcgacgatgcccagtgaaactctctgggaaattgcaaaagctgaagtggaaaaaaggggaattaatggaagtgaaggtgatggagctgaaattgcagaaaaatttgttttcttcattggcagtaaaaatgggggaaagactactattattctaaggtgtcttgacagagatgaaccaccaaaaccaaccttagctttggaatatacatatggaagaagagcaaaagggcacaacacaccaaaagatatcgctcacttttgggaactcggtggaggaacctctttattggacttaatcagcatacccatcacaggtgacaccttacggacgttttctcttgttctcgttctggatctttcaaaacctaatgatctctggcccaccatggaaaatctcttgcaagccacaaaaagccatgtagacaaagtgataatgaaactgggaaagacaaatgctaaagcagtttctgaaatgagacagaagatctggaattatgccgaagatcatcctgatcatgaattaattgacccatttccggtacctctggtcataattggaagtaaatatgatgtttttcaggattttgagtctgagaagagaaaggtaatatgcaagacacttcgatttgttgcacattattatggagcatcattaatgtttaccagtaaatcagaagctctattactaaaaatacgtggagttatcaaccagttggcatttggcattgacaaaagcaaatcaatatgtgtggatcagaataaaccgctgtttatcacagcaggattggattctttcggtcaaataggatctcctcctgttcctgaaaatgacattggaaagcttcatgcccactcacctatggagttgtggaaaaaagtgtatgaaaagctctttccaccaaagagtattaacacgctgaaagatatcaaggaccctgcgagagatcctcagtatgctgaaaatgaagtcgatgagatgagaattcagaaggatctggaactggaacagtacaaaagaagttcttccaagtcttggaaacaaatcgagcttgattcttgaacctatttcaattattgtatatttatttcttcttttccaaatacaaataagattatactgtgaattaactattgtggcaatatgtgaagaaagttaaactgtataatttgttaaaggacaagctggatttcttggactagtgcatctccctgtatatcttgaagctttttaaaaggaaaaattattgtagaaccacgtgtaattttttttaaaataaaagaatcttctactacctacctctaaaaaaaaaaa

SEQ ID NO: 986 - protein, 350 aa, Homo sapien
MPSETLWEIAKAEVEKRGINGSEGDGAEIAEKFVFFIGSKNGGKTTIILRCLDRDEPPKPTLALEYTYGRRAKGHNTPKDIAHFWELGGGTSLLDLISIPITGDTLRTFSLVLVLDLSKPNDLWPTMENLLQATKSHVDKVIMKLGKTNAKAVSEMRQKIWNYAEDHPDHELIDPFPVPLVIIGSKYDVFQDFESEKRKVICKTLRFVAHYYGASLMFTSKSEALLLKIRGVINQLAFGIDKSKSICVDQNKPLFITAGLDSFGQIGSPPVPENDIGKLHAHSPMELWKKVYEKLFPPKSINTLKDIKDPARDPQYAENEVDEMRIQKDLELEQYKRSSSKSWKQIELDS

SEQ ID NO: 987 - DNA, 1366 bp, Homo sapien; identical to SEQ ID NO: 985

SEQ ID NO: 988 - protein, 350 aa, Homo sapien; identical to SEQ ID NO: 986

SEQ ID NO: 989 - DNA, 2979 bp, Homo sapien
agcaaaccaatcgcaagcctcgttgagtggaaggggtgggatcttccccggaagttttggttaaagcccctccaatcagcggctcggtgcggcaagtttgaatttcgtggaggctcgggttgtgagggttcctgcttcggagtcggcggtggtcgtccagaccgagtgttctttactttttgtttggttgaggtttcacgctagaaggtggctcaggatgtcttcatcacattttgccagtcgacacaggaaggatataagtactgaaatgattagaactaaaattgctcataggaaatcactgtctcagaaagaaaatagacataaggaatacgaacgaaatagacactttggtttgaaagatgtaaacattccaaccttggaaggtagaattcttgttgaattagatgagacatctcaagagcttgttccagaaaagaccaatgttaagccaagggcaatgaaaactattctaggtgatcaacgaaaacagatgctccaaaaatacaaagaagaaaagcaacttcaaaaattgaaagagcagagagagaaagctaaacgaggaatatttaaagtgggtcgttatagacctgatatgccttgttttcttttatcaaaccagaatgctgtgaaagctgagccaaaaaaggctattccatcttctgtacggattacaaggtcaaaggccaaagaccaaatggagcagactaagattgataacgagagtgatgttcgagcaatccgacctggtccaagacaaacttctgaaaagaaagtgtcagacaaagagaaaaaagttgtgcagcctgtaatgcccacgtcgttgagaatgactcgatcagctactcaagcagcaaagcaggttcccagaacagtctcatctaccacagcaagaaagccagtcacaagagctgctaatgaaaacgaaccagaaggaaaggtgccaagtaaaggaagacctgccaaaaatgtagaaacaaaacccgacaagggtatttcttgtaaagtcgatagtgaagaaaatactttgaattcacaaactaatgcaacaagtggaatgaatccagatggagtcttatcaaaaatggaaaacttacctgagataaatactgcaaaaataaaagggaagaattccttcgcacctaaggattttatgtttcagccactggatggtctgaagacctatcaagtaacacctatgactcccagaagtgccaatgcttttttgacacccagttacacctggactcctttaaaaacagaagttgatgagtctcaagcaacaaaagaaattttggcacaaaaatgtaaaacttactctaccaagacaatacagcaagattcaaataaattgccatgtcctttgggtcctctaactgtttggcatgaagaacatgttttaaataaaaatgaagctactactaaaaatttaaatggccttccaataaaagaagtcccatcacttgaaagaaatgaaggtcgaattgctcagccccaccatggtgtgccatatttcagaaatatcctccagtcagaaactgagaaattaacttcacattgcttcgagtgggacaggaaacttgaattggacattccagatgatgctaaagatcttattcgcacagcagttggtcaaacaagactccttatgaaggaaaggtttaaacagtttgaaggactggttgatgattgtgaatataaacgaggtataaaggagactacctgtacagatctggatggattttgggatatggttagttttcagatagaagatgtaatccacaaattcaacaatctgatcaaacttgaggaatctgggtggcaagtcaataataatatgaatcataatatgaacaaaaatgtctttaggaaaaaagttgtctcaggtatagcaagtaaaccaaaacaggatgatgctggaagaattgcagcgagaaatcgcctagctgccataaaaaatgcaatgagagagagaattaggcaggaagaatgtgctgaaacagcagtttctgtgataccaaaggaagttgataaaatagtgttcgatgctggatttttcagagttgaaagtcctgttaaattattctcaggactttctgtctcttctgaaggcccttctcaaagacttggaacacctaagtctgtcaacaaagctgtatctcagagtagaaatgagatgggcattccacaacaaactacatcaccagaaaatgccggtcctcagaatacgaaaagtgaacatgtgaagaagactttgtttttgagtattcctgaaagcaggagcagcatagaagatgctcagtgtcctggattaccagatttaattgaagaaaaccatgttgtaaataagacagacttgaaggtggattgtttatccagtgagagaatgagtttgcctcttcttgctggtggagtagcagatgatattaatactaacaaaaaagaaggaatttcagatgttgtggaaggaatggaactgaattcttcaattacatcacaggatgttttgatgagtagccctgaaaaaaatacagcttcacaaaatagcatcttagaagaaggggaaactaaaatttctcagtcagaactatttgataataaaagtctcactactgaatgccaccttcttgattcaccaggtctaaactgcagtaatccatttactcagctggagaggagacatcaagaacatgccagacacatttcttttggtggtaacctgattactttttcacctctacaaccaggagaattttgaatttaaaaataaatccaaacattttccttcatattatcaatgcttatatattccttagactattgaaattttggagaaaatgtatttgtgttcacttctatagcatataatgttttaatattctgtgttcatcaaagtgtattttagatatactctttctcaagggaagtggggatattttgtacattttcaacacagaataaaaaatgtactgtgccttg

SEQ ID NO: 990 - protein, 846 aa, Homo sapien
MSSSHFASRHRKDISTEMIRTKIAHRKSLSQKENRHKEYERNRHFGLKDVNIPTLEGRILVELDETSQELVPEKTNVKPRAMKTILGDQRKQMLQKYKEEKQLQKLKEQREKAKRGIFKVGRYRPDMPCFLLSNQNAVKAEPKKAIPSSVRITRSKAKDQMEQTKIDNESDVRAIRPGPRQTSEKKVSDKEKKVVQPVMPTSLRMTRSATQAAKQVPRTVSSTTARKPVTRAANENEPEGKVPSKGRPAKNVETKPDKGISCKVDSEENTLNSQTNATSGMNPDGVLSKMENLPEINTAKIKGKNSFAPKDFMFQPLDGLKTYQVTPMTPRSANAFLTPSYTWTPLKTEVDESQATKEILAQKCKTYSTKTIQQDSNKLPCPLGPLTVWHEEHVLNKNEATTKNLNGLPIKEVPSLERNEGRIAQPHHGVPYFRNILQSETEKLTSHCFEWDRKLELDIPDDAKDLIRTAVGQTRLLMKERFKQFEGLVDDCEYKRGIKETTCTDLDGFWDMVSFQIEDVIHKFNNLIKLEESGWQVNNNMNHNMNKNVFRKKVVSGIASKPKQDDAGRIAARNRLAAIKNAMRERIRQEECAETAVSVIPKEVDKIVFDAGFFRVESPVKLFSGLSVSSEGPSQRLGTPKSVNKAVSQSRNEMGIPQQTTSPENAGPQNTKSEHVKKTLFLSIPESRSSIEDAQCPGLPDLIEENHVVNKTDLKVDCLSSERMSLPLLAGGVADDINTNKKEGISDVVEGMELNSSITSQDVLMSSPEKNTASQNSILEEGETKISQSELFDNKSLTTECHLLDSPGLNCSNPFTQLERRHQEHARHISFGGNLITFSPLQPGEF

SEQ ID NO: 991 - DNA, 1731 bp, Homo sapien
gggggaggctgtgatgggttgacaggtgcgtgacagtgggagctgctctcggcacaagcatgtacggcaaaggcaagagtaacagcagcgccgtcccgtccgacagccaggcccgggagaagttagcactctacgtatatgaatatctgctccatgtaggagctcagaaatcagctcaaacatttttatcagagataagatgggaaaaaaacatcacattgggggaaccaccaggattcttacattcttggtggtgtgtattttgggatctctactgtgcagctccagagagacgtgaaacatgtgaacactcaagtgaagcaaaagccttccatgattacagtgctgcagcagctcccagtccagtgctaggaaacattcccccaggagatggcatgccagtaggtcctgtaccaccagggttctttcagccttttatgtcacctcggtaccctggaggtccaaggcccccattgaggatacctaatcaggcacttggaggtgtcccaggaagtcagccattactccccagaggaatggatccaactcgacaacaaggacatccaaatatgggtgggccaatgcagagaatgactcctccaagaggaatggtgcccttaggaccacagaactatggaggtgcaatgagacccccactgaatgctttaggtggccctggaatgcctggaatgaacatgggtccaggtggtggtagaccttggccaaacccaacaaatgccaattcaataccatactcctcagcatctcctgggaattatgtaggtcctccaggaggtggagggccaccaggaacacccatcatgcctagtccagcagattcaaccaactctggtgataacatgtatactttaatgaatgcagtacctcctggacctaacagacctaattttccaatgggccctgggtcagatggtcccatgggtggattaggaggaatggagtcacatcacatgaatggctctttaggctcaggagatatggacagtatttccaagaattctcccaataatatgagcctgagtaatcaaccgggcactccaagggatgatggcgaaatggggggaaatttcttaaatccttttcagagtgagagttactcccctagcatgacaatgagcgtgtgatccattaccaagtctcctcatgaaaaccacagtgagtcagcccttcacagaactactacggaagaaaattattcatcacagtgtacagttaaacaaaggaatctcagtcacaccaaaccaaccttttcatttcctgctctctcccctcttttgtgaagaaagcgggtccagatgtgattcaaacaactgtacggagtggcatattagaattgccctaaactgaactgcaaataattatgtgtgtatgtatatgtgtgggaaagagaatgtactgtatatgtgtatgttatacagacatatacacatacatacattgacccacaggacattgtaaaatattatcacatgacatcttaagtagaaataagtagggacttttattccatcctttttttcacgtttacattttaattattacaagttgctcctgccccctccctgaactattttgtgctgtgtatatcactgctttatataagttattttttaaggtgaactcagatgttatggttttgtatatgtctgcaatcatggataggaataaaatcgcttatttgagagctttcaaaaaaaaaaaaaaaaaaac

SEQ ID NO: 992 - protein, 361 aa, Homo sapien
MYGKGKSNSSAVPSDSQAREKLALYVYEYLLHVGAQKSAQTFLSEIRWEKNITLGEPPGFLHSWWCVFWDLYCAAPERRETCEHSSEAKAFHDYSAAAAPSPVLGNIPPGDGMPVGPVPPGFFQPFMSPRYPGGPRPPLRIPNQALGGVPGSQPLLPRGMDPTRQQGHPNMGGPMQRMTPPRGMVPLGPQNYGGAMRPPLNALGGPGMPGMNMGPGGGRPWPNPTNANSIPYSSASPGNYVGPPGGGGPPGTPIMPSPADSTNSGDNMYTLMNAVPPGPNRPNFPMGPGSDGPMGGLGGMESHHMNGSLGSGDMDSISKNSPNNMSLSNQPGTPRDDGEMGGNFLNPFQSESYSPSMTMSV

SEQ ID NO: 993 - DNA, 1395 bp, Homo sapien
cacagggccgctcagaggccgccgcaatgctcccctctttgcaggagtcgatggatggagatgaaaaggaactagagagcagcgaagagggaggctcagccgaggagcggagactcgagccgccgtccagcagccactactgtctttacagctatcgcggaagcagattggcacagcaacgaggggacagtgaggacggaagcccaagtggcacaaatgcagaaactccctctggtgatgatttcagcctctccttggcagatactaatctaccatccgaagtggagccagagctgcgcagtttcattgctaagcgtctttcaagaggtgcagtctttgaagggctgggtaatgttgcatctgtggagctaaaaattccaggttaccgagttggttgttattactgccttttccaaaatgaaaaactgcttcctgaaacagtaacgatagactctgaacgtaacccttcagaatatgtggtctgttttttaggagggtctgaaaaaggacttgagcttttcaggcttgaattggacaagtacattcaagggctgaaaaataacatgaattgtgaggcaaggggcctggagagtcacataaaatcctatctgagcagctggtttgaggatgttgtatgcccaatccaaagggttgttcttctctttcaggaaaagcttacctttctgctacatgctgctttgagttacactcctgttgaagttaaagaatcagatgaaaaaacaaagagagacattaacaggtttctgagtgtggccagtcttcaaggacttattcatgaaggcaccatgacttctttgtgcatggccatgacagaggagcagcataagtctgtggtcatcgattgcagcagctcccagcctcagttctgcaatgcaggaagtaaccggttttgtgaggattggatgcaagcttttttaaatggtgccaaaggaggtaaccctttttttttccgacaagtactggagaactttaaactaaaggccatacaagacacaaacaatttgaagagatttatccgacaggcagaaatgaatcattatgctttgtttaaatgttacatgttcctaaagaactgtggtagtggagatacttttgaagattgttaaagtggaacatgaagaaatgcctgaagccaaaaatgtgatagctgtccttgaagaattcatgaaagaagctcttgaccaaagtttttgatcatatgttttgagataattgtatgatcaagttgtatatttaagtcttagtgtttgaaattgcagttataattgttcataggattgctatttaagatgatttgaaactcaatccagattttctttttgtattttaccaatttaacttaaataaaaatctgaagaacaaaaaaaaaaaaaa

SEQ ID NO: 994 - protein, 366 aa, Homo sapien
MLPSLQESMDGDEKELESSEEGGSAEERRLEPPSSSHYCLYSYRGSRLAQQRGDSEDGSPSGTNAETPSGDDFSLSLADTNLPSEVEPELRSFIAKRLSRGAVFEGLGNVASVELKIPGYRVGCYYCLFQNEKLLPETVTIDSERNPSEYVVCFLGGSEKGLELFRLELDKYIQGLKNNMNCEARGLESHIKSYLSSWFEDVVCPIQRVVLLFQEKLTFLLHAALSYTPVEVKESDEKTKRDINRFLSVASLQGLIHEGTMTSLCMAMTEEQHKSVVIDCSSSQPQFCNAGSNRFCEDWMQAFLNGAKGGNPFFFRQVLENFKLKAIQDTNNLKRFIRQAEMNHYALFKCYMFLKNCGSGDTFEDC

SEQ ID NO: 995 - DNA, 5215 bp, Homo sapien
cgagcgcggcgcccttgagctgcaccgcggcgcaggtttgcgagccgacttgtcagccggccaagaaaaggaagctccgtcccttcccgctcacccggcttccccaccccttgtactctaaactctgcagagggcgagcggcgcggccacggaggcgccgaggaggagcgagccgccgccgggcagcggcgtgccctcgggggagagggcgccggagaggaggcggcggcgcggcggcgagggcgcggcgcgcgatggcagctgcttagcccggcgggcgcggagcagccccgagctgtggctggccaggcggtgcggctgggcgggggacgccgccgccgttgctgcccggcccggagagatgagcacggaggcggacgagggcatcactttctctgtgccacccttcgccccctcgggcttctgcaccatccccgagggcggcatctgcaggaggggaggagcggcggcggtgggcgagggcgaggagcaccagctgccaccgccgccgccgggcagcttctggaacgtggagagcgccgctgcccctggcatcggttgtccggcggccacctcctcgagcagtgccacccgaggccggggcagctctgttggcgggggcagccgacggaccacggtggcatatgtgatcaacgaagcgagccaagggcaactggtggtggccgagagcgaggccctgcagagcttgcgggaggcgtgcgagacagtgggcgccaccctggaaaccctgcattttgggaaactcgactttggagaaaccaccgtgctggaccgcttttacaatgcagatattgcggtggtggagatgagcgatgccttccggcagccgtccttgttttaccaccttggggtgagagaaagtttcagcatggccaacaacatcatcctctactgtgatactaactcggactctctgcagtcactgaaggaaataatttgccagaagaatactatgtgcactgggaactacacctttgttccttacatgataactccacataacaaagtctactgctgtgacagcagcttcatgaaggggttgacagagctcatgcaaccgaacttcgagctgcttcttggacccatctgcttacctcttgtggatcgttttattcaacttttgaaggtggcacaagcaagttctagccagtacttccgggaatctatactcaatgacatcaggaaagctcgtaatttatacactggtaaagaattggcagctgagttggcaagaattcggcagcgagtagataatatcgaagtcttgacagcagatattgtcataaatctgttactttcctacagagatatccaggactatgattctattgtgaagctggtagagactttagaaaaactgccaacctttgatttggcctcccatcaccatgtgaagtttcattatgcatttgcactgaataggagaaatctccctggtgacagagcaaaagctcttgatattatgattcccatggtgcaaagcgaaggacaagttgcttcagatatgtattgcctagttggtcgaatctacaaagatatgtttttggactctaatttcacggacactgaaagcagagaccatggagcttcttggttcaaaaaggcatttgaatctgagccaacactacagtcaggaattaattatgcggtcctcctcctggcagctggacaccagtttgaatcttcctttgagctccggaaagttggggtgaagctaagtagtcttcttggtaaaaagggaaacttggaaaaactccagagctactgggaagttggattttttctgggggccagcgtcctagccaatgaccacatgagagtcattcaagcatctgaaaagctttttaaactgaagacaccagcatggtacctcaagtctattgtagagacaattttaatatataagcattttgtgaaactgaccacagaacagcctgtggccaagcaagaacttgtggacttttggatggatttcctggtcgaggccacaaagacagatgttactgtggttaggtttccagtattaatattagaaccaaccaaaatctatcaaccttcttatttgtctatcaacaatgaagttgaggaaaagacaatctctatttggcacgtgcttcctgatgacaagaaaggtatacatgagtggaattttagtgcctcttctgtcaggggagtgagtatttctaaatttgaagaaagatgctgctttctttatgtgcttcacaattctgatgatttccaaatctatttctgtacagaacttcattgtaaaaagttttttgagatggtgaacaccattaccgaagagaaggggagaagcacagaggaaggagactgtgaaagtgacttgctggagtatgactatgaatatgatgaaaatggtgacagagtcgttttaggaaaaggcacttatgggatagtctacgcaggtcgggacttgagcaaccaagtcagaattgctattaaggaaatcccagagagagacagcagatactctcagcccctgcatgaagaaatagcattgcataaacacctgaagcacaaaaatattgtccagtatctgggctctttcagtgagaatggtttcattaaaatcttcatggagcaggtccctggaggaagtctttctgctctccttcgttccaaatggggtccattaaaagacaatgagcaaacaattggcttttatacaaagcaaatactggaaggattaaaatatctccatgacaatcagatagttcaccgggacataaagggtgacaatgtgttgattaatacctacagtggtgttctcaagatctctgacttcggaacatcaaagaggcttgctggcataaacccctgtactgaaacttttactggtaccctccagtatatggcaccagaaataatagataaaggaccaagaggctacggaaaagcagcagacatctggtctctgggctgtacaatcattgaaatggccacaggaaaacccccattttatgaactgggagaaccacaagcagctatgttcaaggtgggaatgtttaaagtccaccctgagatcccagagtccatgtctgcagaggccaaggcattcatactgaaatgttttgaaccagatcctgacaagagagcctgtgctaacgacttgcttgttgatgagtttttaaaagtttcaagcaaaaagaaaaagacacaacctaagctttcagctctttcagctggatcaaatgaatatctcaggagtatatccttgccggtacctgtgctggtggaggacaccagcagcagcagtgagtacggctcagtttcacccgacacggagttgaaagtggaccccttctctttcaaaacaagagccaagtcctgcggagaaagagatgtcaagggaattcggacactctttttgggcattccagatgagaattttgaagatcacagtgctcctccttcccctgaagaaaaagattctggattcttcatgctgaggaaggacagtgagaggcgagctacccttcacaggatcctgacggaagaccaagacaaaattgtgagaaacctaatggaatctttagctcagggggctgaagaaccgaaactaaaatgggaacacatcacaaccctcattgcaagcctcagagaatttgtgagatccactgaccgaaaaatcatagccaccacactgtcaaagctgaaactggagctggacttcgacagccatggcattagccaagtccaggtggtactctttggttttcaagatgctgtcaataaagttcttcggaatcataacatcaagccgcactggatgtttgccttagacagtatcattcggaaggcggtacagacagccattaccatcctggttccagaactaaggccacatttcagccttgcatctgagagtgatactgctgatcaagaagacttggatgtagaagatgaccatgaggaacagccttcaaatcaaactgtccgaagacctcaggctgtcattgaagatgctgtggctacctcaggcgtgagcacgctcagttctactgtgtctcatgattcccagagtgctcaccggtcactgaatgtacagcttggaaggatgaaaatagaaaccaatagattactggaagaattggttcggaaagagaaagaattacaagcactccttcatcgagctattgaagaaaaagaccaagaaattaaacacctgaagcttaagtcccaacccatagaaattcctgaattgcctgtatttcatctaaattcttctggcacaaatactgaagattctgaacttaccgactggctgagagtgaatggagctgatgaagacactataagccggtttttggctgaagattatacactattggatgttctctactatgttacacgtgatgacttaaaatgcttgagactaaggggagggatgctgtgcacactgtggaaggctatcattgactttcgaaacaaacagacttgactgttgctcaatctaatcttcgatggaaattctaaaaattaatacagagctgatcttcttgggggtgggaaaatcgaagggagaggagaaaggcgctgcactttaaatccagtatttgtttactcatgttaaaaaaaaaaaaaacagacaaaacacactgaaatttcctaactacatctatttctataatttttaaggactcttcataaggactcttaaaataatcctgaacattagaaccctaatgttcaggaagattttaatctaagcatttttatggaaatatttttaatgcagcagctattgcacttcagccaaatgtttatttcacacaaaacggatgtaacatttcatgtgatcgtgcaccactggaacaaaaccaaaatgtgaccataactgtttaggcttctgtgtgtttgtaatatgctctaataatctgagtagaaatgcgtaatttcaattactgtataaagtttatgtttttttaagtgtgcagaatctgagagcaatggtttttacttctctgtgttaattgtaatattgactctattttgtaacttaagtttctgacctgtcgtacatttgtttgagtcgtttatgtactactgaactgtaccagttgcacatgcttgaactgtagtaatgttagcttgttctaaagctatccattgtgtcatatttactctaaaaattaaagagactctcaacaaaaaaaaaaaaaaaaaaaaa

SEQ ID NO: 996 - protein, 1374 aa, Homo sapien
MSTEADEGITFSVPPFAPSGFCTIPEGGICRRGGAAAVGEGEEHQLPPPPPGSFWNVESAAAPGIGCPAATSSSSATRGRGSSVGGGSRRTTVAYVINEASQGQLVVAESEALQSLREACETVGATLETLHFGKLDFGETTVLDRFYNADIAVVEMSDAFRQPSLFYHLGVRESFSMANNIILYCDTNSDSLQSLKEIICQKNTMCTGNYTFVPYMITPHNKVYCCDSSFMKGLTELMQPNFELLLGPICLPLVDRFIQLLKVAQASSSQYFRESILNDIRKARNLYTGKELAAELARIRQRVDNIEVLTADIVINLLLSYRDIQDYDSIVKLVETLEKLPTFDLASHHHVKFHYAFALNRRNLPGDRAKALDIMIPMVQSEGQVASDMYCLVGRIYKDMFLDSNFTDTESRDHGASWFKKAFESEPTLQSGINYAVLLLAAGHQFESSFELRKVGVKLSSLLGKKGNLEKLQSYWEVGFFLGASVLANDHMRVIQASEKLFKLKTPAWYLKSIVETILIYKHFVKLTTEQPVAKQELVDFWMDFLVEATKTDVTVVRFPVLILEPTKIYQPSYLSINNEVEEKTISIWHVLPDDKKGIHEWNFSASSVRGVSISKFEERCCFLYVLHNSDDFQIYFCTELHCKKFFEMVNTITEEKGRSTEEGDCESDLLEYDYEYDENGDRVVLGKGTYGIVYAGRDLSNQVRIAIKEIPERDSRYSQPLHEEIALHKHLKHKNIVQYLGSFSENGFIKIFMEQVPGGSLSALLRSKWGPLKDNEQTIGFYTKQILEGLKYLHDNQIVHRDIKGDNVLINTYSGVLKISDFGTSKRLAGINPCTETFTGTLQYMAPEIIDKGPRGYGKAADIWSLGCTIIEMATGKPPFYELGEPQAAMFKVGMFKVHPEIPESMSAEAKAFILKCFEPDPDKRACANDLLVDEFLKVSSKKKKTQPKLSALSAGSNEYLRSISLPVPVLVEDTSSSSEYGSVSPDTELKVDPFSFKTRAKSCGERDVKGIRTLFLGIPDENFEDHSAPPSPEEKDSGFFMLRKDSERRATLHRILTEDQDKIVRNLMESLAQGAEEPKLKWEHITTLIASLREFVRSTDRKIIATTLSKLKLELDFDSHGISQVQVVLFGFQDAVNKVLRNHNIKPHWMFALDSIIRKAVQTAITILVPELRPHFSLASESDTADQEDLDVEDDHEEQPSNQTVRRPQAVIEDAVATSGVSTLSSTVSHDSQSAHRSLNVQLGRMKIETNRLLEELVRKEKELQALLHRAIEEKDQEIKHLKLKSQPIEIPELPVFHLNSSGTNTEDSELTDWLRVNGADEDTISRFLAEDYTLLDVLYYVTRDDLKCLRLRGGMLCTLWKAIIDFRNKQT

SEQ ID NO: 997 - DNA, 5236 bp, Homo sapien
  Unsure 4687: Unknown base
cgagcgcggcgcccttgagctgcaccgcggcgcaggtttgcgagccgacttgtcagccggccaagaaaaggaagctccgtcccttcccgctcacccggcttccccaccccttgtactctaaactctgcacagggcgagcggcgcggccactgatgcgccgaggaggagcgagccgccgccgggcagcggcgtgccctcgggggagagggcgccggataagagcggcggcgcggcggcgatggcgcggcgcgcgatggcagctgcttagcccggcgggcgcggagcagccccgagctgtggctggccaggcggtgcggctgggcgggggacgccgccgccgttgctgcccggcccggagagatgagcacggaggcggacgaaggcatcactttctctgtgccacccttcgccccctcgggcttctgcaccatccccgagggcggcatctgcaggaggggaggagcggcggcggtgggcgagggcgaggagcaccagctgccaccgccgccgccgggcagcttctggaacgtggagagcgccgctgcccctggcatcggttgtccggcggccacctcctcgagcagtgccacccgaggccggggcagctctgttggcgggggcagccgacggaccacggtggcatatgtgatcaacgaagcgagccaagggcaactggtggtggccgagagcgaggccctgcagagcttgcgggaggcgtgcgagacagtgggcgccaccctggaaaccctgcattttgggaaactcgactttggagaaaccaccgtgctggaccgcttttacaatgcagatattgcggtggtggagatgagcgatgccttccggcagccgtccttgttttaccaccttggggtgagagaaagtttcagcatggccaacaacatcatcctctactgtgatactaactcggactctctgcagtcactgaaggaaataatttgccagaagaatactatgtgcactgggaactacacctttgttccttacatgataactccacataacaaagtctactgctgtgacagcagcttcatgaaggggttgacagagctcatgcaaccgaacttcgagctgcttcttggacccatctgcttacctcttgtggatcgttttattcaacttttgaaggtggcacaagcaagttctagccagtacttccgggaatctatactcaatgacatcaggaaagctcgtaatttatacactggtaaagaattggcagctgagttggcaagaattcggcagcgagtagataatatcgaagtcttgacagcagatattgtcataaatctgttactttcctacagagatatccaggactatgattctattgtgaagctggtagagactttagaaaaactgccaacctttgatttggcctcccatcaccatgtgaagtttcattatgcatttgcactgaataggagaaatctccctggtgacagagcaaaagctcttgatattatgattcccatggtgcaaagcgaaggacaagttgcttcagatatgtattgcctagttggtcgaatctacaaagatatgtttttggactctaatttcacggacactgaaagcagagaccatggagcttcttggttcaaaaaggcatttgaatctgagccaacactacagtcaggaattaattatgcggtcctcctcctggcagctggacaccagtttgaatcttcctttgagctccggaaagttggggtgaagctaagtagtcttcttggtaaaaagggaaacttggaaaaactccagagctactgggaagttggattttttctgggggccagcgtcctagccaatgaccacatgagagtcattcaagcatctgaaaagctttttaaactgaagacaccagcatggtacctcaagtctattgtagagacaattttaatatataagcattttgtgaaactgaccacagaacagcctgtggccaagcaagaacttgtggacttttggatggatttcctggtcgaggccacaaagacagatgttactgtggttaggtttccagtattaatattagaaccaaccaaaatctatcaaccttcttatttgtctatcaacaatgaagttgaggaaaagacaatctctatttggcacgtgcttcctgatgacaagaaaggtatacatgagtggaattttagtgcctcttctgtcaggggagtgagtatttctaaatttgaagaaagatgctgctttctttatgtgcttcacaattctgatgatttccaaatctatttctgtacagaacttcattgtaaaaagttttttgagatggtgaacaccattaccgaagagaaggggagaagcacagaggaaggagactgtgaaagtgacttgctggagtatgactatgaatatgatgaaaatggtgacagagtcgttttaggaaaaggcacttatgggatagtctacgcaggtcgggacttgagcaaccaagtcagaattgctattaaggaaatcccagagagagacagcagatactctcagcccctgcatgaagaaatagcattgcataaacacctgaagcacaaaaatattgtccagtatctgggctctttcagtgagaatggtttcattaaaatcttcatggagcaggtccctggaggaagtctttctgctctccttcgttccaaatggggtccattaaaagacaatgagcaaacaattggcttttatacaaagcaaatactggaaggattaaaatatctccatgacaatcagatagttcaccgggacataaagggtgacaatgtgttgattaatacctacagtggtgttctcaagatctctgacttcggaacatcaaagaggcttgctggcataaacccctgtactgaaacttttactggtaccctccagtatatggcaccagaaataatagataaaggaccaagaggctacggaaaagcagcagacatctggtctctgggctgtacaatcattgaaatggccacaggaaaacccccattttatgaactgggagaaccacaagcagctatgttcaaggtgggaatgtttaaagtccaccctgagatcccagagtccatgtctgcagaggccaaggcattcatactgaaatgttttgaaccagatcctgacaagagagcctgtgctaacgacttgcttgttgatgagtttttaaaagtttcaagcaaaaagaaaaagacacaacctaagctttcagctctttcagctggatcaaatgaatatctcaggagtatatccttgccggtacctgtgctggtggaggacaccagcagcagcagtgagtacggctcagtttcacccgacacggagttgaaagtggaccccttctctttcaaaacaagagccaagtcctgcggagaaagagatgtcaagggaattcggacactctttttgggcattccagatgagaattttgaagatcacagtgctcctccttcccctgaagaaaaagattctggattcttcatgctgaggaaggacagtgagaggcgagctacccttcacaggatcctgacggaagaccaagacaaaattgtgagaaacctaatggaatctttagctcagggggctgaagaaccgaaactaaaatgggaacacatcacaaccctcattgcaagcctcagagaatttgtgagatccactgaccgaaaaatcatagccaccacactgtcaaagctgaaactggagctggacttcgacagccatggcattagccaagtccaggtggtactctttggttttcaagatgctgtcaataaagttcttcggaatcataacatcaagccgcactggatgtttgccttagacagtatcattcggaaggcggtacagacagccattaccatcctggttccagaactaaggccacatttcagccttgcatctgagagtgatactgctgatcaagaagacttggatgtagaagatgaccatgaggaacagccttcaaatcaaactgtccgaagacctcaggctgtcattgaagatgctgtggctacctcaggcgtgagcacgctcagttctactgtgtctcatgattcccagagtgctcaccggtcactgaatgtacagcttggaaggatgaaaatagaaaccaatagattactggaagaattggttcggaaagagaaagaattacaagcactccttcatcgagctattgaagaaaaagaccaagaaattaaacacctgaagcttaagtcccaacccatagaaattcctgaattgcctgtatttcatctaaattcttctggcacaaatactgaagattctgaacttaccgactggctgagagtgaatggagctgatgaagacactataagccggtttttggctgaagattatacactattggatgttctctactatgttacacgtgatgacttaaaatgcttgagactaaggggagggatgctgtgcacactgtggaaggctatcattgactttcgaaacaaacagacttgactgttgctcaatctaatcttcgatggaaattctaaaaattaatacagagctgatcttcttgggggtgggaaaatcgaagggagargagaaaggcgctgcmctttaaatccagtatttgtttactcatgttaaaaaaaaaaaaaacagacaaaacacactgaaatttcctaactacatctatttctataatttttaaggactnttcataaggactcttaaaataatcctgaacattagaaccctaatgttcaggaagattttaatctaagcatttttatggaaatatttttaatgcagcagctattgcacttcagccaaatgtttatttcacacaaaacggatgtaacattcatgtgatcgtgcacccactggacaaaccaaaatgtgaccataactgtttaggttctgtgtgtttgtaatatgtctaataatctggagtagaaatgcgtaatttcaattactgtataaagtttatgtttttttaagtgtgcagaatctgagagcaatggtttttacttctctgtgttaattgtaatattgactctattttgtaacttaagtttctgacctgtcgtacatttgtttgagtcgtttatgtactactgaactgtaccagttgcacatgcttgaactgtagtaatgttagcttgttctaaagctatccattgtgtcatatttactctaaaaattaaagagactctcaacaaaaaaaaaaaaaaaaaaaaaccatggtacccggatcctcgaattc

SEQ ID NO: 998 - protein, 1374 aa, Homo sapien; identical to SEQ ID NO: 996
  Unsure 4687: Unknown amino acid

SEQ ID NO: 999 - DNA, 3791 bp, Homo sapien
gcggcgacggagcggggccggccgtggggcgggcggggagggaggaggcggtgaaggcggcgggccgggggggaagatgccgctggcgcagctggcggacccgtggcagaagatggctgtggagagcccgtccgacagcgctgagaatggacagcaaattatggatgaacctatgggagaggaggagattaacccacaaactgaagaagtcagtatcaaagaaattgcaatcacacatcatgtaaaggaaggacatgaaaaggcagatccttcccagtttgaacttttaaaagtattagggcagggatcatttggaaaggttttcttagttaaaaaaatctcaggctctgatgctaggcagctttatgccatgaaggtattgaagaaggccacactgaaagttcgagaccgagttcggacaaaaatggaacgtgatatcttggtagaggttaatcatccttttattgtcaagttgcattatgcttttcaaactgaagggaagttgtatcttattttggattttctcaggggaggagatttgtttacacgcttatccaaagaggtgatgttcacagaagaagatgtcaaattctacttggctgaacttgcacttgctttagaccatctacatagcctgggaataatttatagagacttaaaaccagaaaatatacttcttgatgaagaaggtcacatcaagttaacagatttcggcctaagtaaagagtctattgaccatgaaaagaaggcatattctttttgtggaactgtggagtatatggctccagaagtagttaatcgtcgaggtcatactcagagtgctgactggtggtcttttggtgtgttaatgtttgaaatgcttactggtacactccctttccaaggaaaagatcgaaaagaaacaatgactatgattcttaaagccaaacttggaatgccacagtttttgagtcctgaagcgcagagtcttttacgaatgcttttcaagcgaaatcctgcaaacagattaggtgcaggaccagatggagttgaagaaattaaaagacattcatttttctcaacgatagactggaataaactgtatagaagagaaattcatccgccatttaaacctgcaacgggcaggcctgaagatacattctattttgatcctgagtttactgcaaaaactcccaaagattcacctggcattccacctagtgctaatgcacatcagctttttcgggggtttagttttgttgctattacctcagatgatgaaagccaagctatgcagacagttggtgtacattcaattgttcagcagttacacaggaacagtattcagtttactgatggatatgaagtaaaagaagatattggagttggctcctactctgtttgcaagagatgtatacataaagctacaaacatggagtttgcagtgaagattattgataaaagcaagagagacccaacagaagaaattgaaattcttcttcgttatggacagcatccaaacattatcactctaaaggatgtatatgatgatggaaagtatgtgtatgtagtaacagaacttatgaaaggaggtgaattgctggataaaattcttagacaaaaatttttctctgaacgagaggccagtgctgtcctgttcactataactaaaaccgttgaatatcttcacgcacaaggggtggttcatagagacttgaaacctagcaacattctttatgtggatgaatctggtaatccggaatctattcgaatttgtgattttggctttgcaaaacagctgagagcggaaaatggtcttctcatgactccttgttacactgcaaattttgttgcaccagaggttttaaaaagacaaggctatgatgctgcttgtgatatatggagtcttggtgtcctactctatacaatgcttaccggttacactccatttgcaaatggtcctgatgatacaccagaggaaatattggcacgaataggtagcggaaaattctcactcagtggtggttactggaattctgtttcagacacagcaaaggacctggtgtcaaagatgcttcatgtagaccctcatcagagactgactgctgctcttgtgctcagacatccttggatcgtccactgggaccaactgccacaataccaactaaacagacaggatgcaccacatctagtaaagggtgccatggcagctacatattctgctttgaaccgtaatcagtcaccagttttggaaccagtaggccgctctactcttgctcagcggagaggtattaaaaaaatcacctcaacagccctgtgaagtgacctcagtgagatatttggtaccatggtgtaagctgatagcacaagttctggcgacaggtagcacgtatctgagagacacctgcaagcacacactgtcccagctggtacccataatgctgctgttcctgctgctgctcctgctttcctctcttctcgctttaaatgattgttagcaagttagattttcctggagcttcggaagaaatgaaaatggaaacatgatgaagatatagtcactgaatcaatgagaaaaataatgaacatatgaataccacctaaaaatacactgaataaagtacaccatatagcattatttttataggaaatatttcatgtcccttaaatattctttgttagttatagggatggacagtttatgttaagcacttagcttaaacaatccgtttatattagcactgtatcccttgtgccatccaacattttgtatgtttttgtaaacagttcatatacagtacatttctgtactgctttctttaatgtatacatgccttgtttaacttggaatctattattattaatcaattgactattaaatctggttaaatagttcacctggattaacagtattgttggacagtcctaaaaatggccagattgtggaacagctgttgaatgtaatacttccaaaatgtacatatctttccccacgtctgtttcactggttcgttcatttgtttgtttcttaaagtcaggtgctctgtcagactaacctagagagctgttatggtagagaaagttatcatatgtgtgtggcatgaaatcaagaatacacctatgaagttagtccatatactttgcaactccttagagtacttttttccttaattaaggaagtagtccttgcacttctaatcttacatagcatccatacttagaatttggcatatcatctgggattttgccaatatacgtcaaagccctttaagagtcatggtaaggagatgggtgaaggaaaatttagcaacaggtaattgaagtcctattggatatttcatgtttaaatagatattctatattaaacactaatttaaatgtaataaaggccaaaggcctctgtatgaaattggatttaaactttcttattttagggaataaaacattattgatcaaacagtatctgttctaacctaaaattataggtagggcaggctaagtgaacagcattgagtattttctgaatccctcatgataatttatagccacatactgcttcctttgacttcaggaatgatcagttttcataatggccactgggcctgcttagattgcagtattcattatctgcatctaatttggtagtttccacaatcgtatttgatgaaagaaacttcagtccccattattacctgtgtctttgccaagctgcctagcatacatcagtatgtaatgtaaaagacatatgagcaagaaaaaagtgatttaacttacctcatcaagaatgtgcccctacaggccgggcgcggtcg

SEQ ID NO: 1000 - protein, 765 aa, Homo sapien
RRRSGAGRGAGGEGGGGEGGGPGGKMPLAQLADPWQKMAVESPSDSAENGQQIMDEPMGEEEINPQTEEVSIKEIAITHHVKEGHEKADPSQFELLKVLGQGSFGKVFLVKKISGSDARQLYAMKVLKKATLKVRDRVRTKMERDILVEVNHPFIVKLHYAFQTEGKLYLILDFLRGGDLFTRLSKEVMFTEEDVKFYLAELALALDHLHSLGIIYRDLKPENILLDEEGHIKLTDFGLSKESIDHEKKAYSFCGTVEYMAPEVVNRRGHTQSADWWSFGVLMFEMLTGTLPFQGKDRKETMTMILKAKLGMPQFLSPEAQSLLRMLFKRNPANRLGAGPDGVEEIKRHSFFSTIDWNKLYRREIHPPFKPATGRPEDTFYFDPEFTAKTPKDSPGIPPSANAHQLFRGFSFVAITSDDESQAMQTVGVHSIVQQLHRNSIQFTDGYEVKEDIGVGSYSVCKRCIHKATNMEFAVKIIDKSKRDPTEEIEILLRYGQHPNIITLKDVYDDGKYVYVVTELMKGGELLDKILRQKFFSEREASAVLFTITKTVEYLHAQGVVHRDLKPSNILYVDESGNPESIRICDFGFAKQLRAENGLLMTPCYTANFVAPEVLKRQGYDAACDIWSLGVLLYTMLTGYTPFANGPDDTPEEILARIGSGKFSLSGGYWNSVSDTAKDLVSKMLHVDPHQRLTAALVLRHPWIVHWDQLPQYQLNRQDAPHLVKGAMAATYSALNRNQSPVLEPVGRSTLAQRRGIKKITSTAL

SEQ ID NO: 1001 - DNA, 6007 bp, Homo sapien
atgagcggcggcggcgacgtggtgtgcaccggctggctgaggaaatcgcctcccgagaagaagttgaggcgctatgcctggaagaaacgctggtttatcctgcggagtggccggatgagcggtgacccagatgttctggaatactacaagaacgatcactccaagaagcctctgcggatcatcaacctgaacttctgtgagcaggtagatgcaggcctgacctttaacaagaaggagctgcaggatagttttgtgtttgacatcaagaccagtgaacgcaccttttacctggtggctgagacagaagaggacatgaataagtgggtccagagcatctgccagatctgtggcttcaatcaggctgaggagagcacagactccctgagaaatgtttcctcagccggtcatggcccccgctcttctccagctgagctcagcagctctagccagcaccttctccgagagcgcaagtcctcagccccatcacactccagccagccaactctgttcacgtttgaaccccctgtgtcaaaccacatgcagcccaccttgtccaccagcgcacctcaggagtatctctacttgcaccagtgcataagccgaagagcagaaaatgcaaggagtgccagcttctctcagggcaccagagcctcttttctcatgaggagtgacacagctgtacaaaaacttgcccagggcaatggacactgtgtcaacgggatcagtggtcaagtccatggcttctatagccttcccaagccgagccggcacaatacagaattcagagacagtacctacgacctcccccgcagcctggcctcccatggccacaccaagggcagcctcacaggctccgagacagataatgaggatgtgtacaccttcaagacgcccagcaacaccctgtgcagggagttcggggacctcctggtagacaatatggatgttccggccaccccactctcagcctaccagatccctaggacattcactctggacaaaaaccacaatgccatgacagtggccactcctggggactcagccatagctcccccaccccgcccccccaagccaagtcaggcagaaacacctcgatggggcagtcctcagcagagaccgccaatcagtgaaaatagcagatctgtcgctgccaccatccccagacgcaacaccctccctgcaatggacaacagccgacttcaccgagcttcttcctgtgagacctacgagtacccacagcgtggtggagagagtgcaggccggtctgctgaatccatgagtgatggagttggctctttcctgccagggaaaatgattgtgggccgatcggacagcaccaattctgaagacaactatgtgcccatgaatccaggttcttccaccctgttggccatggaacgagcaggtgataattcccagagcgtctacatcccaatgagcccaggggcccatcactttgactcacttggctacccatcaacaacccttcctgtgcaccgaggccccagcagaggaagtgagattcagccaccccctgtcaaccgcaacctcaaacctgatcggaaagcaaagccaacaccacttgacctgaggaacaacaccgtcatcgatgaactccccttcaagtcacctatcaccaagtcttggtctagggccaaccacaccttcaactccagctcctcccagtactgccgccccatctccacccagagcatcaccagcacagactcaggagacagcgaagagaactatgtccctatgcaaaacccagtgtctgcatctcccgttcccagtggcacgaacagtcctgcccctaagaagagcaccggcagcgttgattatctggccctggacttccagccgagctccccaagcccccaccgcaagccatctacttcatccgtcacctctgatgagaaggtggactacgttcaggtggacaaggagaagacccaggccctgcagaacaccatgcaggagtggacagacgtgcggcagtcctcagagccttccaagggtgccaagctgtgatgagagggccaccgcagagcccaggaggcagcatctccagagctggcccttcccatctcccctctcccctctcccgttcttcctcccatccacctcctctctactctgccagtctcagccttcaaagcacttgacatcagggaccctgaacccttcccctgggaggtgagggcctgatcaaggcacctcctctgcccactcggggcccagctgtgatttttatcagtaatggccatgcctccacccaccttagttaggagctacttccaaaaagcatccttcagcctcttcctgtcctttagacctgactctctaccagatgtttggagggaagggctggggctctgagccagattccacacctcacgttcagtcacagccctcagctatcttccctccggccactgggctacctctccttcagtcccagaagacaagtctcaccaacccagggagtcaaggaccagcaaaccaaagtggataatggactttttcattcctgtttttcttggcaggagagaagcaaggccactaaaagaggagatggtggagacggaggctcagcagtggtcttgaggggtaaaggacttagatgcccagatgaagagggaaagctgacatctgcagggaacccactttgaggctgaggccatggcaggacagctgctgtggggtgcagaggcagaagatgaaggacaaaaggaagggaaaactgatggccaacctagagcagcaaggagcagggcttggagctcgggtggtggagatgacaaggacactgtggggtctgggtccccagaactctggagctacaggccactctaggcccaagggctagtcctcttccccagtcccctcagaggcccccgccagccccaccttgaaagcagcatacaggggaaggcttggaccaagctgggcgaccaagcacatggggcaggaacacatggtaaaggggtggggaatatgggagggagtgtggtgtggatgggggtgatgcagggactgaggggaaccctgggacaggcacaggctgggcagaggcacagggcagtgcaggggactctgcagtggggtcgggaagtgagtttctttgcagtgagcagtgcagtggaagtcgggcacagaggtagcagacagatgtgaagcagtggtgaaggccatgtagcaagtggggaaatacatccaaagggcctgggagttggggggtgcccaacgcaatccttgggggtgcagggtggagcagaaagtgaaggagggacacgtgcaagagtggtgtgcatggtggtgtgacatgaggaccgttcctaggatgggacagtgggtcaggcaggacaaggagaaagcagggcagaatgatgcctagaggaccacatcaggcatggctgacagcttgtgcccatgggctgtggcgtatgtcagatcgcagggtaggaacgagtctggcctggtgccggcccagtgtttcctcagctcatccgccctctgttgctccctagcattccaggagccatcttggactctcctccccaggtttgaaaggccatcagattagcagggacggggtgtagggcatcacccaaggttccttctcttaaactaagggtgggggatctgaatgtttttatgttgactgttcttgactaaattttcaagagtttcagaagcaacaggacagaccagacgtttcattctaccctggggcgaacagaacttcttcctcccaaacaatgacttcctgccatgtttgatggggacagctaccactgtcctctgcccccattcccctttcagctcccatgagcatgcatagttcaccagaccaatggcctagccattctctaagtcccatcctggaagaagttatttcttcaagagctgcacctctcctcctagcattagtttagatcaactcaaggagtatttattaatggctgctgtctccagtttctggggttaagcactaaggacacaagaatcaatcagaccttctccctgaacttaagatagccacaatcagaaaaaggacaaggacatgagacagtggtgatggccatcagacagagacttcaaatgctgatggagggcagaggaagtacttagggaggttggtgtcagaggcaggagtgggggatcagggaaggtggattctaggaaaagggagtgcctgaggtaggccttagaaggggatgagtcagatttttacagaggaggagggcagggcttgggtccagtggaggaagaaggaaggagaggcttggaaagccttgtgtcttgggaaaaaaaggcctttgagcatatgggtccagccactcagaagtgcaggggccatgccttggtgttccaataagtgaatggaagcagtggtggtagctacactgggcagagttggcagggtgctggttcactctgcccagccctgaatgtgtgccttaaaggccccctacaaggggccccatacgacagagcttttaactggtgccttccctgtacccgcagcagccacaagtgggcccagactattgcagcctcccataaacatgtgagcatgttctgagtgtgccatgatgtgagtggacctggctggaatcttcggagagcgactgaggtgttcaaatcgaatctcccaggaggcttccttccagccccctattctggtaactaccaggaggcttccttccagccccctattctggtaactaccaaaatccctcgggtgcaagtgtaggggtagagatggaaggatgagaggtgaaattgaccttttgaaagcaaagctctggctcacaggccccaaactaccagccgtatctagcatatccccaccctccacccactacctcctccaacaaaggagtcaactcagttgaaaaaactggtcctttggcctatccatgggtcaaagtccacctctcctgggggcctggagaggactgagcctacggaaaggggataccttcccactcagcactgcttcacacaggccccctgcctggggctctccaaggagccttcttcacccacttccagctccacttctgcaaggttaagtcaagtgagaacgatgagaaatagggagatggtgtctccttaagtccttgatctgcctgtctgtggaatgggaggttggattagctgcgctgaggtcccatccacagctggtgctcagctgcttgaaggggagactccctcctctgtaacttctttctgggggattggggtgggcagtacctatccccagtcccctcctagcttgactttagtggtttccaatgtagaagttaacaaagtatgccccattcctgtgacaaaagcacaaccattctgaagttactggagcatgggctcagctcatcctccctctggccccttctcccatggggacatctcggcccagcacccctatcccatttccagagttcttccttccccatctgggccttcataaaatgcaggggaagccagactggtctcaggagcgctaaagcccttccgtggggggtcgtctttctgggactagccctgctgtttaggacctgggaccacaatggggtacctgccgagggggtccccaagagatccaggctgtcatgtgatttatggtggcatgtgttgtgtatttgttggctacttgtgtcttgaaatctagaattatttcacgcagaattgtcactgtttgtcaggaagagaaaatgggctagtggaagcccagtcttgagttcttgtcttgttaccatttaaaattgacatttaattttcaaatcactgttggtgcctaatcacttaagttattaatttattctgttgtattcttttttttaaattgtaacatatttatccggtgggtgggacaggagtgtgttcaagtgggtcatgtttttgctgtggtgacacatggtacaggcttggagcttgcaggtccctttctactgtggtgttggagcaggacaataaagtccactagaaatgcacccca

SEQ ID NO: 1002 - protein, 676 aa, Homo sapien
MSGGGDVVCTGWLRKSPPEKKLRRYAWKKRWFILRSGRMSGDPDVLEYYKNDHSKKPLRIINLNFCEQVDAGLTFNKKELQDSFVFDIKTSERTFYLVAETEEDMNKWVQSICQICGFNQAEESTDSLRNVSSAGHGPRSSPAELSSSSQHLLRERKSSAPSHSSQPTLFTFEPPVSNHMQPTLSTSAPQEYLYLHQCISRRAENARSASFSQGTRASFLMRSDTAVQKLAQGNGHCVNGISGQVHGFYSLPKPSRHNTEFRDSTYDLPRSLASHGHTKGSLTGSETDNEDVYTFKTPSNTLCREFGDLLVDNMDVPATPLSAYQIPRTFTLDKNHNAMTVATPGDSAIAPPPRPPKPSQAETPRWGSPQQRPPISENSRSVAATIPRRNTLPAMDNSRLHRASSCETYEYPQRGGESAGRSAESMSDGVGSFLPGKMIVGRSDSTNSEDNYVPMNPGSSTLLAMERAGDNSQSVYIPMSPGAHHFDSLGYPSTTLPVHRGPSRGSEIQPPPVNRNLKPDRKAKPTPLDLRNNTVIDELPFKSPITKSWSRANHTFNSSSSQYCRPISTQSITSTDSGDSEENYVPMQNPVSASPVPSGTNSPAPKKSTGSVDYLALDFQPSSPSPHRKPSTSSVTSDEKVDYVQVDKEKTQALQNTMQEWTDVRQSSEPSKGAKL

SEQ ID NO: 1003 - DNA, 423 bp, Homo sapien
ccggaagtgactgcggacgaatcggcgtttgccgaggctggcatagatttggctgtctccgctcatagctgcttttggcgcgaaagatgccgggtctggttgactcaaaccctgccccgcctgagtctcaggagaagaagccgctgaagccctgctgcgcttgcccggagaccaagaaggcgcgcgatgcgtgtatcatcgagaaaggagaagaacactgtggacatctaattgaggcccacaaggaatgcatgagagccctaggatttaaaatatgaaatggtggtctgctgtgtgaataaataattcctgaagaatgaagaagattaattttgggagttctttgacgaactttgatatgtggaaaaagtatttataatttattgtaagaagaaagtaaaatattactagtggaagatcttc

SEQ ID NO: 1004 - protein, 63 aa, Homo sapien
MPGLVDSNPAPPESQEKKPLKPCCACPETKKARDACIIEKGEEHCGHLIEAHKECMRALGFKI

SEQ ID NO: 1005 - DNA, 891 bp, Homo sapien
gcgaggcgcccgaagccgtcgcggcggggaccatgttgcttccgaacatcctgctcaccggtacaccaggggttggaaaaaccacactaggcaaagaacttgcgtcaaaatcaggactgaaatacattaatgtgggtgatttagctcgagaagagcaattgtatgatggctatgatgaagagtatgactgtcccattttagatgaagacagagtagttgatgagttagataaccaaatgagagaaggtggagttattgttgattaccatggttgtgatttcttccctgaacgctggtttcatatagtttttgtgctgagaacagataccaatgtattgtacgaaagacttgaaacaaggggttataatgagaagaaactaacagacaatattcagtgtgagatttttcaagttctttatgaagaagccacagcatcctacaaggaagaaatcgtgcatcagctgcccagtaataaaccagaagagctagaaaataatgtagatcagatcttgaaatggattgagcagtggatcaaagatcataactcttgacttataaggctagctacttaataatcactcttgttgatatctctgccgacatcatagaaattgttcaagtgtcagtaacactttattaaaatcatgttgcagaaccagcaggtggatagtatataggtttatgcctgtgtttctttttctccatgagaaagctaaacatgaaatataatgaatatagtattattaaggattgagacaaaaactgtgattttaatacttaaattgctaaagaataaataaatctgacaaaatgggtggatatcttttaagtttattacagaaaaaaatgcagatgatctcttaaaataaaactaaagataaagcaaaaaaa

SEQ ID NO: 1006 - protein, 172 aa, Homo sapien
MLLPNILLTGTPGVGKTTLGKELASKSGLKYINVGDLAREEQLYDGYDEEYDCPILDEDRVVDELDNQMREGGVIVDYHGCDFFPERWFHIVFVLRTDTNVLYERLETRGYNEKKLTDNIQCEIFQVLYEEATASYKEEIVHQLPSNKPEELENNVDQILKWIEQWIKDHNS

SEQ ID NO: 1007 - DNA, 2518 bp, Homo sapien
ccagcagtggctgcaccatgcacgtgaacggcaaagtggcgctggtgaccggcgcggctcagggcataggcagagcctttgcagaggcgctgctgcttaagggcgccaaggtagcgctggtggattggaatcttgaagcaggtgtacagtgtaaagctgccctgcatgagcaatttgaacctcagaagactctgttcatccagtgcgatgtggctgaccagcaacaactgagagacacttttagaaaagttgtagaccactttggaagactggacattttggtcaataatgctggagtgaataatgagaaaaactgggaaaaaactctgcaaattaatttggtttctgttatcagtggaacctatcttggtttggattacatgagtaagcaaaatggaggtgaaggcggcatcattatcaatatgtcatctttagcaggactcatgcccgttgcacagcagccggtttattgtgcttcaaagcatggcatagttggattcacacgctcagcagcgttggctgctaatcttatgaacagtggtgtgagactgaatgccatttgtccaggctttgttaacacagccatccttgaatcaattgaaaaagaagaaaacatgggacaatatatagaatataaggatcatatcaaggatatgattaaatactatggaattttggacccaccattgattgccaatggattgataacactcattgaagatgatgctttaaatggtgctattatgaagatcacaacttctaagggaattcattttcaagactatgatacaactccatttcaagcaaaaacccaatgaacagcttatgtgttagccatagctgaaaataagcacaaatagcttatattcagatcctatcttcatttgaatatagcttttaaatgaaatgttacagtttgaagttttccttcatgcacttggtgataaacgttttctaaatttttagttaagtatatggataaaaagttatgaactattaaaaatgtgatgtggaccaaaggctaggttgtaatcttgatagtctaaaaaatgatcaaaacaaatgattttcaaggaatattcaatattctgcctttcagaaagtgtatttatatctgtgcttcataaatattaatgttcttcagaacatcattttaaaggagatacttgaattgttatttaaatcaaaccagatgtaaaacactcacatacaagttcatactttaaaagaggaaagctacttaacaatgacaaatatttcacaataataatttttacttatataccatctttcaactgaacatttcagttcttccaagagcttcttagagtagtatattttgggggcagtcaaggaataaactacagtgtaaacatatcccagatgaaaactgctgtatggaaaaatgacagaaagtaactgattgacactgttgattcacagttcagcctcctatctgggaaagacatttctttcctctgctcactttaagaacttttaccgactccaaaaatctcaggaattaaacttttaacagttacagcaataaagaatagttagtactccaaaaatattatatttaagatgctcaacaagaaaaaaatgcaaatgtaatatttttttcaaattacttctttattgacttgtccaaatttcaaaagtgcctacccttcaataaaacttttttattctgatctccataaattacttagtcttctatgtatagctatcaaggaaataaaaccaattttgccacagccacaactgtaaatgtttttgtacccatgctgaaactcataacaacacagacataaaaatagctgtgaggttttgctttttttgttgtcagctatcttaagaatcattaaatacacctgctttgggtaaaactctttgcaagcagtaattaacactagtaacagtgaaagcacaagatttccaaatcagtcgttttctcaaaaaaatatcgtataagtgactcatcctgtctgctaactccagacctcccagcttgaagccaaatctttccatgtgagattgatatggatttcctagaagtactggaatgttgtcatatcttgccctattttaattctgctatagaaaacaattgccttcacttttaaggagtaatttgaatattaataactctggtctagattttcatataatgtattaaagacaaagtagtgaacatcaatgaacatctgatagagataaactgtaatcaggcataagcttgtttgtatgttctggcagtgactaatcagtaaatgatgtcggtttgcccagtatcacttatcttctgtatttttcctctgtcgtgtaaatagtataaccttttcatttatggacaattttttggactagtagccttcaatatacattctgctttgaattaattttttcaaatcaataaattatgtagacatttaaaatcaaatatcaagtagaattgaaaaatgtgagttacataagttaaaaacttactttaaatcttaccttctataggtagctc

SEQ ID NO: 1008 - protein, 266 aa, Homo sapien
MHVNGKVALVTGAAQGIGRAFAEALLLKGAKVALVDWNLEAGVQCKAALHEQFEPQKTLFIQCDVADQQQLRDTFRKVVDHFGRLDILVNNAGVNNEKNWEKTLQINLVSVISGTYLGLDYMSKQNGGEGGIIINMSSLAGLMPVAQQPVYCASKHGIVGFTRSAALAANLMNSGVRLNAICPGFVNTAILESIEKEENMGQYIEYKDHIKDMIKYYGILDPPLIANGLITLIEDDALNGAIMKITTSKGIHFQDYDTTPFQAKTQ

SEQ ID NO: 1009 - DNA, 2545 bp, Homo sapien
atccaatacaggagtgacttggaactccattctatcactatgaagaaaagtggtgttcttttcctcttgggcatcatcttgctggttctgattggagtgcaaggaaccccagtagtgagaaagggtcgctgttcctgcatcagcaccaaccaagggactatccacctacaatccttgaaagaccttaaacaatttgccccaagcccttcctgcgagaaaattgaaatcattgctacactgaagaatggagttcaaacatgtctaaacccagattcagcagatgtgaaggaactgattaaaaagtgggagaaacaggtcagccaaaagaaaaagcaaaagaatgggaaaaaacatcaaaaaaagaaagttctgaaagttcgaaaatctcaacgttctcgtcaaaagaagactacataagagaccacttcaccaataagtattctgtgttaaaaatgttctattttaattataccgctatcattccaaaggaggatggcatataatacaaaggcttattaatttgactagaaaatttaaaacattactctgaaattgtaactaaagttagaaagttgattttaagaatccaaacgttaagaattgttaaaggctatgattgtctttgttcttctaccacccaccagttgaatttcatcatgcttaaggccatgattttagcaatacccatgtctacacagatgttcacccaaccacatcccactcacaacagctgcctggaagagcagccctaggcttccacgtactgcagcctccagagagtatctgaggcacatgtcagcaagtcctaagcctgttagcatgctggtgagccaagcagtttgaaattgagctggacctcaccaagctgctgtggccatcaacctctgtatttgaatcagcctacaggcctcacacacaatgtgtctgagagattcatgctgattgttattgggtatcaccactggagatcaccagtgtgtggctttcagagcctcctttctggctttggaagccatgtgattccatcttgcccgctcaggctgaccactttatttctttttgttcccctttgcttcattcaagtcagctcttctccatcctaccacaatgcagtgcctttcttctctccagtgcacctgtcatatgctctgatttatctgagtcaactcctttctcatcttgtccccaacaccccacagaagtgctttcttctcccaattcatcctcactcagtccagcttagttcaagtcctgcctcttaaataaacctttttggacacacaaattatcttaaaactcctgtttcacttggttcagtaccacatgggtgaacactcaatggttaactaattcttgggtgtttatcctatctctccaaccagattgtcagctccttgagggcaagagccacagtatatttccctgtttcttccacagtgcctaataatactgtggaactaggttttaataattttttaattgatgttgttatgggcaggatggcaaccagaccattgtctcagagcaggtgctggctctttcctggctactccatgttggctagcctctggtaacctcttacttattatcttcaggacactcactacagggaccagggatgatgcaacatccttgtctttttatgacaggatgtttgctcagcttctccaacaataagaagcacgtggtaaaacacttgcggatattctggactgtttttaaaaaatatacagtttaccgaaaatcatataatcttacaatgaaaaggactttatagatcagccagtgaccaaccttttcccaaccatacaaaaattccttttcccgaaggaaaagggctttctcaataagcctcagctttctaagatctaacaagatagccaccgagatccttatcgaaactcattttaggcaaatatgagttttattgtccgtttacttgtttcagagtttgtattgtgattatcaattaccacaccatctcccatgaagaaagggaacggtgaagtactaagcgctagaggaagcagccaagtcggttagtggaagcatgattggtgcccagttagcctctgcaggatgtggaaacctccttccaggggaggttcagtgaattgtgtaggagaggttgtctgtggccagaatttaaacctatactcactttcccaaattgaatcactgctcacactgctgatgatttagagtgctgtccggtggagatcccacccgaacgtcttatctaatcatgaaactccctagttccttcatgtaacttccctgaaaaatctaagtgtttcataaatttgagagtctgtgacccacttaccttgcatctcacaggtagacagtatataactaacaaccaaagactacatattgtcactgacacacacgttataatcatttatcatatatatacatacatgcatacactctcaaagcaaataatttttcacttcaaaacagtattgacttgtataccttgtaatttgaaatattttctttgttaaaatagaatggtatcaataaatagaccattaatcag

SEQ ID NO: 1010 - protein, 125 aa, Homo sapien
MKKSGVLFLLGIILLVLIGVQGTPVVRKGRCSCISTNQGTIHLQSLKDLKQFAPSPSCEKIEIIATLKNGVQTCLNPDSADVKELIKKWEKQVSQKKKQKNGKKHQKKKVLKVRKSQRSRQKKTT

SEQ ID NO: 1011 - DNA, 2404 bp, Homo sapien
cgaggaacgagtgacagccggacagtccgccgggcggtgatccggggccgctcccgggcgcgccctcggctccaggtcctacccggagccgctgccatgggagagccagccttgggcgctggggaccagccgccgcgcccgcctcggagtcgcggcccgagtcccggcgccagcagccagcccgctgcgtccccttcccgggctgcagggctgcctccgccgcgccgccggcccggattgtgcctgtgatgagccgcagcccgcagcgagctctgcccccgggcgcgctccctcggctgctccaggctgcgcctgcagccgcgccgcgtgccctgctcccgcagtggccccggcgcccaggacgccgctggcccgcgtcccctctcggaatgaaggtgttccgtaggaaggcgctggtgttgtgcgcgggctatgcactgctgctggtgctcactatgctcaacctcctggactacaagtggcacaaggagccgctgcagcagtgcaaccccgatgggccgctgggtgccgcagcgggggcagccggaggcagctgggggcgcccagggccgcctccggccgggccgccccgtgctcatgcccgtttggacctccgcactccttaccgccctcccgctgccgccgtcggggcggctcctgcagccgcggcagggatggcgggggttgcggcccctccaggcaatggcactcggggcaccgggggcgtcggggacaagcggcagctggtgtacgtgttcaccacgtggcgctctggctcgtcgttcttcggcgagctattcaaccagaatcccgaggtgttctttctctacgagccagtgtggcatgtatggcaaaaactgtatccgggggacgccgtttccctgcagggggcagcgcgggacatgctgagcgctctttaccgctgcgacctctctgtcttccagttgtatagccccgcgggcagcggggggcgcaacctcaccacgctgggcatcttcggcgcagccaccaacaaggtggtgtgctcgtcaccactctgccccgcctaccgcaaggaggtcgtggggttggtggacgaccgcgtgtgcaagaagtgcccgccacagcgcctggcgcgtttcgaggaggagtgccgcaagtaccgcacactagtcataaagggtgtgcgcgtcttcgacgtggcggtcttggcgccactgctgcgagacccggccctggacctcaaggtcatccacttggtgcgtgatccccgcgcggtggcgagttcacggatccgctcgcgccacggcctcatccgtgagagcctacaggtggtgcgcagccgagacccgcgagctcaccgcatgcccttcttggaggccgcgggccacaagcttggcgccaagaaggagggcgtgggcggccccgcagactaccacgctctgggcgctatggaggtcatctgcaatagtatggctaagacgctgcagacagccctgcagccccctgactggctgcagggccactacctggtggtgcggtacgaggacctggtgggagaccccgtcaagacactacggagagtgtacgattttgtgggactgttggtgagccccgaaatggagcagtttgccctgaacatgaccagtggctcgggctcctcctccaagcctttcgtggtatctgcacgcaatgccacgcaggccgccaatgcctggcggaccgccctcaccttccagcagatcaaacaggtggaggagttttgctaccagcccatggccgtcctgggctatgagcgggtcaacagccctgaggaggtcaaagacctcagcaagaccctgcttcggaagccccgtctctaaaaggggttcccaggagacctgattccctgtggtgatacctataaagaggatcgtagtgtgtttaaataaacacagtccagactcaaacggaggaagcccacatattctattatagatatataaataatcacacacacacttgctgtcaatgttttgagtcagtgcatttcaaggaacagccacaaaatacacacccctaagaaaaggcaagacttgaacgttctgaccaggtgcccctcttcttctttgccttctcttgtcctctttctcctatttcttaccctgtcctccacctgccttccattttgaagtgggatgttaatgaaatcaagttccagtaacccaaatcttgtttacaaaatattcgtggtatctgtgaacatgttaagagtaatttggatgtgggggtgggggtggagaaaggggaagtggtccagaaacaaaaagccccattgggcatgataagccgaggaggcattcttctaaagcagacttttgtgtaaaaagcaaaggttacatgtgagtattaataaagaagataataaataaaaaaaaaaaaaaaa

SEQ ID NO: 1012 - protein, 530 aa, Homo sapien
MSRSPQRALPPGALPRLLQAAPAAAPRALLPQWPRRPGRRWPASPLGMKVFRRKALVLCAGYALLLVLTMLNLLDYKWHKEPLQQCNPDGPLGAAAGAAGGSWGRPGPPPAGPPRAHARLDLRTPYRPPAAAVGAAPAAAAGMAGVAAPPGNGTRGTGGVGDKRQLVYVFTTWRSGSSFFGELFNQNPEVFFLYEPVWHVWQKLYPGDAVSLQGAARDMLSALYRCDLSVFQLYSPAGSGGRNLTTLGIFGAATNKVVCSSPLCPAYRKEVVGLVDDRVCKKCPPQRLARFEEECRKYRTLVIKGVRVFDVAVLAPLLRDPALDLKVIHLVRDPRAVASSRIRSRHGLIRESLQVVRSRDPRAHRMPFLEAAGHKLGAKKEGVGGPADYHALGAMEVICNSMAKTLQTALQPPDWLQGHYLVVRYEDLVGDPVKTLRRVYDFVGLLVSPEMEQFALNMTSGSGSSSKPFVVSARNATQAANAWRTALTFQQIKQVEEFCYQPMAVLGYERVNSPEEVKDLSKTLLRKPRL

SEQ ID NO: 1013 - DNA, 1610 bp, Homo sapien
ggcacgaggctgcggccgcagtagccggagccggagccgcagccaccggtgccttcctttcccgccgccgcccagccgccgtccggcctccctcgggcccgagcgcagaccaggctccagccgcgcggcgccggcagcctcgcgctccctctcgggtctctctcgggcctcgggcaccgcgtcctgtgggcggccgcctgcctgcccgcccgcccgcagccccttgcctgccggcccctgggcggcccgtgccatgggcaccgacagccgcgcggccaaggcgctcctggcgcgggcccgcaccctgcacctgcagacggggaacctgctgaactggggccgcctgcggaagaagtgcccgtccacgcacagcgaggagcttcatgattgtatccaaaaaaccttgaatgaatggagttcccaaatcaacccagatttggtcagggagtttccagatgtcttggaatgcactgtatctcatgcagtagaaaagataaatcctgatgaaagagaagaaatgaaagtttctgcaaaactgttcattgtagaatcaaactcttcatcatcaactagaagtgcagttgacatggcctgttcagtccttggagttgcacagctggattctgtgatcattgcttcacctcctattgaagatggagttaatctttccttggagcatttacagccttactgggaggaattagaaaacttagttcagagcaaaaagattgttgccataggtacctctgatctagacaaaacacagttggaacagctgtatcagtgggcacaggtaaaaccaaatagtaaccaagttaatcttgcctcctgctgtgtgatgccaccagatttgactgcatttgctaaacaatttgacatacagctgttgactcacaatgatccaaaagaactgctttctgaagcaagtttccaagaagctcttcaggaaagcattcctgacattcaagcgcacgagtgggtgccgctgtggctactgcggtattcggtcattgtgaaaagtagaggaattatcaaatcaaaaggctacattttacaagctaaaagaaggggttcttaactgacttaggagcataacttacctgtaatttccttcaatatgagagaaaattgagatgtgtaaaatctagttactgcctgtaaatggtgtcattgaggcagatattctttcgtcatatttgacagtatgttgtctgtcaagttttaaatacttatcttgcctccatatcaatccattctcatgaacctctgtattgctttccttaaactattgttttctaattgaaattgtctataaagaaaatacttgcaatatatttttcctttatttttatgactaatataaatcaagaaaatttgttgttagatatattttggcctaggtatcagggtaatgtatatacatattttttatttccaaaaaaaattcattaattgcttcttaactcttattataaccaagcaatttaattacaattgttaaaactgaaatactggaagaagatatttttcctgtcattgatgagatatatcagagtaactggagtagctgggatttactagtagtgtaaataaaattcactcttcaatac

SEQ ID NO: 1014 - protein, 274 aa, Homo sapien
MGTDSRAAKALLARARTLHLQTGNLLNWGRLRKKCPSTHSEELHDCIQKTLNEWSSQINPDLVREFPDVLECTVSHAVEKINPDEREEMKVSAKLFIVESNSSSSTRSAVDMACSVLGVAQLDSVIIASPPIEDGVNLSLEHLQPYWEELENLVQSKKIVAIGTSDLDKTQLEQLYQWAQVKPNSNQVNLASCCVMPPDLTAFAKQFDIQLLTHNDPKELLSEASFQEALQESIPDIQAHEWVPLWLLRYSVIVKSRGIIKSKGYILQAKRRGS

SEQ ID NO: 1015 - DNA, 1052 bp, Homo sapien
gctcgaatgcccggcagccgtggcggctagagcgttcctccccagctcgaatgcccggcggccgaggcggctagagcgtcgcctcctcccggggaaccgcgtgtgaccttccagcccgcggaccgatgctgccggcggccgctcgccccctgtgggggccttgccttgggcttcgggccgctgcgttccgccttgccaggcgacaggtgccatgtgtctgtgccgtgcgacatatgaggagcagcggccatcagaggtgtgaggccctcgctggtgcacccctggataacgcccccaaggagtacccccccaagatacagcagctggtccaggacatcgccagcctcactctcttggaaatctcagacctcaacgagctcctgaagaaaacgttgaagatccaggatgtcgggcttgtgccgatgggtggtgtgatgtctggggctgtccctgctgcagcagcccaggaggcggtggaagaagatatccccatagcgaaagaacggacacatttcaccgtccgcctgaccgaggcgaagcccgtggacaaagtgaagctgatcaaggaaatcaagaactacatccaaggcatcaacctcgtccaggcaaagaagctggtggagtccctgccccaggaaatcaaagccaatgtcgccaaagctgaggcggagaagatcaaggcggccctggaggcggtgggcggcaccgtggttctggagtagcctccagctcggaggacttgtgttcaggggtcctgggccccgggcgaggtcccgccctcccgtggtcactggctccgcccccagcaccaggcgcccagtggagccgtttgggagaattgcctgcgccacgcagcggggccggacaggccgcacagacctactgtggcgggagggaggggcggctgctgcctggtgacggcacccggaggcccaccaggacgcgccaccggtgaatgtgcctctggtggctgctgagaaaaatacactgtgcagctcagaaaaaaaaaaaaaaaaaaaaaaaaaaaaaaaaaaaaaaaaaaaaaaaaaaaa

SEQ ID NO: 1016 - protein, 198 aa, Homo sapien [sequence omitted]

SEQ ID NO: 1017 - DNA, 3547 bp, Homo sapien
gcactcgcccggctcgcccgctttcgcacccagttcacgcgccacagctatgtgtccccgagccgcgcgggcgcccgcgacgctactcctcgccctgggcgcggtgctgtggcctgcggctggcgcctgggagcttacgattttgcacaccaacgacgtgcacagccggctggagcagaccagcgaggactccagcaagtgcgtcaacgccagccgctgcatgggtggcgtggctcggctcttcaccaaggttcagcagatccgccgcgccgaacccaacgtgctgctgctggacgccggcgaccagtaccagggcactatctggttcaccgtgtacaagggcgccgaggtggcgcacttcatgaacgccctgcgctacgatgccatggcactgggaaatcatgaatttgataatggtgtggaaggactgatcgagccactcctcaaagaggccaaatttccaattctgagtgcaaacattaaagcaaaggggccactagcatctcaaatatcaggactttatttgccatataaagttcttcctgttggtgatgaagttgtgggaatcgttggatacacttccaaagaaaccccttttctctcaaatccagggacaaatttagtgtttgaagatgaaatcactgcattacaacctgaagtagataagttaaaaactctaaatgtgaacaaaattattgcactgggacattcgggttttgaaatggataaactcatcgctcagaaagtgaggggtgtggacgtcgtggtgggaggacactccaacacatttctttacacaggcaatccaccttccaaagaggtgcctgctgggaagtacccattcatagtcacttctgatgatgggcggaaggttcctgtagtccaggcctatgcttttggcaaatacctaggctatctgaagatcgagtttgatgaaagaggaaacgtcatctcttcccatggaaatcccattcttctaaacagcagcattcctgaagatccaagcataaaagcagacattaacaaatggaggataaaattggataattattctacccaggaattagggaaaacaattgtctatctggatggctcctctcaatcatgccgctttagagaatgcaacatgggcaacctgatttgtgatgcaatgattaacaacaacctgagacacacggatgaaatgttctggaaccacgtatccatgtgcattttaaatggaggtggtatccggtcgcccattgatgaacgcaacaatggcacaattacctgggagaacctggctgctgtattgccctttggaggcacatttgacctagtccagttaaaaggttccaccctgaagaaggcctttgagcatagcgtgcaccgctacggccagtccactggagagttcctgcaggtgggcggaatccatgtggtgtatgatctttcccgaaaacctggagacagagtagtcaaattagatgttctttgcaccaagtgtcgagtgcccagttatgaccctctcaaaatggacgaggtatataaggtgatcctcccaaacttcctggccaatggtggagatgggttccagatgataaaagatgaattattaagacatgactctggtgaccaagatatcaacgtggtttctacatatatctccaaaatgaaagtaatttatccagcagttgaaggtcggatcaagttttccacaggaagtcactgccatggaagcttttctttaatatttctttcactttgggcagtgatctttgttttataccaatagccaaaaattctccttgcctttaatgtgtgaaactgcattttttcaagtgagattcaaatctgccttttaggacctggctttgtgacagcaaaaaccatctttacaggctcctagaagctgaaggttagagcattataaaatgaagagacagacatgattactcagggtcagcaacctagtgagttagaaaaaaaattaacatagggccctataaggagaaagccaactatgttaagtttacgtgtccaaattttaatgaaattttactaacaattttaaaccatatttttcttcttcatatccatttctaatccatcaaacagcttatgtttacataaaattttatcattcacaaggaagttttaagcacactgtctcatttgatatccacaacttatttttggtaggaaagagagatgtttttcccacctgtcagatgaaaaaactgaagctcaaaaagggttgacttgaccatacagctaatgctgacagatccaagacctagacctaggtcttttgaactcaagtccagcattctcaactatatcaagttactgttcagaatacttaatatctcctctcttcataattatcaatagccccaagctcatggatgacaaatctctgctttatttcttgtctctattttttcactttatagctcctgttataatagcaagtttaatggtataaacacaggataccatcctctcttgcaacacccatgtgcctttgatgagtcaggtagcaagctgtagtagataatgagaaaggccagaggctgcaaagacagtcaaaggacacgagagaaaggaaggggaagaacaggactccaggactgttttatattatagaaaagcaagagctaaagagcatttacacatgttaaacagatacttgttaagcatagtgcctgacacacggcattagctgttattttatgagattccatcagctctgcctctgtcctctttcttctaacatgaaggtatcatgagaagagaaccttctaacataagctgtaattctaaacctgcacttgtccctctccagcaagaggctagcactgaattcattctactcatactacacacccagttatggaatgtccagagttctcgaagaaaataaatgactttaggaagaggtatacattttttaagtcgctctgcctccaaatctgaacagtcactgtaaatcattcttaagcccagatatgagaacttctgctggaaagtgggaccctctgagtgggtggtcagaaaatacccatgctgatgaaatgacctatgcccaaagaacaaatacttaacgtgggagtggaaccacatgagcctgctcagctctgcataagtaattcaagaaatgggaggcttcaccttaaaaacagtgtgcaaatggcagctagaggttttgataggaagtatgtttgtttcttagtgtttacaaatattaagtactcttgatacaaaatatacttttaaacttcataacctttttataaaagttgttgcagcaaaataatagcctcggttctatgcatatatggattgctataaaaaatgtcaataagattgtacaaggaaaattagagaaagtcacatttagggtttattttttacacttggccagtaaaatagggtaaatcctattagaaattttttaaagaactttttttaagtttcctaaatctgtgtgtgtattgtgaagtggtataagaaatgactttgaaccactttgcaattgtagattcccaacaataaaattgaagat

SEQ ID NO: 1018 - protein, 574 aa, Homo sapien
MCPRAARAPATLLLALGAVLWPAAGAWELTILHTNDVHSRLEQTSEDSSKCVNASRCMGGVARLFTKVQQIRRAEPNVLLLDAGDQYQGTIWFTVYKGAEVAHFMNALRYDAMALGNHEFDNGVEGLIEPLLKEAKFPILSANIKAKGPLASQISGLYLPYKVLPVGDEVVGIVGYTSKETPFLSNPGTNLVFEDEITALQPEVDKLKTLNVNKIIALGHSGFEMDKLIAQKVRGVDVVVGGHSNTFLYTGNPPSKEVPAGKYPFIVTSDDGRKVPVVQAYAFGKYLGYLKIEFDERGNVISSHGNPILLNSSIPEDPSIKADINKWRIKLDNYSTQELGKTIVYLDGSSQSCRFRECNMGNLICDAMINNNLRHTDEMFWNHVSMCILNGGGIRSPIDERNNGTITWENLAAVLPFGGTFDLVQLKGSTLKKAFEHSVHRYGQSTGEFLQVGGIHVVYDLSRKPGDRVVKLDVLCTKCRVPSYDPLKMDEVYKVILPNFLANGGDGFQMIKDELLRHDSGDQDINVVSTYISKMKVIYPAVEGRIKFSTGSHCHGSFSLIFLSLWAVIFVLYQ

SEQ ID NO: 1019 - DNA, 1886 bp, Homo sapien
gcggagctctgccttggagattctcagtgctgcggatcatgtccctaaggggcagcctctcgcgtctcctccagacgcgagtgcattccatcctgaagaaatccgtccactccgtggctgtgataggagccccgttctcacaagggcagaaaagaaaaggagtggagcatggtcccgctgccataagagaagctggcttgatgaaaaggctctccagtttgggctgccacctaaaagactttggagatttgagttttactccagtccccaaagatgatctctacaacaacctgatagtgaatccacgctcagtgggtcttgccaaccaggaactggctgaggtggttagcagagctgtgtcagatggctacagctgtgtcacactgggaggagaccacagcctggcaatcggtaccattagtggccatgcccgacactgcccagacctttgtgttgtctgggttgatgcccatgctgacatcaacacaccccttaccacttcatcaggaaatctccatggacagccagtttcatttctcctcagagaactacaggataaggtaccacaactcccaggattttcctggatcaaaccttgtatctcttctgcaagtattgtgtatattggtctgagagacgtggaccctcctgaacattttattttaaagaactatgatatccagtatttttccatgagagatattgatcgacttggtatccagaaggtcatggaacgaacatttgatctgctgattggcaagagacaaagaccaatccatttgagttttgatattgatgcatttgaccctacactggctccagccacaggaactcctgttgtcgggggactaacctatcgagaaggcatgtatattgctgaggaaatacacaatacagggttgctatcagcactggatcttgttgaagtcaatcctcagttggccacctcagaggaagaggcgaagactacagctaacctggcagtagatgtgattgcttcaagctttggtcagacaagagaaggagggcatattgtctatgaccaacttcctactcccagttcaccagatgaatcagaaaatcaagcacgtgtgagaatttaggagacactgtgcactgacatgtttcacaacaggcattccagaattatgaggcattgaggggatagatgaatactaaatggttgtctgggtcaatactgccttaatgagaacatttacacattctcacaattgtaaagtttcccctctattttggtgaccaatactactgtaaatgtatttggttttttgcagttcacagggtattaatatgctacagtactatgtaaatttaaagaagtcataaacagcatttattaccttggtatatcatactggtcttgttgctgttgttccttcacatttaagtggtttttcatctttcctccctcctcccacagcctggctatacagtgcatccttgaactgtcagcccacagcagcaatatgcttattctatccacatccctaacatcatgcattcacaaggtcaaagttctggtccacaaacccttccctatagaagttcaatggctgcgaaagaatttgtagtaaaccaggcctcccaggatggcgagctccagtaagatgataatggaaagcagcagcttgttggttgtcactctacaaagagaagcaaagtggggagtagtcagaagtttggataaccttccttctaaacatttgggggttagacctgggaccacggctggatactctgaggctgtatgtttgatcacacagccacttagcaggaagtactcataaggttctttagctgtcacttagggataacactgtctacctcacagaaatgttaaactgagacaataaaacccaaagcat

SEQ ID NO: 1020 - protein, 354 aa, Homo sapien
MSLRGSLSRLLQTRVHSILKKSVHSVAVIGAPFSQGQKRKGVEHGPAAIREAGLMKRLSSLGCHLKDFGDLSFTPVPKDDLYNNLIVNPRSVGLANQELAEVVSRAVSDGYSCVTLGGDHSLAIGTISGHARHCPDLCVVWVDAHADINTPLTTSSGNLHGQPVSFLLRELQDKVPQLPGFSWIKPCISSASIVYIGLRDVDPPEHFILKNYDIQYFSMRDIDRLGIQKVMERTFDLLIGKRQRPIHLSFDIDAFDPTLAPATGTPVVGGLTYREGMYIAEEIHNTGLLSALDLVEVNPQLATSEEEAKTTANLAVDVIASSFGQTREGGHIVYDQLPTPSSPDESENQARVRI

SEQ ID NO: 1021 - DNA, 1886 bp, Homo sapien; identical to SEQ ID NO: 1019

SEQ ID NO: 1022 - protein, 354 aa, Homo sapien; identical to SEQ ID NO: 1020

SEQ ID NO: 1023 - DNA, 1295 bp, Homo sapien
cacgtcagccggggctagaaaaggcggcggggctgggcccagcgaggtgacagcctcgcttggacgcagagcccggcccgacgccgccatgagcgccgcgctcttcagcctggacggcccggcgcgcggcgcgccctggcctgcggagcctgcgcccttctacgaaccgggccgggcgggcaagccgggccgcggggccgagccaggggccctaggcgagccaggcgccgccgcccccgccatgtacgacgacgagagcgccatcgacttcagcgcctacatcgactccatggccgccgtgcccaccctggagctgtgccacgacgagctcttcgccgacctcttcaacagcaatcacaaggcgggcggcgcggggcccctggagcttcttcccggcggccccgcgcgccccttgggcccgggccctgccgctccccgcctgctcaagcgcgagcccgactggggcgacggcgacgcgcccggctcgctgttgcccgcgcaggtggccgcgtgcgcacagaccgtggtgagcttggcggccgcagggcagcccaccccgcccacgtcgccggagccgccgcgcagcagccccaggcagacccccgcgcccggccccgcccgggagaagagcgccggcaagaggggcccggaccgcggcagccccgagtaccggcagcggcgcgagcgcaacaacatcgccgtgcgcaagagccgcgacaaggccaagcggcgcaaccaggagatgcagcagaagttggtggagctgtcggctgagaacgagaagctgcaccagcgcgtggagcagctcacgcgggacctggccggcctccggcagttcttcaagcagctgcccagcccgcccttcctgccggccgccgggacagcagactgccggtaacgcgcggccggggcgggagagactcagcaacgacccatacctcagacccgacggcccggagcggagcgcgccctgccctggcgcagccagagccgccgggtgcccgctgcagtttcttgggacataggagcgcaaagaagctacagcctggacttaccaccactaaactgcgagagaagctaaacgtgtttattttcccttaaattatttttgtaatggtagctttttctacatcttactcctgttgatgcagctaaggtacatttgtaaaaagaaaaaaaaccagacttttcagacaaaccctttgtattgtagataagaggaaaagactgagcatgctcacttttttatattaatttttacagtatttgtaagaataaagcagcatttgaaatcg

SEQ ID NO: 1024 - protein, 269 aa, Homo sapien
MSAALFSLDGPARGAPWPAEPAPFYEPGRAGKPGRGAEPGALGEPGAAAPAMYDDESAIDFSAYIDSMAAVPTLELCHDELFADLFNSNHKAGGAGPLELLPGGPARPLGPGPAAPRLLKREPDWGDGDAPGSLLPAQVAACAQTVVSLAAAGQPTPPTSPEPPRSSPRQTPAPGPAREKSAGKRGPDRGSPEYRQRRERNNIAVRKSRDKAKRRNQEMQQKLVELSAENEKLHQRVEQLTRDLAGLRQFFKQLPSPPFLPAAGTADCR

SEQ ID NO: 1025 - DNA, 3342 bp, Homo sapien
gcagctccagtcccggacgcaaccccggagccgtctcaggtccctggggggaacggtgggttagacggggacgggaagggacagcggccttcgaccgccccccgagtaattgacccaggactcattttcaggaaagcctgaaaatgagtaaaatagtgaaatgaggaatttgaacattttatctttggatggggatcttctgaggatgcaaagagtgattcatccaagccatgtggtaaaatcaggaatttgaagaaaatggagatgtttacatttttgttgacgtgtatttttctacccctcctaagagggcacagtctcttcacctgtgaaccaattactgttcccagatgtatgaaaatggcctacaacatgacgtttttccctaatctgatgggtcattatgaccagagtattgccgcggtggaaatggagcattttcttcctctcgcaaatctggaatgttcaccaaacattgaaactttcctctgcaaagcatttgtaccaacctgcatagaacaaattcatgtggttccaccttgtcgtaaactttgtgagaaagtatattctgattgcaaaaaattaattgacacttttgggatccgatggcctgaggagcttgaatgtgacagattacaatactgtgatgagactgttcctgtaacttttgatccacacacagaatttcttggtcctcagaagaaaacagaacaagtccaaagagacattggattttggtgtccaaggcatcttaagacttctgggggacaaggatataagtttctgggaattgaccagtgtgcgcctccatgccccaacatgtattttaaaagtgatgagctagagtttgcaaaaagttttattggaacagtttcaatattttgtctttgtgcaactctgttcacattccttacttttttaattgatgttagaagattcagatacccagagagaccaattatatattactctgtctgttacagcattgtatctcttatgtacttcattggatttttgctgggcgatagcacagcctgcaataaggcagatgagaagctagaacttggtgacactgttgtcctaggctctcaaaataaggcttgcaccgttttgttcatgcttttgtattttttcacaatggctggcactgtgtggtgggtgattcttaccattacttggttcttagctgcaggaagaaaatggagttgtgaagccatcgagcaaaaagcagtgtggtttcatgctgttgcatggggaacaccaggtttcctgactgttatgcttcttgctctgaacaaagttgaaggagacaacattagtggagtttgctttgttggcctttatgacctggatgcttctcgctactttgtactcttgccactgtgcctttgtgtgtttgttgggctctctcttcttttagctggcattatttccttaaatcatgttcgacaagtcatacaacatgatggccggaaccaagaaaaactaaagaaatttatgattcgaattggagtcttcagcggcttgtatcttgtgccattagtgacacttctcggatgttacgtctatgagcaagtgaacaggattacctgggagataacttgggtctctgatcattgtcgtcagtaccatatcccatgtccttatcaggcaaaagcaaaagctcgaccagaattggctttatttatgataaaatacctgatgacattaattgttggcatctctgctgtcttctgggttggaagcaaaaagacatgcacagaatgggctgggttttttaaacgaaatcgcaagagagatccaatcagtgaaagtcgaagagtactacaggaatcatgtgagtttttcttaaagcacaattctaaagttaaacacaaaaagaagcactataaaccaagttcacacaagctgaaggtcatttccaaatccatgggaaccagcacaggagctacagcaaatcatggcacttctgcagtagcaattactagccatgattacctaggacaagaaactttgacagaaatccaaacctcaccagaaacatcaatgagagaggtgaaagcggacggagctagcacccccaggttaagagaacaggactgtggtgaacctgcctcgccagcagcatccatctccagactctctggggaacaggtcgacgggaagggccaggcaggcagtgtatctgaaagtgcgcggagtgaaggaaggattagtccaaagagtgatattactgacactggcctggcacagagcaacaatttgcaggtccccagttcttcagaaccaagcagcctcaaaggttccacatctctgcttgttcacccagtttcaggagtgagaaaagagcagggaggtggttgtcattcagatacttgaagaacattttctctcgttactcagaagcaaatttgtgttacactggaagtgacctatgcactgttttgtaagaatcactgttacgttcttcttttgcacttaaagttgcattgcctactgttatactggaaaaaatagagttcaagaataatatgactcatttcacacaaaggttaatgacaacaatatacctgaaaacagaaatgtgcaggttaataatatttttttaatagtgtgggaggacagagttagaggaatcttccttttctatttatgaagattctactcttggtaagagtattttaagatgtactatgctattttacctttttgatataaaatcaagatatttctttgctgaagtatttaaatcttatccttgtatctttttatacatatttgaaaataagcttatatgtatttgaacttttttgaaatcctattcaagtatttttatcatgctattgtgatattttagcactttggtagcttttacactgaatttctaagaaaattgtaaaatagtcttcttttatactgtaaaaaaagatataccaaaaagtcttataataggaatttaactttaaaaacccacttattgataccttaccatctaaaatgtgtgatttttatagtctcgttttaggaatttcacagatctaaattatgtaactgaaataaggtgcttactcaaagagtgtccactattgattgtattatgctgctcactgatccttctgcatatttaaaataaaatgtcctaaagggttagtagacaaaatgttagtcttttgtatattaggccaagtgcaattgacttcccttttttaatgtttcatgaccacccattgattgtattataaccacttacagttgcttatattttttgttttaacttttgtttcttaacatttagaatattacattttgtattatacagtacctttctcagacattttgtag

SEQ ID NO: 1026 - protein, 706 aa, Homo sapien
MEMFTFLLTCIFLPLLRGHSLFTCEPITVPRCMKMAYNMTFFPNLMGHYDQSIAAVEMEHFLPLANLECSPNIETFLCKAFVPTCIEQIHVVPPCRKLCEKVYSDCKKLIDTFGIRWPEELECDRLQYCDETVPVTFDPHTEFLGPQKKTEQVQRDIGFWCPRHLKTSGGQGYKFLGIDQCAPPCPNMYFKSDELEFAKSFIGTVSIFCLCATLFTFLTFLIDVRRFRYPERPIIYYSVCYSIVSLMYFIGFLLGDSTACNKADEKLELGDTVVLGSQNKACTVLFMLLYFFTMAGTVWWVILTITWFLAAGRKWSCEAIEQKAVWFHAVAWGTPGFLTVMLLALNKVEGDNISGVCFVGLYDLDASRYFVLLPLCLCVFVGLSLLLAGIISLNHVRQVIQHDGRNQEKLKKFMIRIGVFSGLYLVPLVTLLGCYVYEQVNRITWEITWVSDHCRQYHIPCPYQAKAKARPELALFMIKYLMTLIVGISAVFWVGSKKTCTEWAGFFKRNRKRDPISESRRVLQESCEFFLKHNSKVKHKKKHYKPSSHKLKVISKSMGTSTGATANHGTSAVAITSHDYLGQETLTEIQTSPETSMREVKADGASTPRLREQDCGEPASPAASISRLSGEQVDGKGQAGSVSESARSEGRISPKSDITDTGLAQSNNLQVPSSSEPSSLKGSTSLLVHPVSGVRKEQGGGCHSDT

SEQ ID NO: 1027 - DNA, 2682 bp, Homo sapien
agcgggctgtgcctcagtcagtggcgccgaaggctccgttaagcggcggcggcggttcctgtttccgtttcttcctctccgttcggtcgggagtagcatcctccactcagccacccttcccactcccccatcgtggggcagctgcggctgagggctgtggctttggcagctgcgacggggagcggcggagaccgcctctgctcccgcctggggttgctgcttttgctcagaggacatccatgaccctaatggtctttttgttcaagataaagtgattttttgcctttgttgattaactggacaaattcaggataccagaaggccctattgatcaggggccagctataggaagagtacgcgttttagaagagcagcttgttaaggccaaagaacagattgaaaattacaagaaacagaccagaaatggtctggggaaggatcatgaaatcctgaggaggaggattgaaaatggagctaaagagctctggtttttcctacagagtgaattgaagaaattaaagaacttagaaggaaatgaactccaaagacatgcagatgaatttcttttggatttaggacatcatgaaaggattctgatggcaattactgtctcattagtgaacaataaaagaaaaattgttgtattagcacaacctactactgtgaagaggaaaagaattaccccatacaagtctataatgacggatctatactacctcagtcagacagatggagcaggtgattggcgggaaaaagaggccaaagatctgacagaactggttcagcggagaataacatatcttcagaatcccaaggactgcagcaaagccaaaaagctggtgtgtaatatcaacaaaggctgtggctatggctgtcagctccatcatgtggtctactgcttcatgattgcatatggcacccagcgaacactcatcttggaatctcagaattggcgctatgctactggtggatgggagactgtatttaggcctgtaagtgagacatgcacagacagatctggcatctccactggacactggtcaggtgaagtgaaggacaaaaatgttcaagtggtcgagtttcccattgtagacagtcttcatccccgtcctccatatttacccttggctgtaccagaagacctcgcagatcgacttgtacgagtgcatggtgaccctgcagtgtggtgggtgtctcagtttgtcaaatacttgatccgcccacagccttggctagaaaaagaaatagaagaagccaccaagaagcttggcttcaaacatccagttattggagtccatgtcagacgcacagacaaagtgggaacagaagctgccttccatcccattgaagagtacatggtgcatgttgaagaacattttcagcttcttgcacgcagaatgcaagtggacaaaaaaagagtgtatttggccacagatgacccttctttattaaaggaggcaaaaacaaagtaccccaattatgaatttattagtgataactctatttcctggtcagctggactgcacaatcgatacacagaaaattcacttcgtggagtgatcctggatatacattttctctctcaggcagacttcctagtgtgtactttttcatcccaggtctgtcgagttgcttatgaaattatgcaaacactacatcctgatgcctctgcaaacttccattctttagatgacatctactattttgggggccagaatgcccacaatcaaattgccatttatgctcaccaaccccgaactgcagatgaaattcccatggaacctggagatatcattggtgtggctggaaatcattgggatggctattctaaaggtgtcaacaggaaattgggaaggacgggcctatatccctcctacaaagttcgagagaagatagaaacggtcaagtaccccacatatcctgaggctgagaaataaagctcagatggaagagataaacgaccaaactcagttcgaccaaactcagttcaaaccatttgagccaaactgtagatgaagagggctctgatctaacaaaataaggttatatgagtagatactctcagcaccaagagcagctgggaactgacataggcttcaattggtggaattcctctttaacaagggctgcaatgccctcatacccatgcacagtacaataatgtactcacatataacatgcaaacaggttgttttctactttgcccctttcagtatgtccccataagacaaacactgccatattgtgtaatttaagtgacacagacattttgtgtgagacttaaaacatggtgcctatatctgagagacctgtgtgaactattgagaagatcggaacagctccttactctgaggaagttgattcttatttgatggtggtattgtgaccactgaattcactccagtcaacagattcagaatgagaatggacgtttggtttttttttgtttttgtttttgttttttcctttataaggttgtctgttttttttttttaaataattgcatcagttcattgacctcatcattaataagtgaagaatacatcagaaaataaaatattccctctccattagaaaattttgtaaaacaatgccatgaacaaattctttagtactcaatgtttctggacattctctttgataacaaaaaataaattttaaaaaggaagaaaaaaaaaaaaa

SEQ ID NO: 1028 - protein, 446 aa, Homo sapien
MAITVSLVNNKRKIVVLAQPTTVKRKRITPYKSIMTDLYYLSQTDGAGDWREKEAKDLTELVQRRITYLQNPKDCSKAKKLVCNINKGCGYGCQLHHVVYCFMIAYGTQRTLILESQNWRYATGGWETVFRPVSETCTDRSGISTGHWSGEVKDKNVQVVEFPIVDSLHPRPPYLPLAVPEDLADRLVRVHGDPAVWWVSQFVKYLIRPQPWLEKEIEEATKKLGFKHPVIGVHVRRTDKVGTEAAFHPIEEYMVHVEEHFQLLARRMQVDKKRVYLATDDPSLLKEAKTKYPNYEFISDNSISWSAGLHNRYTENSLRGVILDIHFLSQADFLVCTFSSQVCRVAYEIMQTLHPDASANFHSLDDIYYFGGQNAHNQIAIYAHQPRTADEIPMEPGDIIGVAGNHWDGYSKGVNRKLGRTGLYPSYKVREKIETVKYPTYPEAEK

SEQ ID NO: 1029 - DNA, 3592 bp, Homo sapien
ggcggggggcgcacagagccagaggggcttgcgagcggcggctgagggaccgcggggagggggcgccgagcggctccagcgcagagactctcactgcacgccggaggccccttcctcgctccgcccgcgcgaccgcgcgccccagtcccgccccgccccgctaaccgccccagacacagcgctcgccgagggtcgcttggaccctgatcttacccgtgggcaccctgcgctctgcctgccgcgaagaccggctccccgacccgcagaagtcaggagagagggtgaagcggagcagcccgaggcggggcagcctcccggagcagcgccgcgcagagcccgggacaatggggccgcggcggctgctgctggtggccgcctgcttcagtctgtgcggcccgctgttgtctgcccgcacccgggcccgcaggccagaatcaaaagcaacaaatgccaccttagatccccggtcatttcttctcaggaaccccaatgataaatatgaaccattttgggaggatgaggagaaaaatgaaagtgggttaactgaatacagattagtctccatcaataaaagcagtcctcttcaaaaacaacttcctgcattcatctcagaagatgcctccggatatttgaccagctcctggctgacactctttgtcccatctgtgtacaccggagtgtttgtagtcagcctcccactaaacatcatggccatcgttgtgttcatcctgaaaatgaaggtcaagaagccggcggtggtgtacatgctgcacctggccacggcagatgtgctgtttgtgtctgtgctcccctttaagatcagctattacttttccggcagtgattggcagtttgggtctgaattgtgtcgcttcgtcactgcagcattttactgtaacatgtacgcctctatcttgctcatgacagtcataagcattgaccggtttctggctgtggtgtatcccatgcagtccctctcctggcgtactctgggaagggcttccttcacttgtctggccatctgggctttggccatcgcaggggtagtgcctctcgtcctcaaggagcaaaccatccaggtgcccgggctcaacatcactacctgtcatgatgtgctcaatgaaaccctgctcgaaggctactatgcctactacttctcagccttctctgctgtcttcttttttgtgccgctgatcatttccacggtctgttatgtgtctatcattcgatgtcttagctcttccgcagttgccaaccgcagcaagaagtcccgggctttgttcctgtcagctgctgttttctgcatcttcatcatttgcttcggacccacaaacgtcctcctgattgcgcattactcattcctttctcacacttccaccacagaggctgcctactttgcctacctcctctgtgtctgtgtcagcagcataagctcgtgcatcgaccccctaatttactattacgcttcctctgagtgccagaggtacgtctacagtatcttatgctgcaaagaaagttccgatcccagcagttataacagcagtgggcagttgatggcaagtaaaatggatacctgctctagtaacctgaataacagcatatacaaaaagctgttaacttaggaaaagggactgctgggaggttaaaaagaaaagtttataaaagtgaataacctgaggattctattagtccccacccaaactttattgattcacctcctaaaacaacagatgtacgacttgcatacctgctttttatgggagctgtcaagcatgtatttttgtcaattaccagaaagataacaggacgagatgacggtgttattccaagggaatattgccaatgctacagtaataaatgaatgtcacttctggatatagctaggtgacatatacatacttacatgtgtgtatatgtagatgtatgcacacacatatattatttgcagtgcagtatagaataggcactttaaaacactctttccccgcaccccagcaattatgaaaataatctctgattccctgatttaatatgcaaagtctaggttggtagagtttagccctgaacatttcatggtgttcatcaacagtgagagactccatagtttgggcttgtaccacttttgcaaataagtgtattttgaaattgtttgacggcaaggtttaagttattaagaggtaagacttagtactatctgtgcgtagaagttctagtgttttcaattttaaacatatccaagtttgaattcctaaaattatggaaacagatgaaaagcctctgttttgatatgggtagtattttttacattttacacactgtacacataagccaaaactgagcataagtcctctagtgaatgtaggctggctttcagagtaggctattcctgagagctgcatgtgtccgcccccgatggaggactccaggcagcagacacatgccagggccatgtcagacacagattggccagaaaccttcctgctgagcctcacagcagtgagactggggccactacatttgctccatcctcctgggattggctgtgaactgatcatgtttatgagaaactggcaaagcagaatgtgatatcctaggaggtaatgaccatgaaagacttctctacccatcttaaaaacaacgaaagaaggcatggacttctggatgcccatccactgggtgtaaacacatctagtagttgttctgaaatgtcagttctgatatggaagcacccattatgcgctgtggccactccaataggtgctgagtgtacagagtggaataagacagagacctgccctcaagagcaaagtagatcatgcatagagtgtgatgtatgtgtaataaatatgtttcacacaaacaaggcctgtcagctaaagaagtttgaacatttgggttactatttcttgtggttataacttaatgaaaacaatgcagtacaggacatatattttttaaaataagtctgatttaattgggcactatttatttacaaatgttttgctcaatagattgctcaaatcaggttttcttttaagaatcaatcatgtcagtctgcttagaaataacagaagaaaatagaattgacattgaaatctaggaaaattattctataatttccatttacttaagacttaatgagactttaaaagcattttttaacctcctaagtatcaagtatagaaaatcttcatggaattcacaaagtaatttggaaattaggttgaaacatatctcttatcttacgaaaaaatggtagcattttaaacaaaatagaaagttgcaaggcaaatgtttatttaaaagagcaggccaggcgcggtggctcacgcctgtaatcccagcactttgggaggctgaggcgggtggatcacgaggtcaggagatcgagaccatcctggctaacacggtgaaacccgtctctactaaaaatgcaaaaaaaattagccgggcgtggtggcaggcacctgtagtcccagctactcgggaggctgaggcaggagactggcgtgaacccaggaggcggaccttgtagtgagccgagatcgcgccactgtgctccagcctgggcaacagagcaagactccatctc

SEQ ID NO: 1030 - protein, 425 aa, Homo sapien
MGPRRLLLVAACFSLCGPLLSARTRARRPESKATNATLDPRSFLLRNPNDKYEPFWEDEEKNESGLTEYRLVSINKSSPLQKQLPAFISEDASGYLTSSWLTLFVPSVYTGVFVVSLPLNIMAIVVFILKMKVKKPAVVYMLHLATADVLFVSVLPFKISYYFSGSDWQFGSELCRFVTAAFYCNMYASILLMTVISIDRFLAVVYPMQSLSWRTLGRASFTCLAIWALAIAGVVPLVLKEQTIQVPGLNITTCHDVLNETLLEGYYAYYFSAFSAVFFFVPLIISTVCYVSIIRCLSSSAVANRSKKSRALFLSAAVFCIFIICFGPTNVLLIAHYSFLSHTSTTEAAYFAYLLCVCVSSISSCIDPLIYYYASSECQRYVYSILCCKESSDPSSYNSSGQLMASKMDTCSSNLNNSIYKKLLT

SEQ ID NO: 1031 - DNA, 4104 bp, Homo sapien
ctgcaggttattcagcgatagttatgacctcccggttacgtgcgttgggtggaagaattaataatatacgcacctcggagttacccaaagagaaaactcgatcagaagtcatttgcagcatccactttttagatggcgtggtacagacctttaaagttactaaacaagacactggccaggttcttctggatatggtgcacaaccacctgggtgtgactgaaaaggaatattttggtttacagcatgatgacgactccgtggactctcctagatggctggaagcaagcaaagccatcaggaagcagttaaaaggaggtttcccctgtaccctgcattttcgagtaagattttttatacctgatcccaacacactgcagcaagaacaaaccaggcacttgtatttcttacaactgaagatggatatttgcgaaggaaggttaacctgccctcttaactcagcagtggttctagcgtcctatgccgtacaatctcattttggagactataattcttccatacatcatccaggctatctttccgatagtcactttatacccgatcaaaatgaggactttttaacaaaagtcgaatctctgcatgagcagcacagtgggctaaaacaatcagaagcagaatcctgctatatcaacatagcgcggaccctcgacttctatggagtagaactgcacagtggtagggatctgcacaatttagacctaatgattggaattgcttccgcgggtgttgctgtgtaccgaaaatacatttgcacaagtttctatccttgggtgaacattctcaaaatttctttcaaaaggaaaaagttcttcatacatcagcgacagaaacaggctgaatccagggaacatattgtggccttcaacatgctgaattaccgatcttgcaaaaacttgtggaaatcctgtgttgagcaccatacgttctttcaggcaaagaagctactacctcaggaaaagaatgttctgtctcagtactggactatgggctctcggaacaccaaaaagtcggtaaataaccaatattgcaaaaaggtgattggcgggatggtgtggaacccagccatgcggagatccttatcagtggagcacttagaaaccaagagtctgccttctcgttcccctcccattactcccaactggcgaagtcctcggctccggcacgaaatccgaaagccacgccactcttctgcagataaccttgcaaatgaaatgacctacatcacggaaacggaagatgtattttacacgtacaagggctctctggcccctcaagacagcgattctgaagtttctcagaaccgaagcccgcaccaagagagtttatccgagaacaatccggcacaaagctacctgacccagaagtcatccagttctgtgtctccatcttcaaatgctccaggctcctgctcacctgacggcgttgatcagcagctcttagatgacttccacagggtgaccaaagggggctccaccgaggacgccagccagtactactgtgacaagaatgataatggtgacagctacttagtcttgatccgtatcacaccagatgaagatggaaaatttggatttaatcttaagggaggagtggatcaaaagatgcctcttgtggtatcaaggataaacccagagtcacctgcggacacctgcattcctaagctgaacgaaggggatcaaatcgtgttaatcaatggccgggacatctcagaacacacgcatgaccaagtggtgatgttcatcaaagccagccgggagtcccactcacgggagctggccctggtgatcaggaggagagctgtccgctcatttgctgacttcaagtctgaagatgaactgaaccagcttttccccgaagccattttccccatgtgtccggagggtggggacactttggagggatccatggcacagctaaagaagggcctcgaaagcgggacggtgctgatccagtttgagcaactctacagaaaaaagccaggtttggccatcacgtttgcaaagctgcctcaaaatttggacaaaaaccgatataaagatgtgctgccttatgacaccacccgggtattattgcagggaaatgaagattatattaatgcaagttacgtgaacatggaaattcctgctgctaaccttgtgaacaagtacatcgccactcaggggcccctgccgcatacctgtgcacagttttggcaggttgtctgggatcagaagttgtcactcattgtcatgttgacgactctcacagaacgagggcggaccaaatgtcaccagtactggccagatccccccgacgtcatgaaccacggcggctttcacatccagtgtcagtcagaggactgcaccatcgcctatgtgtcccgagaaatgctggtcacaaacacccagaccggggaagaacacacagtgacacatctccagtacgtcgcatggcctgaccacggtgtgcccgatgactcctccgactttctggaatttgtaaactatgtgaggtctctgagagtggacagcgagcctctcctagttcactgcagtgctggaataggtcgaaccggtgtgttggtcactatggaaacagccatgtgcctaactgagaggaacctgcccatttacccactggatattgtccgaaaaatgcgagaccagcgcgccatgatggtgcagacatcaagccagtacaagtttgtgtgtgaagcgattcttcgtgtgtatgaagaaggtttagtccaaatgctggatcctagttaagacaactgtgaaaaagttcattcctctttcccaagggcatcctccttgaaagaggaggacagacctctctggaagcagcaagaggaaccagtagctgtgggaaaggaatgggcacctctgaacccaggcactttaaacttctatagaaaagatatcgtgtacataggaactggtgtagataagcatgcaattatggcatcatttaggcctgtatttctatggaaagatacaaaaaggatctcagtttggggcctgtcctaatgccttcttccctaacatcaccacacacacccctgtcggcatcctggagcaattgagaccggacacccacagagctgttgtcctcccagcaacaagatggtgtggttatcttgggtcatttggatgttttgtttgtttctgtgtgtcagactgtaagggctgagctttctgtgcttctaggtggagctggaacaattcagattcacccgccctgatgctaaggaaaccctgacgtatgtactagatggcagggcactgggggtcaggctgaaggctgagcaacacctctctgccctccctccctttgtcccatctcccagcgacttccaatattcatgtttctgagaattgtgtccctcttcaggttccctcttggtgcctaacctggattagtaatgtgcattcaggtgaattttcagctgaggctctgagaactggtactctcagtgtgttctggtcatcttgtggcttagttgtagaagcaggtgtgtctcttgcctctgcttgcctcctactgcacactcagcacccaggactggaatcaccgactactgaatctcctacatgtattgctgctacttcaagctcctccacttgaaaccttatgattttcccaaggggagatgggacagtgtcatctaaatattccgaatgtttggccttctgagaaaagagcttctagtaattgaaccatgggaaacccagcttctggagggttggccgtggggctgtgtacatgtgtgtgcccaggggtgagtgtttctcaggattcctaacgattcaaattaccgttgagtatatataaagaatgagtctctgtatggaagaacaaatgtgtgcattcacccccagtcacaatggtctccattgcatttcaaaggagaggatcagactatctgaatataaacacaatctgatgttaatttattctaagaacaccatcattttgattgtcctaaagaattctgcctttgtgaataccgtgttaaatttttttaaatttgtgacaggattgtagcaaattattatttaaggaaaataaattgtgtaaacatttaaaaaaaaaaaaaaaaaaaaa

SEQ ID NO: 1032 - protein, 913 aa, Homo sapien
MTSRLRALGGRINNIRTSELPKEKTRSEVICSIHFLDGVVQTFKVTKQDTGQVLLDMVHNHLGVTEKEYFGLQHDDDSVDSPRWLEASKAIRKQLKGGFPCTLHFRVRFFIPDPNTLQQEQTRHLYFLQLKMDICEGRLTCPLNSAVVLASYAVQSHFGDYNSSIHHPGYLSDSHFIPDQNEDFLTKVESLHEQHSGLKQSEAESCYINIARTLDFYGVELHSGRDLHNLDLMIGIASAGVAVYRKYICTSFYPWVNILKISFKRKKFFIHQRQKQAESREHIVAFNMLNYRSCKNLWKSCVEHHTFFQAKKLLPQEKNVLSQYWTMGSRNTKKSVNNQYCKKVIGGMVWNPAMRRSLSVEHLETKSLPSRSPPITPNWRSPRLRHEIRKPRHSSADNLANEMTYITETEDVFYTYKGSLAPQDSDSEVSQNRSPHQESLSENNPAQSYLTQKSSSSVSPSSNAPGSCSPDGVDQQLLDDFHRVTKGGSTEDASQYYCDKNDNGDSYLVLIRITPDEDGKFGFNLKGGVDQKMPLVVSRINPESPADTCIPKLNEGDQIVLINGRDISEHTHDQVVMFIKASRESHSRELALVIRRRAVRSFADFKSEDELNQLFPEAIFPMCPEGGDTLEGSMAQLKKGLESGTVLIQFEQLYRKKPGLAITFAKLPQNLDKNRYKDVLPYDTTRVLLQGNEDYINASYVNMEIPAANLVNKYIATQGPLPHTCAQFWQVVWDQKLSLIVMLTTLTERGRTKCHQYWPDPPDVMNHGGFHIQCQSEDCTIAYVSREMLVTNTQTGEEHTVTHLQYVAWPDHGVPDDSSDFLEFVNYVRSLRVDSEPLLVHCSAGIGRTGVLVTMETAMCLTERNLPIYPLDIVRKMRDQRAMMVQTSSQYKFVCEAILRVYEEGLVQMLDPS

SEQ ID NO: 1033 - DNA, 3769 bp, Homo sapien
aaaagattttaacaagtataaaaaattctcataggaattaaatgtagtctccctgtgtcagactgctctttcatagtataactttaaatcttttcttcaacttgagtctttgaagatagttttaattctgcttgtgacattaaaagattatttgggccagttatagcttattaggtgttgaagagaccaaggttgcaaggccaggccctgtgtgaacctttgagctttcatagagagtttcacagcatggactgtgtccccacggtcatccagtgttgtcatgcattggttagtcaaaatggggagggactagggcagtttggatagctcaacaagatacaatctcactctgtggtggtcctgctgacaaatcaagagcattgcttttgtttcttaagaaaacaaactcttttttaaaaattacttttaaatattaactcaaaagttgagattttggggtggtggtgtgccaagacattaatttttttttaaacaatgaagtgaaaaagttttacaatctctaggtttggctagttctcttaacactggttaaattaacattgcataaacacttttcaagtctgatccatatttaataatgctttaaaataaaaataaaaacaatccttttgataaatttaaaatgttacttattttaaaataaatgaagtgagatggcatggtgaggtgaaagtatcactggactaggaagaaggtgacttaggttctagataggtgtcttttaggactctgattttgaggacatcacttactatccatttcttcatgttaaaagaagtcatctcaaactcttagttttttttttttacaactatgtgatttatattccatttacataaggatacacttatttgtcaagctcagcacaatctgtaaatttttaacctatgttacaccatcttcagtgccagtcttgggcaaaattgtgcaagaggtgaagtttatatttgaatatccattctcgttttaggactcttcttccatattagtgtcatcttgcctccctaccttccacatgccccatgacttgatgcagttttaatacttgtaattcccctaaccataagatttactgctgctgtggatatctccatgaagttttcccactgagtcacatcagaaatgccctacatcttatttcctcagggctcaagagaatctgacagataccataaagggatttgacctaatcactaattttcaggtggtggctgatgctttgaacatctctttgctgcccaatccattagcgacagtaggatttttcaaacctggtatgaatagacagaaccctatccagtggaaggagaatttaataaagatagtgctgaaagaattccttaggtaatctataactaggactgctcctggtaacagtaatacattccattgttttagtaaccagaaatcttcatgcaatgaaaaatactttaattcatgaagcttactttttttttttttggtgtcagagtctcgctcttgtcacccaggctggaatgcagtggcgccatctcagctcactgcaacctccatctcccaggttcaagcgattctcgtgcctcggcctcctgagtagctgggattacaggcgtgtgccactacactcaactaatttttgtatttttaggagagacggggtttcaccctgttggccaggctggtctcgaactcctgacctcaagtgattcacccaccttggcctcataaacctgttttgcagaactcatttattcagcaaatatttattgagtgcctaccagatgccagtcaccgcacaaggcactgggtatatggtatccccaaacaagagacataatcccggtccttaggtagtgctagtgtggtctgtaatatcttactaaggcctttggtatacgacccagagataacacgatgcgtattttagttttgcaaagaaggggtttggtctctgtgccagctctataattgttttgctacgattccactgaaactcttcgatcaagctactttatgtaaatcacttcattgttttaaaggaataaacttgattatattgtttttttatttggcataactgtgattcttttaggacaattactgtacacattaaggtgtatgtcagatattcatattgacccaaatgtgtaatattccagttttctctgcataagtaattaaaatatacttaaaaattaatagttttatctgggtacaaataaacaggtgcctgaactagttcacagacaaggaaacttctatgtaaaaatcactatgatttctgaattgctatgtgaaactacagatctttggaacactgtttaggtagggtgttaagacttacacagtacctcgtttctacacagagaaagaaatggccatacttcaggaactgcagtgcttatgaggggatatttaggcctcttgaatttttgatgtagatgggcatttttttaaggtagtggttaattacctttatgtgaactttgaatggtttaacaaaagatttgtttttgtagagattttaaagggggagaattctagaaataaatgttacctaattattacagccttaaagacaaaaatccttgttgaagtttttttaaaaaaagctaaattacatagacttaggcattaacatgtttgtggaagaatatagcagacgtatattgtatcatttgagtgaatgttcccaagtaggcattctaggctctatttaactgagtcacactgcataggaatttagaacctaacttttataggttatcaaaactgttgtcaccattgcacaattttgtcctaatatatacatagaaactttgtggggcatgttaagttacagtttgcacaagttcatctcatttgtattccattgattttttttttcttctaaacattttttcttcaaacagtatataactttttttaggggatttttttttagacagcaaaaactatctgaagatttccatttgtcaaaaagtaatgatttcttgataattgtgtagtaatgttttttagaacccagcagttaccttaaagctgaatttatatttagtaacttctgtgttaatactggatagcatgaattctgcattgagaaactgaatagctgtcataaaatgaaactttctttctaaagaaagatactcacatgagttcttgaagaatagtcataactagattaagatctgtgttttagtttaatagtttgaagtgcctgtttgggataatgataggtaatttagatgaatttaggggaaaaaaaagttatctgcagatatgttgagggcccatctctccccccacacccccacagagctaactgggttacagtgttttatccgaaagtttccaattccactgtcttgtgttttcatgttgaaaatacttttgcatttttcctttgagtgccaatttcttactagtactatttcttaatgtaacatgtttacctggaatgtattttaactatttttgtatagtgtaaactgaaacatgcacattttttgtacattgtgctttcttttgtgggacatatgcagtgtgatccagttgttttccatcatttggttgcgctgacctaggaatgttggtcatatcaaacattaaaaatgaccactcttttaattgaaattaacttttaaatgtttataggagtatgtgctgtgaagtgatctaaaatttgtaatatttttgtcatgaactgtactactcctaattattgtaatgtaataaaaatagttacagtgacaaaaaaaaaaaaaaa

SEQ ID NO: 1034 - protein, 62 aa, Homo sapien
MQWRHLSSLQPPSPRFKRFSCLGLLSSWDYRRVPLHSTNFCIFRRDGVSPCWPGWSRTPDLK

SEQ ID NO: 1035 - DNA, 2126 bp, Homo sapien
gtaaggccgttttcttttcccattcgctcatctgccaggaaaagggacttgccgttggcgcttcggcctcttgttcattgagaaaaaagaggaaatactccgcgtgcgcttgtagaaggggagtcgtctccagctccgaaccccggagtgttcatcagcggggaatctggctccgaattctctttttttctcccgccgattgctcggaagttggtctaaagcagaggttggaaagaaaggaaaaaagtttgcatcgagactggatttatttgcacatcgcagaaagaagagaatccaagggagaggggttggtgcaaagccgcgatcacggagttcagatgtgttctaagcctgctggagtgaccacacttccaagacctgatggaggccagagctcagagtggcaacgggtcgcagcccttgctgcagacgccccgtgacggtggcagacagcgtggggagcccgaccccagagacgccctcacccagcaggtacatgtcttgtctctggatcagatcagagccatccgaaacaccaatgagtacacagaggggcctactgtcgtcccaagacctgggctcaagcctgctcctcgcccctccactcagcacaaacacgagagactccacggtctgcctgagcaccgccagcctcctaggctccagcactcgcaggtccattcttctgcacgagcccctctgtccagatccataagcacggtcagctcagggtcgcggagcagtacgaggacaagtaccagcagcagctcctctgaacagagactgctaggatcatccttctcctccgggcctgttgctgatggcataatccgggtgcaacccaaatctgagctcaagccaggtgagcttaagccactgagcaaggaagatttgggcctgcacgcctacaggtgtgaggactgtggcaagtgcaaatgtaaggagtgcacctacccaaggcctctgccatcagactggatctgcgacaagcagtgcctttgctcggcccagaacgtgattgactatgggacttgtgtatgctgtgtgaaaggtctcttctatcactgttctaatgatgatgaggacaactgtgctgacaacccatgttcttgcagccagtctcactgttgtacacgatggtcagccatgggtgtcatgtccctctttttgccttgtttatggtgttaccttccagccaagggttgccttaaattgtgccaggggtgttatgaccgggttaacaggcctggttgccgctgtaaaaactcaaacacagtttgctgcaaagttcccactgtcccccctaggaactttgaaaaaccaacatagcatcattaatcaggaatattacagtaatgaggattttttctttctttttttaatacacatatgcaaccaactaaacagttataatcttggcactgttaatagaaaggtgggatagtctttgctgtttgcggtgaaatgctttttgtccatgtgccgttttaactgatatgcttgttagaactcagctaatggagctcaaagtatgagatacagaacttggtgacccatgtattgcataagctaaagcaacacagacactcctaggcaaagtttttgtttgtgaatagtacttgcaaaacttgtaaattagcagatgacttttttccattgttttctccagagagaatgtgctatatttttgtatatacaataatatttgcaactgtgaaaaacaagttgtgccatactacatggcacagacacaaaatattatactaatatgttgtacattcggaagaatgtgaatcaatcagtatgtttttagattgtattttgccttacagaaagcctttattgtaagactctgatttccctttggacttcatgtatattgtacagttacagtaaaattcaacctttattttctaattttttcaacatattgtttagtgtaaagaatatttatttgaagttttattattttataaaaaagaatatttattttaagaggcatcttacaaattttgccccttttatgaggatgtgatagttgctgcaaatgaggggttacagatgcatatgtccaatataaaatagaaaatatattaacgtttgaaattaaaaaaaaaaaaaaaaaa

SEQ ID NO: 1036 - protein, 315 aa, Homo sapien
MEARAQSGNGSQPLLQTPRDGGRQRGEPDPRDALTQQVHVLSLDQIRAIRNTNEYTEGPTVVPRPGLKPAPRPSTQHKHERLHGLPEHRQPPRLQHSQVHSSARAPLSRSISTVSSGSRSSTRTSTSSSSSEQRLLGSSFSSGPVADGIIRVQPKSELKPGELKPLSKEDLGLHAYRCEDCGKCKCKECTYPRPLPSDWICDKQCLCSAQNVIDYGTCVCCVKGLFYHCSNDDEDNCADNPCSCSQSHCCTRWSAMGVMSLFLPCLWCYLPAKGCLKLCQGCYDRVNRPGCRCKNSNTVCCKVPTVPPRNFEKPT

SEQ ID NO: 1037 - DNA, 2514 bp, Homo sapien
ggcacgagggctgagcgccggaggagcgtaggcagggcagcgctggcgccagcggcgacaggagccgcgcgaccggcaaaaatacacgggaggccgtcgccgaaaagagtccgcggtcctctctcgtaaacacactctcctccaccggcgcctccccctccgctctgcgcgccgcccggctgggcgcccgaggccgctccgactgctatgtgaccgcgaggctgcgggaggaaggggacagggaagaagaggctctcccgcgggagcccttgaggaccaagtttgcggccacttctgcaggcgtcccttcttagctctcgcctgcccctttctgcagcctaggcggcccaggttctcttctcttcctcgcgcgcccagccgcctcggttcccggcgaccatggtgacgatggaggagctgcgggagatggactgcagtgtgctcaaaaggctgatgaaccgggacgagaatggcggcggcgcgggcggcagcggcagccacggcaccctggggctgccgagcggcggcaagtgcctgctgctggactgcagaccgttcctggcgcacagcgcgggctacatcctaggttcggtcaacgtgcgctgtaacaccatcgtgcggcggcgggctaagggctccgtgagcctggagcagatcctgcccgccgaggaggaggtacgcgcccgcttgcgctccggcctctactcggcggtcatcgtctacgacgagcgcagcccgcgcgccgagagcctccgcgaggacagcaccgtgtcgctggtggtgcaggcgctgcgccgcaacgccgagcgcaccgacatctgcctgctcaaaggcggctatgagaggttttcctccgagtacccagaattctgttctaaaaccaaggccctggcagccatcccacccccggttccccccagcgccacagagcccttggacctgggctgcagctcctgtgggaccccactacacgaccaggggggtcctgtggagatccttcccttcctctacctcggcagtgcctaccatgctgcccggagagacatgctggacgccctgggcatcacggctctgttgaatgtctcctcggactgcccaaaccactttgaaggacactatcagtacaagtgcatcccagtggaagataaccacaaggccgacatcagctcctggttcatggaagccatagagtacatcgatgccgtgaaggactgccgtgggcgcgtgctggtgcactgccaggcgggcatctcgcggtcggccaccatctgcctggcctacctgatgatgaagaaacgggtgaggctggaggaggccttcgagttcgttaagcagcgccgcagcatcatctcgcccaacttcagcttcatggggcagctgctgcagttcgagtcccaggtgctggccacgtcctgtgctgcggaggctgctagcccctcgggacccctgcgggagcggggcaagacccccgccacccccacctcgcagttcgtcttcagctttccggtctccgtgggcgtgcactcggcccccagcagcctgccctacctgcacagccccatcaccacctctcccagctgttagagccgccctgggggccccagaaccagagctggctcccagcaagggtaggacgggccgcatgcggcagaaagttgggactgagcagctgggagcaggcgaccgagctccttccccatcatttctccttggccaacgacgaggccagccagaatggcaataaggactccgaatacataataaaagcaaacagaacactccaacttagagcaataaccggtgccgcagcagccagggaagaccttggtttggtttatgtgtcagtttcacttttccgatagaaatttcttacctcatttttttaagcagtaaggcttgaagtgatgaaacccacagatcctagcaaatgtgcccaaccagctttactaaagggggaggaagggagggcaaagggatgagaagacaagtttcccagaagtgcctggttctgggtacttgtccctttgttgtcgttgttgtagttaaaggaatttcatttttaaaagaaatcttcgaaggtgtggttttcatttctcagtcaccaacagatgaataattatgcttaataataaagtatttattaagactttcttcagagtatgaaagtacaaaaagtctagttacagtggatttagaatatatttatgttgatgtcaaacagctgagcaccgtagcatgcagatgtcaaggcagttaggaagtaaatggtgtcttgtagatatgtgcaaggtagcatgatgagcaacttgagtttgttgccactgagaagcaggcgggttgggtgggaggaggaagaaagggaagaattaggtttgaattgctttttaaaaaaaaaagaaaagaaaaagacagcatctcactatgttgccaaggctcatcttgagaagcaggcgggttgggtgggaggaggaagaaagggaagaattaggtttgaattgcttttttaaaaaaaaa

SEQ ID NO: 1038 - protein, 394 aa, Homo sapien
MVTMEELREMDCSVLKRLMNRDENGGGAGGSGSHGTLGLPSGGKCLLLDCRPFLAHSAGYILGSVNVRCNTIVRRRAKGSVSLEQILPAEEEVRARLRSGLYSAVIVYDERSPRAESLREDSTVSLVVQALRRNAERTDICLLKGGYERFSSEYPEFCSKTKALAAIPPPVPPSATEPLDLGCSSCGTPLHDQGGPVEILPFLYLGSAYHAARRDMLDALGITALLNVSSDCPNHFEGHYQYKCIPVEDNHKADISSWFMEAIEYIDAVKDCRGRVLVHCQAGISRSATICLAYLMMKKRVRLEEAFEFVKQRRSIISPNFSFMGQLLQFESQVLATSCAAEAASPSGPLRERGKTPATPTSQFVFSFPVSVGVHSAPSSLPYLHSPITTSPSC

SEQ ID NO: 1039 - DNA, 3404 bp, Homo sapien
gcagttcagacccccccacacccatcaaagagccgctcctcccccccgcaggcgccttcgccgcctccctcccttcctttcctttccgctcctcttccgacctgtccacccgggaggaagggagctggaaagggggcggaaacctctcccctccaaaaagcacaacaaaactgttcagtgcggaggagccgggttcgcccctgccggacagcggggggctttgttccccgcagttgtttcctgcccatttgacctgtcagctgctggggaaacgctgctgttgacctttggttgaactgctaaggcgattttgctgatttttctttctttttccgcgagggctgtcttttgctcctccaaatgagcccagtccccctcccttctccccaaagcgctccaagagaaagtgccaggaaggggcttgtcccggaaggcctggcggctgagcggggccaggtcctggttaggccaccagggtgggcgtccgcgccattgtttgagcttgtcggcgctggtgggagagatgagggcaattcctctgggacgcaagtcccctcgaatggccggggctggccgggatgttccccgcacggcgctgccctcgagtccccccgatggagagcgcgggcgcgccttccttcgctggcgtccaaacccgggaccagctagaacacagcagggctgggactgggttccagccccacgtggagtctggatttgttttgttgtgttttgctttccttcctggaagaaatcccgaggggaccgccctagagcggcagctccaggacctcggcccttgggcttccgggggtgcagccacttaggccccgctcccggggagagagggattattttttaagatttatccccagggcgcgcggcatttccctgtccctcgtgaatcccgttgagagtcctccctccccaacctcctccatttccccagccagaccgattcgagagccctggagattctgggcgaggctagtgactgggtagtacaggcctctagccccaccattgctctctctgtcttcagttccccaggagggcaatggcatcaaacagcacagctctgggggatgtcaatattgcataccttttctacctaaagggaaaatgactcgcttttctgcttgcaaatatggtagtttctgcttacaaatgtaatacaatgcccatgacagccaaggactggaagcataagttgctaggtcttacaggtgattttttacaatgaagcaaactcactatgttagacaccatttacattggatgtctccaactaacaaaagtaactaaagacagatgtaggtgtaaattgagagtgaaatttgaccctttagaccgtcacaacttccttgggcttatcctgggtgcttataggagaggtgggctccacccacaaaaatggactgctcagaaaaatgagggagagagaaagggtggccactttcccgagccaagaaattccttgaaaaaaaatcagaacatctgaaaccagagagccgatttccttaccgggaggcagttcctggctaacgaagaggaagcacgatgggaagaaaagttcactccaacggaagccagtttgctgaacatagcagatcgcccaggaggactgggagagactgcaaaccagttcgagcccccagcatggcgttaggtgtcagccagctggcaggaaggtccaggtgtctgtgttcagagtctcaaggcggctatgagaggttttcctccgagtacccagaattctgttctaaaaccaaggccctggcagccatcccacccccggttccccccagtgccacagagcccttggacctgggctgcagctcctgtgggaccccactacacgaccaggggggtcctgtggagatccttcccttcctctacctcggcagtgcctaccatgctgcccggagagacatgctggacgccctgggcatcacggctctgttgaatgtctcctcggactgcccaaaccactttgaaggacactatcagtacaagtgcatcccagtggaagataaccacaaggccgacatcagctcctggttcatggaagccatagagtacatcgatgccgtgaaggactgccgtgggcgcgtgctggtgcactgccaggcgggcatctcgcggtcggccaccatctgcctggcctacctgatgatgaagaaacgggtgaggctggaggaggccttcgagttcgttaagcagcgccgcagcatcatctcgcccaacttcagcttcatggggcagctgctgcagttcgagtcccaggtgctggccacgtcctgtgctgcggaggctgctagcccctcgggacccctgcgggagcggggcaagacccccgccacccccacctcgcagttcgtcttcagctttccggtctccgtgggcgtgcactcggcccccagcagcctgccctacctgcacagccccatcaccacctctcccagctgttagagccgccctgggggccccagaaccagagctggctcccagcaagggtaggacgggccgcatgcgggcagaaagttgggactgagcagctgggagcaggcgaccgagctccttccccatcatttctccttggccaacgacgaggccagccagaatggcaataaggactccgaatacataataaaagcaaacagaacactccaacttagagcaataacggctgccgcagcagccagggaagaccttggtttggtttatgtgtcagtttcacttttccgatagaaatttcttacctcatttttttaagcagtaaggcttgaagtgatgaaacccacagatcctagcaaatgtgcccaaccagctttactaaagggggaggaagggagggcaaagggatgagaagacaagtttcccagaagtgcctggttctgtgtacttgtccctttgttgtcgttgttgtagttaaaggaatttcattttttaaaagaaatcttcgaaggtgtggttttcatttctcagtcaccaacagatgaataattatgcttaataataaagtatttattaagactttcttcagagtatgaaagtacaaaaagtctagttacagtggatttagaatatatttatgttgatgtcaaacagctgagcaccgtagcatgcagatgtcaaggcagttaggaagtaaatggtgtcttgtagatatgtgcaaggtagcatgatgagcaacttgagtttgttgccactgagaagcaggcgggttgggtgggaggaggaagaaagggaagaattaggtttgaattgctttttaaaaaaaaaagaaaagaaaaagacagcatctcactatgttgccaaggctcatcttgagaagcaggcgggttgggtgggaggaggaagaaagggaagaattaggtttgaattgcttttttaaaaaaaaa

SEQ ID NO: 1040 - protein, 303 aa, Homo sapien
MGRKVHSNGSQFAEHSRSPRRTGRDCKPVRAPSMALGVSQLAGRSRCLCSESQGGYERFSSEYPEFCSKTKALAAIPPPVPPSATEPLDLGCSSCGTPLHDQGGPVEILPFLYLGSAYHAARRDMLDALGITALLNVSSDCPNHFEGHYQYKCIPVEDNHKADISSWFMEAIEYIDAVKDCRGRVLVHCQAGISRSATICLAYLMMKKRVRLEEAFEFVKQRRSIISPNFSFMGQLLQFESQVLATSCAAEAASPSGPLRERGKTPATPTSQFVFSFPVSVGVHSAPSSLPYLHSPITTSPSC

SEQ ID NO: 1041 - DNA, 1982 bp, Homo sapien
gcggacgcgtgggctggaaacaacccaattgtctatcaacagtgactggaaggacaaattgtgctatgtccacacattagaataccagttggcagtcaaaaaggaagagctgatctgtgcagcaatttgagtctcagtaatttcatgtgaataaccctataccttccaatttgaaatcagaagcaaaaaaggctgccaaaatattaagagaattcacagaaataacttccagaaatggacctgataagatcattcctgctcacgtaattgcgaaggctaaaggccttgcaattctgtctgtgatcaaagccgggttcctggtgactgccagaggaggcagcgggattgtagtggcgcgccttccagatggaaaatggtctgcaccctcagccattgggatagctggccttggtggaggatttgaaataggaattgagacacatttacagctacatattccctctgagcattgccctggctgccttccataagtgtggagtgccactccagctttcttaggttgccatctgcatgacacatctttctccatccttttactgtcaatctaatggtatcagacttggtgataattctgaattatgaccgtgctgtagaagcttttgcaaaaggcggaaatctgaccctcggagggaacttgactgtggcggttgggcccttgggaaggaacttggaaggaaacgtggccctgagaagctccgctgccgtcttcacgtactgcaagtcaaggggactctttgcaggcgtgtctttagaagggagctgtttgattgaaaggaaagaaactaatagaaaattttattgtcaagatatccgagcttatgacattttatttggagatacaccgcggcctgctcaagccgaagatctttatgaaattcttgattcctttactgaaaagtatgaaaatgaaggacaacgaatcaatgcaagaaaagcagcaagggagcagaggaagtcttctgctaaagaattacctccaaagccattgtcaagaccacagcagtcatctgcaccagtccagctgaactctggctctcaaagcaacagaaatgaatataagctctatcctggactttccagctatcatgagagagttggcaatttgaatcaacccatagaagtgacagcgctgtattcatttgaaggacagcagcctggggatttgaattttcaagctggagacagaatcacagttatatcaaaaacagattcacattttgattggtgggaaggaaaacttcgaggtcaaactggcatttttccagccaactacgtaaccatgaattaaagcgtatactattttcttctttgagaattacaaaaaaattatttctacactgacaggatttactagttaagcaatgtttaatataaattttaaaaaacttctgttctacaaaatttccattccgtatgtaaaagattttgtttttctatataaaaagagctgactgacatatctttaaatactttgtactaactttatcacacttactgtgtcatagaatatcatacagtttatacgctcatagttctcttgtgaacacttcaaacatcgctaagcatttgatctggccatgtatatggtagctgtgttttaatttgagaatcttgagggtagagccacaaatttcaattcttacatttccatttgcaaagtgactagagaaaaagaaatcagcttaaatgaggtattaagtaatgtttagagttgtaggtattaactagaatataaatccttagaaattgtctttataccttcaaaaattatactatgcatttatcatagaaatgtgattacaaagaagtctgactaccatgtctttaaacatatggcatctctcaacttttcttccttatggggctacatttgttcatttccagcagtagcataaacttacggtgacatggtagacttgtctctaaataaaatttttaaatgttaaaaaaaaaaaaaaaaa

SEQ ID NO: 1042 - protein, 246 aa, Homo sapien
MVSDLVIILNYDRAVEAFAKGGNLTLGGNLTVAVGPLGRNLEGNVALRSSAAVFTYCKSRGLFAGVSLEGSCLIERKETNRKFYCQDIRAYDILFGDTPRPAQAEDLYEILDSFTEKYENEGQRINARKAAREQRKSSAKELPPKPLSRPQQSSAPVQLNSGSQSNRNEYKLYPGLSSYHERVGNLNQPIEVTALYSFEGQQPGDLNFQAGDRITVISKTDSHFDWWEGKLRGQTGIFPANYVTMN

SEQ ID NO: 1043 - DNA, 1658 bp, Homo sapien
ggcacgagctcggctcctggaaagatggaggcagcggagacagaggcggaagctgcagccctagaggtcctggctgaggtggcaggcatcttggaacctgtaggcctgcaggaggaggcagaactgccagccaagatcctggttgagtttgtggtggactctcagaagaaagacaagctgctctgcagccagcttcaggtagcggatttcctgcagaacatcctggctcaggaggacactgctaagggtctcgaccccttggcttctgaagacacgagccgacagaaggcaattgcagctaaggaacaatggaaagagctgaaggccacctacagggagcacgtagaggccatcaaaattggcctcaccaaggccctgactcagatggaggaagcccagaggaaacggacacaactccgggaagcctttgagcagctccaggccaagaaacaaatggccatggagaaacgcagagcagtccagaaccagtggcagctacaacaggagaagcatctgcagcatctggcggaggtttctgcagaggtgagggagcgtaagacagggactcagcaggagcttgacagggtgtttcagaaacttggaaacctgaagcagcaggcagaacaggagcgggacaagctgcagaggtatcagaccttcctccagcttctgtataccctgcagggtaagctgttgttccctgaggctgaggctgaggcagagaatcttccagatgataaaccccagcagccgactcgaccccaggagcagagtacaggagacaccatggggagagaccctggtgtgtccttcaaggctgttggtctacaacctgctggagatgtaaatttgccatgacttcctggaggacagcagcatggagaaagatcctagaaaaggcctctgacttccctcacctcccaaccatcattacaggaaagactgtgaactcctgagttcagcttgatttctgactacatcccagcaagctctggcatctgtggattaaaatccctggatctctctcagttgtgtatttgttcatcttcatatgctggcaggaacaactattaatacagatactcagaagccaataacatgacaggagctgggactggtttgaacacagggtgtgcagatggggagggggtactggccttgggcctcctatgatgcagacatggtgaatttaattcaaggaggaggagaatgttttaggcaggtggttatatgtgggaagataattttattcatggatccaaatgtttgttgagtcctttctttgtgctaaggttcttgcggtgaaccagaattataacagtgagctcatctgactgttttaggatgtacagcctagtgttaacattcttggtatctttttgtgccttatctaaaacatttctcgatcactggtttcagatgttcatttattatattcttttcaaagattcagagattggcttttgtcatccactattgtatgttttgtttcattgacctctagtgataccttgatctttcccactttctgttttcggattggagaagatgtaccttttttgtcaactcttacttttatcagatgatcaactcacgtatttggatctttatttgttttctcaaataaatatttaaggttaaaaaaaaaaaaaaaaaaa

SEQ ID NO: 1044 - protein, 277 aa, Homo sapien
MEAAETEAEAAALEVLAEVAGILEPVGLQEEAELPAKILVEFVVDSQKKDKLLCSQLQVADFLQNILAQEDTAKGLDPLASEDTSRQKAIAAKEQWKELKATYREHVEAIKIGLTKALTQMEEAQRKRTQLREAFEQLQAKKQMAMEKRRAVQNQWQLQQEKHLQHLAEVSAEVRERKTGTQQELDRVFQKLGNLKQQAEQERDKLQRYQTFLQLLYTLQGKLLFPEAEAEAENLPDDKPQQPTRPQEQSTGDTMGRDPGVSFKAVGLQPAGDVNLP

SEQ ID NO: 1045 - DNA, 2112 bp, Homo sapien
cggctttcaaagccaatttgaataaacaactcttccctctcaaatgggcaagagtaactcttcagcaccatggagaggtccgggcagcgtgttacaacgtgggactgtgaccagggcaagcactctgacagtgattaccgagaggatgggatggatctaggcagtgacgccggcagcagcagcagcagcagccgcgccagttcacagtccaactccaccaaagtgaccccttgctccgagtgcaaatcttcatcgtcgccggggggcagcctggacttggtgtctgccctggaggactatgaggagcccttcccggtctaccagaagaaggtgattgatgagtgggcgccggaggaggacggggaggaggaggaagaggaggacgagcgcgaccagcgagggtaccgggatgaccgctctccggcccgggaaccgggggacgtaagcgccaggacccgcagcggcggcggcgggggcaggagcgccaccaccgccatgccgcccccggtgcccaacggcaacctccaccagcacgacccccaggacctcaggcacaatggcaacgtggtggtggctggccggccgagctgttcccggggcccccgccgggcgatccaaaagccccagccggctgggggccggcgcagtggccgcggcccggcggctggggggctctgccttcagcccccagacggcgggacgtgcgtccccgaagagcccccggtgccacctatggattgggaggcgctggagaagcatctggccgggctgcagttccgggagcaggaggtacggaaccagggccaggcgaggaccaactccacctccgcacagaaaaatgagagagagtctatcagacagaagttggcacttggaagcttctttgatgatggcccaggaatttataccagctgtagcaaaagtgggaagccaagcctttcctcccgactgcagagtgggatgaacttgcagatatgctttgtcaacgacagtggcagtgataaggacagtgatgctgatgacagtaagactgaaaccagcttggacacccccttgtctcccatgagcaaacagagttcttcctattctgatagagacactactgaagaggagtctgaatccttggatgacatggacttccttacaaggcaaaagaaattgcaagctgaagccaaaatggcccttgccatggccaaaccaatggccaaaatgcaagtagaagtggagaaacagaacaggaaaaagtctcccgtcgctgatcttctgccacacatgcctcatataagtgaatgcttgatgaaaagaagtttaaaacccaccgacctgagagacatgactattgggcagctacaagtgatagtcaatgatctccattcccagatagaaagcttgaatgaagagttggtccagctgcttctcatccgagatgagctgcacacagagcaggatgccatgctggtggacattgaagacttgaccagacatgctgaaagtcagcagaagcacatggcagagaaaatgcctgcaaagtgaaaagaagccattcaaccagagaacaagctagaatttattttgcttctgtggttgtaaaaatgctgttgctaaaggtggcgcagaaacaaatatcagtgttagtcattgataatgtctgaagcttaatgtccagtgattggcctttgcttcttaatttattttaattttttacttgtgccacttaatatcaggcattttaataaaatattgttacaaaaaatgtacagtactgacaccaccacaaatcatggttaataaaagagagtagttttaactttatttttatttgtttagagattttaagttggaacagtattttcccattgactacttttcattcttcactgtagttttaaagaagaactgtaaatgacggtgctatacaagtcaaaaaatacatgcctgcctcgtagtgaagttgtagctctccgtaatatgtatattttactcagttttcaacattttgtgaatgttgactacctgaagttcctttttagatgtgctattaacattctgttggattcagagggttccttgaaagttttatgtataaatatgtaaaataaaaattaaaacccg

SEQ ID NO: 1046 - protein, 487 aa, Homo sapien
MERSGQRVTTWDCDQGKHSDSDYREDGMDLGSDAGSSSSSSRASSQSNSTKVTPCSECKSSSSPGGSLDLVSALEDYEEPFPVYQKKVIDEWAPEEDGEEEEEEDERDQRGYRDDRSPAREPGDVSARTRSGGGGGRSATTAMPPPVPNGNLHQHDPQDLRHNGNVVVAGRPSCSRGPRRAIQKPQPAGGRRSGRGPAAGGLCLQPPDGGTCVPEEPPVPPMDWEALEKHLAGLQFREQEVRNQGQARTNSTSAQKNERESIRQKLALGSFFDDGPGIYTSCSKSGKPSLSSRLQSGMNLQICFVNDSGSDKDSDADDSKTETSLDTPLSPMSKQSSSYSDRDTTEEESESLDDMDFLTRQKKLQAEAKMALAMAKPMAKMQVEVEKQNRKKSPVADLLPHMPHISECLMKRSLKPTDLRDMTIGQLQVIVNDLHSQIESLNEELVQLLLIRDELHTEQDAMLVDIEDLTRHAESQQKHMAEKMPAK

SEQ ID NO: 1047 - DNA, 2735 bp, Homo sapien
gggggcctggagcgcggcagcaagcgtgggaacgcgggcggcgagacggcggcaggacggcggcaggatgtgtgaccggaatggtggtcggcggcttcgacagtggctgatcgagcagattgacagtagcatgtatccaggactgatttgggagaatgaggagaagagcatgttccggatcccttggaaacacgctggcaagcaagattataatcaggaagtggatgcctccatttttaaggcctgggcagtttttaaagggaagtttaaagaaggggacaaagctgaaccagccacttggaagacgaggttacgctgtgctttgaataagagcccagattttgaggaagtgacggaccggtcccaactggacatttccgagccatacaaagtttaccgaattgttcctgaggaagagcaaaaatgcaaactaggcgtggcaactgctggctgcgtgaatgaagttacagagatggagtgcggtcgctctgaaatcgacgagctgatcaaggagccttctgtggacgattacatggggatgatcaaaaggagcccttccccgccggaggcctgtcggagtcagctccttccagactggtgggcgcagcagcccagcacaggcgtgccgctggtgacggggtacaccacctacgacgcgcaccattcagcattctcccagatggtgatcagcttctactatgggggcaagctggtgggccaggccaccaccacctgccccgagggctgccgcctgtccctgagccagcctgggctgcccggcaccaagctgtatgggcccgagggcctggagctggtgcgcttcccgccggccgacgccatccccagcgagcgacagaggcaggtgacgcggaagctgttcgggcacctggagcgcggggtgctgctgcacagcagccggcagggcgtgttcgtcaagcggctgtgccagggccgcgtgttctgcagcggcaacgccgtggtgtgcaaaggcaggcccaacaagctggagcgtgatgaggtggtccaggtcttcgacaccagccagttcttccgagagctgcagcagttctataacagccagggccggcttcctgacggcagggtggtgctgtgctttggggaagagtttccggatatggcccccttgcgctccaaactcattctcgtgcagattgagcagctgtatgtccggcaactggcagaagaggctgggaagagctgtggagccggctctgtgatgcaggcccccgaggagccgccgccagaccaggtcttccggatgtttccagatatttgtgcctcacaccagagatcatttttcagagaaaaccaacagatcaccgtctaagtgcgtcgcttgggcgccccaccccgtctgcgtcctgcatccatctccctgttacagtggcccgcatcatgattaaagaatgtggatccctctgtctggggtgggatgccttactttgcacttaatttaataagggcattctcggaggagtagacgtttaatacgaagtggcggcatagccctgccgagatgtcggtgatggcctggatgctgtaaccacaacctgtggctaaaaattttattttctatcctttacccgtcattatcattagttgctatgattctttctgcattttcggttaactatcatttccaaagacttgtcattcagtaatattagcagatagctgcttcgataaaggaatttggagtttaaaaatcaacttgtgaaaacaaggttgtttttgtctttatcgtttgttagagttatagatttatgatttcataggcttgattctatgtgaaatatctttttacttttatgcattttaataagatttaaaaatatttagattaaagccccctttaatgagtacaagaaaaactcttggcttgttagaagaaagtatattctttctagaatttggtgcaggaatatgtgttcatatccaggcaaacgggtgtgtttttatcttcagacaatgaaaccttctcctctggggctttgttgccaggaagattagaactaaatttatttttttcatttctgtcatgaaatcattccagatacctcttttcttctttccaaatggttttcacatgtgtttgaaatatttgtacttcgaattgtcggattttccatgtcctcctttctcctttgtgcccagcctgagtcagcaccaatcccgcattcagaacctcccagtgaaagggcagccttcattttgagaaggtggaaggtgttagggtttgggagacagctcatccaatctcccaagtctcatggtggatttgtgactgtgagagtttccggtttaaaatctgaaaagccagatatgcctgtttccttttcccagcaccatgcctgtggaggggacagtcagacccagaggtcctttacgtgtggatggagttcacaggcgaatagaggagaggaccaggggacgtggcttgtcccttttgtccaacaaagcattatatttttaagaatggcagtcctgtttgctgaagtgttcataagataacaataggcttgaatctccaattcaaatgaatgtcaaagcacatatctttaatatgctgaatgaatatttatttttgtatccattaaaacagtatattgatctcttttattctttattaaaataaaatgctccaaaaaaaatctatgtcgggtgcggagaaagaggtaatgaaatggcaggaattcgatatcagcttatcgata

SEQ ID NO: 1048 - protein, 448 aa, Homo sapien
GAWSAAASVGTRAARRRQDGGRMCDRNGGRRLRQWLIEQIDSSMYPGLIWENEEKSMFRIPWKHAGKQDYNQEVDASIFKAWAVFKGKFKEGDKAEPATWKTRLRCALNKSPDFEEVTDRSQLDISEPYKVYRIVPEEEQKCKLGVATAGCVNEVTEMECGRSEIDELIKEPSVDDYMGMIKRSPSPPEACRSQLLPDWWAQQPSTGVPLVTGYTTYDAHHSAFSQMVISFYYGGKLVGQATTTCPEGCRLSLSQPGLPGTKLYGPEGLELVRFPPADAIPSERQRQVTRKLFGHLERGVLLHSSRQGVFVKRLCQGRVFCSGNAVVCKGRPNKLERDEVVQVFDTSQFFRELQQFYNSQGRLPDGRVVLCFGEEFPDMAPLRSKLILVQIEQLYVRQLAEEAGKSCGAGSVMQAPEEPPPDQVFRMFPDICASHQRSFFRENQQITV

SEQ ID NO: 1049 - DNA, 6034 bp, Homo sapien
ccacgcgtccggagctggaggaggcggcgggcgcgagacccggaatgcgcagggcccccgcctcgccccccccagcccgggccgcggcccccgccttccccgcagtcgtcccgcactcggtgcccgccccccgaggccggcggctgctcccactcggggccgttgctgcttgtgccgtgagcgccgcccagccattgtccccgtcgctccgtcagccgcgccggaccgcgcaccaggaggcgagagcgcgcatggggagcctctgttgatgccgccgccgcgccgccctccgaggctgcgtcccgggaagcccggctccccgagcgctccggcctggcccggtgccccggacctgagtgcgtccccatggaggcgcccgggctggcccaggcggccgcggcggagagcgactcccgcaaggtggcggaggagacccccgacggggcgcccgcgctctgccccagccctgaggcgctgtcgccggagccgcctgtgtacagcctgcaggactttgacacgctggccaccgtgggcactgggacgttcgggcgggtgcacctggtgaaggagaagacagccaagcatttcttcgccctcaaggtgatgagcattcctgacgtcatccgcctaaagcaggagcaacacgtacacaatgagaagtctgtcctgaaggaagtcagccacccgttcctcatcaggctgttctggacgtggcatgacgagcgcttcctctacatgctcatggagtacgtgccgggcggcgagctcttcagctacctgcgcaaccgggggcgcttctccagcaccacggggctcttctactctgcagagatcatctgtgccatcgagtacctgcactccaaagagatcgtctacagggacttgaagccagagaacatcctgctggatagggatggccacattaagctcacggactttgggttcgccaagaagctggtagacaggacttggaccctctgtggaacacccgagtacctagcccccgaagtcattcagagcaagggccacggaagggccgtggactggtgggccctcggcatcctgatattcgagatgctttcggggtttcctccgttttttgatgacaacccgtttggcatttatcagaaaattcttgcaggcaaaatagatttccccagacatttggatttccatgtaaaagacctcattaagaaactgctcgtggttgacagaacaaggcgattaggaaacatgaagaacggggcgaatgatgtgaagcatcatcggtggttccgctccgtggactgggaagctgttccgcagagaaaactgaagcctcccatcgtgcccaagatagctggtgacggcgacacttccaacttcgaaacttaccctgagaatgactgggacacagccgcgcccgtgccgcagaaggatttagaaatcttcaagaatttctgaggacaggagctcacatctggaagaaacaggaagattggaatctgcctggaacaaagaactgcacctaagcagaccagaagcaaaatgtcttcttcacggcataaggacatctccacttttctctgtacctgtgtgtatagaaatagattagagcacagttgaaattcatggaactggcattatttaagcaactggaattccacactgtaggaaggttttgaaaattgtttggttgtagattttatcttatcctttagtgttgtgttcctactgtgatgtcttggtttttgtcatagacttaagtttataagtttgaactggacttgttcgattataaccacaaattgtgtgtgtgtgtgtgtgtgtgtgtgtgtgtgtgtgtatgcctgtgtgtatatatagaagtcattatggcagatgcacagaaattgtgcagtgatgtaaatgttcatactttacagagcctataatttttatttttcaatttgttttttcaaaaatctcttctcggggacaacatctgaagggtatgttgcatgcattaaaaaaaatcatctcacatgcattttatagttttggggaagaaaatatcatggggaggtctaccttcagtatctttagttcttcttaccgggtaacttgagactttaaaagaagaaacaaagaggggaagatatgggagcgaatttattccaagaatctacaatgacattgaagttgttggaggaatgtactgtatttaaaaaaaccttctgtgacacattcaaaaatttcatctgagctggatgcagtggcttgttcctatagtcccagcactttgggaggctgaggtgggtggattgcttgagcccaggagttggagaccagtctgggaaacgtggtgagacctcatctctacaaaatacaaaaaaattagccgggcatggtggcacgtgagttaggtctcagctactcaggaggctgagatgagaggatcacttgagcctggggaggtccaggccgcagtgatccgagatcacaccactgcattccagcctgggtgacagagtgagaccctgtccaaaaaaaaaaaaaaaaaaaagaaggcaatggctttgtgcttttgaagatggattgaagagaacgtccaccttaaggctttaaaagacagtgaagctgggtgcggtggtgcactcctgtaaccctgggactttgggaagctgaggcaggaagattgagcctaggagttcgagactgacctgggcagcatagcgagaccccatctctatataaaaaaaaagatgttaaaacagtgaaattacagaaacagaacatagccaccctttttcatcagtgaccttttcttcacgtggaggtcaactcagtaggtgagaataattagtaggttcagcagaataaactctttacaattaataactcagtggaaaatgatgttcagatggtgaaatgtggaaatgttttagacaactctattttcagcctgtgcttctcactcaccatcctgttgggattaacagttgagggccatcgctgcctaaacatttagcgtgcggtttcccatcagttttaccgtgaatgtgaaaaggtgaaactggtgctgacttcggcagcaggtatactaaaattggaatgacacagaggagattagcatggccccctgcgcgaggaagatctgcagattcatgcagcattccatatttttttaagaaaaggttacactgtgcaccgacatgtggagctagaaggaaaagcttttaagtctcatgtttgctgactataaaaataaatcatagtaataatattgaacattctactttaaaaattattaataaaaccataaatgaaacacttgagcacactttaaaaagtacataaatccatgagtccatatgcctatttttaggttgtctgttttattatccaggatttcatactcagatgagaattagcatcaggaaagcctgaaatgccttaattgtgaactgatatgcaggaaaatgaaatatgcaagcacattggtgaccttgttctttacagacgtcgtgatcagcctccagccatacagaacaaatgagaaattagaagcgattccaagaacgtgtgatggtgtgaacccactttggaccatcacacacatttcagcatttgaagtgacacaagctacctggtaactgcccatggcggggtcatagtttaaatggcccaatgtcatgtagaggttaatttaatcaaaatgagctataaacatggagcaatcactgtataattttaaaatagtttacctggccaggcatggtcgtcacgcctgtaatcccagcactttgggaggccgaggcaggtggatcacctgaggtcaggagttcgagaccagcctggccaacatggcaaaacccccgtctctactaaaatacaaaaattaggtgtggtggcgggcacctgtaatcctggctactcgggaggctgaggcaggagaatcgcttgaacccgggaggcagaggctgcagtgagccgagatcgtgccactgcactccagcctgggccacagagcaagactccgtctcaaaacataaaaataaaaaaaatacaaatagctgacccgggtgggcattccaaaatgtccgcatggacgatcacgaaacaatcacggtgcgaaatgtccgcatggatgatcacgaaacaatcacggtgcggaatgtccgtatggatgatcatgacaaacaatcactgcgcaaaatgtggaggaaaattcattaccataatcacaacatttgtatcagaaaaacattacaaatttactttgcttcatgtaattttacgagttggcaatattttcttaaattggaatactctaagagaataggacatggatatgttacaagaagaagtgtattggggcaagtcttgtttttctgaagggaaatgccaccggcctgctttcataggcattgataaagccaggaaggaaataaagtcacaaccaaatagtatacactgtctctactgaattcttctaattccttcgcaacagaagtctaaatcctgcttagcctaaacatatctatagccagcgatgggcaaattatatttgctgtcagcatgatagaataagaagcagaaaccccccagcagtggggtaagattgcgcgcttcatcccctcaaaatgcagctcagccccactccctctccatgcccatcaaacaactgcacaatcacttgttactgaatttcccattcagcgttttgtttctttctgtccatacttaaagaccaaatcatttgtttgctttgaagaaaaagcaaaaacaagaacaaaaacaccaaatcatttgaaatcactgtccattaaaaaaaatcaccagtggaactaaacagttgagtggtttgggatgtgttcgccatttctgtgtttgacctacatggcctgtaattctttggaccattgtaactgtgaactatggcttaatactgttaaagaccccaaggctccactctgtagccaggtgcacctcaggctgcacaaataccccaccagaatgtcacaatcattcattgctccagctactgagtgaacagggtgcaagacagcactggcttgggttgtatttttgcagccagttaactttgcatcaggtctacacagtccttgcagcctttgatttctccagttgtagagatttgaaatggggtgcccgggttgctctcgtttttccttcaagctacctagcatgcattttacacacattggaggagtcgtatgcactgtttttctgttgctgatggaggcaagcaggccttctaattagtctaagttaaacggatgggattcacttaagaaaagcaagaagaaaagcacacgaacaggtgtcttaatgcatttggatagtttctttgcggggtgtgtgtgtgtgtgtgtgtgtgtgtgtgtgtgtgtgtgtcttggtgaaggtgaggggctgtattttcaccaagccttttcataatcaagtttgctttgcaaaccttatggccttgcaccccgcagaacagtcccttcctaatagcagggatgctctgtcatggtttttctgtaaattatcgtgtgttgggaagttctgttgaggcttagtttgatcttccatggtggacacgtctgttctgtatgtaaaaggcattacaattgtgttttagcagatgagacttgaagcctttccacagtccttgtgctctgagatggctgttgagctctgctcaactgtcgtagctgaattctttctttgcgctgaacactgggcagcctcaccatgttgccaacgtgcttctggggcccctgtcactgccgctggatgccgcgcacacaggcagagtgccttggcaggtttgtgcaccccttggcgagccagaactgggaaccccgcggggtgaccccttctcatggggggtcggggaggggagtgcctatttttaatcctgtctgtttgttgcacaatggaaatcactgtgatttgtacatatgccctaggaaaattttactgctgtctaatttatgtaataatactgttgattccaggtttatttaataaaactttgtatcttttcagaaaaaaaaaaaaa

SEQ ID NO: 1050 - protein, 358 aa, Homo sapien
MEAPGLAQAAAAESDSRKVAEETPDGAPALCPSPEALSPEPPVYSLQDFDTLATVGTGTFGRVHLVKEKTAKHFFALKVMSIPDVIRLKQEQHVHNEKSVLKEVSHPFLIRLFWTWHDERFLYMLMEYVPGGELFSYLRNRGRFSSTTGLFYSAEIICAIEYLHSKEIVYRDLKPENILLDRDGHIKLTDFGFAKKLVDRTWTLCGTPEYLAPEVIQSKGHGRAVDWWALGILIFEMLSGFPPFFDDNPFGIYQKILAGKIDFPRHLDFHVKDLIKKLLVVDRTRRLGNMKNGANDVKHHRWFRSVDWEAVPQRKLKPPIVPKIAGDGDTSNFETYPENDWDTAAPVPQKDLEIFKNF

SEQ ID NO: 1051 - DNA, 768 bp, Homo sapien
ccttcagcataaaagctgatccacaaacaagaggagcaccagacctcctcttggcttcgagatggcttcgccacaccaagagcccaaacctggagacctgattgagattttccgccttggctatgagcactgggccctgtatataggagatggctacgtgatccatctggctcctccaagtgagtaccccggggctggctcctccagtgtcttctcagtcctgagcaacagtgcagaggtgaaacgggggcgcctggaagatgtggtgggaggctgttgctatcgggtcaacaacagcttggaccatgagtaccaaccacggcccgtggaggtgatcatcagttctgcgaaggagatggttggtcagaagatgaagtacagtattgtgagcaggaactgtgagcactttgtcgcccagctgagatatggcaagtcccgctgtaaacaggtggaaaaggccaaggttgaagtcggtgtggccacggcgcttggaatcctggttgttgctggatgctcttttgcgattaggagataccaaaaaaaagcaacagcctgaagcagccacaaaatcctgtgttagaagcagctgtgggggtcccagtggagatgagcctcccccatgcctccagcagcctgaccctcgtgccctgtctcaggcgttctctagatcctttcctctgtttccctctctcgctggcaaaagtatgatctaattgaaacaagactgaaggatcaataaacagccatctgccccttcaaaaaaaaaaa

SEQ ID NO: 1052 - protein, 164 aa, Homo sapien
MASPHQEPKPGDLIEIFRLGYEHWALYIGDGYVIHLAPPSEYPGAGSSSVFSVLSNSAEVKRGRLEDVVGGCCYRVNNSLDHEYQPRPVEVIISSAKEMVGQKMKYSIVSRNCEHFVAQLRYGKSRCKQVEKAKVEVGVATALGILVVAGCSFAIRRYQKKATA

SEQ ID NO: 1053 - DNA, 10709 bp, Homo sapien
agggggcggcgctcccggcccatcccttagccccgcggcggccgtgtgggccggaggctgcctgcaccgcgtcagggaggccggcctagaaaccctccctcccagaagaaagccgatcccagttcaggtggggtcttcctcggttgcgtacctggctggagccgagctggtgggcggccggcagccggcgtttctggtgatgacagccccgaaatgaaagcagcgcggccgccgcctccgagggctgcagggagatcagcgtccagcaaataagaagcaagtcctggacccggaggaggaggagcggccgagcatctctctctgctccgccgtgtcctttagatgagcactcccggccggagccggaggtggatccgcagagctgcctctgggcgcctgaccccgcgctgacatcacaacctgtgacaggcgcatcacgcccggtacctgctcccggccgctgcccgtcctcccagcctctttgtatgccgcagacatggccagccagcaggattcgggcttctttgagatcagtatcaaatatttactgaaatcctggagtaatacttctcccgttggcaacggttacatcaagcctccggttccacctgcttctggcacgcacagggagaaagggccgccaaccatgctacccatcaatgtggacccagacagtaaaccaggagaatatgtcctcaaaagtttatttgtcaacttcaccactcaggctgaacgcaagattcgtatcattatggcagagcccctggaaaagccattgacgaaatctctgcaacgtggagaagacccccaatttgatcaggtcatcagctcaatgagctccctttctgagtactgcctgccttccattctacgtacattatttgactggtataaaaggcaaaatggcattgaggatgaatcacatgaatacagaccaagaacaagcaataaatcaaaaagcgatgaacaacagcgagattatttaatggaaagacgggacctcgccattgattttattttttctttagtattaatagaagttttgaaacagattccacttcatcctgtaatagacagtttaatacatgatgttattaacttggctttcaagcactttaaatacaaagaagggtaccttggtcccaacactggcaatatgcatattgtggcagacctgtatgcagaagtcattggagtgttggcacaagccaaattccctgctgtaaagaagaaatttatggcggagctaaaagaattacggcacaaagagcagaacccatatgtggttcaaagcattatcagcttaataatgggcatgaaattctttcgaattaagatgtatccagtggaggattttgaggcctctcttcagtttatgcaggaatgtgcacattacttcctcgaggtcaaagacaaagatatcaagcatgccttggctgggctttttgttgaaatacttgttccagttgctgctgctgttaaaaatgaagtaaatgttccctgccttagaaattttgtggaaagcctgtatgacaccacgctggaactttcttctcgaaagaagcattccttggccttgtaccccctggtgacctgtttgctctgtgtcagtcagaagcagctgttcctgaacaggtggcacattttcctcaacaactgcttgtccaaccttaaaaacaaagatcccaagatggctcgagttgcactggaatctctctacagattactttgggtttacatgattcgaattaaatgtgaaagcaacacagctactcagagccgacttataaccatcatcacaacacttttccccaaagggtcccgcggtgtggtaccaagggacatgcctctgaacatctttgtgaaaatcatccagttcattgcccaggaacgtttagattttgcaatgaaagaaatcattttcgattttctttgtgtgggaaaaccagcaaaagcattcagtctcaacccagagagaatgaacattggtttacgggcattcttggtcatagctgatagcttgcagcagaaagatggggaacctcccatgccggttacaggagccgttcttccttcaggaaacacgttaagagtaaagaaaacatatttgagtaaaacactaactgaagaggaagccaaaatgataggcatgtccttatattactctcaagtacgaaaagctgtagacaacattttaaggcaccttgataaagaagtaggaaggtgtatgatgctgactaatgtacagatgttaaacaaagaaccggaagacatgatcacgggtgagagaaagccaaaaatagatcttttcaggacctgtgttgctgctattcctcgactgcttcctgatgggatgtcaaaacttgaacttattgacttactggctaggctctctattcatatggatgatgaattgcgacatattgcacaaaattctcttcagggtttacttgttgacttctcagattggagggaagatgtactatttggctttaccaacttcctgctccgggaagtaaatgatatgcatcacacactccttgattcgtccctgaagttgctgctgcagctgctcacccagtggaaactagtcatccagacacaaggaaaagtctatgaacaagccaacaaaatcagaaattcagagctcatcgcaaatggctccagtcacagaattcagtcggaacgaggtccccactgcagtgtactccacgctgtagaaggttttgctctggttttactctgcagtttccaggtggccacacgcaaactgtccgttttaatactcaaggaaattcgagcgttgtttattgccctggggcagcctgaggatgacgacaggccgatgattgatgtcatggatcagctaagttcttccattctagaaagttttattcatgtagcagtttcggattcagcaacattaccactcacccacaatgtggatctgcagtggttggtggaatggaacgcagtcctggtcaatagccattatgatgtgaaaagcccttcccatgtctggatatttgcacagtctgtcaaagacccctgggtcctctgcctcttcagcttcctccggcaggagaacttacccaagcactgccccacagccctcagctatgcctggccttatgccttcactcggctccagtcggtgatgcctctggtggacccaaatagcccaattaatgccaagaaaaccagcactgccggcagcggagacaactatgttactttgtggagaaattacctaattctttgttttggagttgcaaaacccagtattatgagcccaggacacttaagagcttccactccagaaataatggcgaccacacctgatggtacagtgagctacgataacaaggccataggcaccccatcggtgggagttctgttaaagcagttggtgcctttgatgagactagagagcattgagatcacagagtccttagttttaggatttggaagaacaaattcccttgttttcagagaattggtagaagaacttcatccattaatgaaagaagctctggaaagaagaccagagaacaagaaacgccgagaacggcgagacttgttaaggctacaactacttcgaatttttgaacttttggctgatgctggtgtaataagtgacagcacaaatggagccctagagcgggatactttagccctgggagctttgttcttagaatatgtggacttgacccgcatgctcctagaagctgaaaatgacaaagaagttgaaattcttaaagatatccgggcacattttagtgcaatggtggccaacttgattcagtgtgttccagttcaccaccgaagatttctcttcccccagcaaagtctgaggcaccaccttttcatcttattcagccagtgggcaggacccttcagcattatgttcactcctctggatcgttacagtgacagaaatcatcagattacaagatatcagtattgtgcattaaaagcaatgtcagcagtactgtgctgtggccctgtctttgacaatgtgggcctttccccagatggctacctatataaatggcttgacaacattctggcttgtcaagatttacgagttcatcaacttggctgcgaagttgttgtcttgctactggaacttaatcctgaccaaataaatctttttaactgggcaattgaccgatgctacacaggttcctaccaacttgcatctggctgcttcaaagccatagcaactgtgtgtggaagcaggaactatcccttcgacatagtgacattgttaaaccttgttctattcaaggcctctgacaccaacagagagatttatgaaatctccatgcagctcatgcagatccttgaagcaaagctttttgtatactcaaagaaagtcgctgagcaaagaccgggaagtattctctatggaacacacggcccgctgccacccctctacagcgtgtcactcgccctcttgtcatgtgagctggccaggatgtaccctgagctcacactccccctcttctcaggtaagccagcgattccccacaacacaccccaacgggcgccagatcatgcttacctacctgctgccctggctgcacaacatcgagctggtggacagcaggctcctcctcccgggtcgagccccagcagcccagaggacgaagtcaaggaccgggaaggtgacgtgactgcttctcacgggctgagaggaaatggctggggctctccagaagccacgtcactggtcctgaacaacctcatgtacatgacggccaagtatggagatgaagttcctgggccagaaatggaaaatgcttggaatgctttagccaacaatgagaaatggagcaacaacctgaggatcaccttgcagttcctgattagcctctgtggggtcagcagcgacacagttctcctaccctatattaaaaaagtggcaatatacttgtgccgtaacaacaccattcaaaccatggaagagcttctctttgagctgcagcagacagaacccgtgaaccccatcgtccagcattgtgacaacccgcccttctaccgcttcacggccagtagcaaggcttccgcagcagcctcaggaaccacctctagcagcaatacagtggttgctggccaggaaaatttcccagatgctgaggagaacaagatattgaaagaatctgatgaaaggtttagtaatgtcatcagagcccacactcgcctcgagtcaagatacagcaatagctctggaggatcctacgatgaagataaaaatgatccaatttctccctacacgggctggttgctgactattacagagaccaagcagccgcagcccttaccgatgccttgtactggaggatgctgggcccccctggttgactatctcccggagaccatcactccccgggggccactccacaggtgcaatattgctgtaatttttatgactgaaatggtggtggatcacagtgtacgagaagactgggcgcttcatctaccattattacttcatgctgtcttcttaggtttagaccactaccggcctgaagtctttgaacacagcaaaaaactgcttcttcacctcttgattgccctctcttgcaacagcaatttccattccattgcttccgtgctcctgcagacccgagagatgggtgaagctaagactctaaccgtgcagccagcctaccaacctgaatatctctatacaggtggctttgacttcctgagagaggaccagtcatccccggtgcctgactcagggcttagttcaagctccacctcctctagcatcagtctgggaggcagcagtggaaacctcccacagatgacccaggaggtagaagatgtggacacagctgctgaaacagatgagaaggcaaacaagctcattgagtttctcacgaccagggcatttggtccactttggtgccatgaagacatcacacctaaaaatcaaaattcaaagagtgctgaacagctcactaattttctacgtcacgttgtatctgtatttaaagattccaaatcaggcttccatctggagcaccagttgagtgaagttgcattgcagacagccctcgcaagctcttcaaggcactatgctggtcggtccttccagatattccgggccctcaagcaacctctgtcagcacatgccttatctgaccttctctcaagattggtggaggtgataggagaacatggagatgagattcagggttatgtaatggaagcgctcctaaccttggaggcggctgtggataacttgtctgactgcttgaagaacagtgacctcctaactgtattgtcccgctcttcctcaccagatttaagctccagcagtaaactaacagcaagcagaaagagcacaggacaactaaacatgaacccgggaaccaccagcggcaacaccgcaactgccgaacggagccggcatcaacgaagcttctctgtgcccaagaagtttggtgtcatcgaccgatcctctgacccacctcgaagtgccacactggacagaattcaggcttgtacccaacaaggcctctcctcaaaaaccagaagctcatcctccttgaaggacagtctcacggacccatcccacataaaccatcccaccaacctgctggccaccatattctgggtcacagtggccttgatggagtctgattttgagtttgaatacttaatggccttaaggctgttgagcagactactggcacatatgccactcgataaggctgagaaccgagaaaagcttgagaaactccaggcacagctgaagtgggccgacttctccgggctgcagcagctgctgctgaaaggattcacatccctcaccaccacagacctgaccctgcagctcttcagtctgctgacaccagtgtccaaaatatccatggtggatgcatcccacgctattgggtttccactgaatgtcttgtgtctcctgcctcagctgattcagcattttgaaaatcccaatcagttctgtaaggatatagccgaaaggattgctcaggtttgtttagaagagaagaaccccaaactttcaaatcttgcacatgtcatgactctttataaaacgcacagctacacgagggactgtgccacgtgggtcaatgtggtctgtcgataccttcatgaagcatatgctgacattaccttgaatatggttacctacctggcagagctgctggagaagggcctccctagtgtgcagcagcccctgctccaggtgatctacagtcttctcagctacatggacctttctgtcgttcctgtcaaacagttcaatgtggaagttctgaagacaattgaaaaatatgtgcaaagtgttcactggagagaagctctgaatatcttgaagctggtagtttctcggtcagccagccttgttttaccttcataccagcacagtgacctctcaaaaatagaaatacatcgagtgtggactagtgcttccaaggaattacctgggaaaaccctggacttccacttcgatatttcggagactccaatcatcgggaggcggtatgatgagctgcagaattcttctgggcgtgatgggaagcccagggccatggccgtcacccggagcacatcttccacttcctcaggctccaactccaacgtccttgttccagtgagctggaaaaggccccagtattctcagaagagaacaaaagagaagttggtacatgtcctttctctgtgtggccaagaagtaggattgagcaaaaatccatcagtgattttttcatcgtgtggggatctggatctgcttgagcaccagacaagcttggtatcttctgaggacggtgcccgagagcaggagaacatggatgacacaaacagcgagcagcagtttagagtcttcagagacttcgacttcctagatgtggagctggaggatggagagggtgagagtatggacaatttcaactggggagtgcgcagacgttctctggacagcctggataagtgtgatatgcagattctggaggagcgccaactgtcaggaagcactcctagcctgaataaaatgcaccatgaggactccgatgaatcatccgaggaggaggacctcacagccagccagatcctggagcactcagacctaatcatgactctctccccctctgaagagacgaatcccatggagctgctcaccacagcctgtgactcgacccctgcagaacctcattcctttaacaccagaatgtccagctttgatgcttccttgcctgatatgaataatctgcagatttctgagggttcaaaggctgaagctgttcgtgaggaggaggacaccaccgtgcatgaggatgatctttctagttccatcaatgaactcccagcagcttttgaatgcagcgacagctttagcctggacatgactgagggggaagaaaaaggcaatcgggcactggaccagtttaccctggcgagctttggagaaggtgacaggggagtctctccccctccctcgcccttcttctcagccatccttgccgcctttcagcccgcagcctgtgacgatgccgaggaggcctggcgcagccacatcaaccagcttatgtgtgactcagatggctcctgtgctgtgtatacatttcatgtgttctcctccttgtttaagaatattcagaaaaggttctgcttcctaacctgtgatgcagccagttaccttggagataacctccggggaatcggatccaaatttgtcagctcttcccagatgctcacctcctgctctgaatgtcctacactttttgtggatgccgagactctcctttcatgtggacttctggacaagctcaagttcagtgtgttagaactgcaagaatatttggatacctacaacaacaggaaagaggccacactctcttggcttgcaaattgtaaggcaacatttgcagggggatcaagagatggagtaattacctgtcaaccaggggactccgaagaaaagcaattggaactgtgtcagagattatataagctacacttccagctgctattgctttttcagtcctactgtaagctcatcggccaggtgcacgaagttagctccatgccagagctgctgaatatgtccagggaactgagtgacctaaagaaacacctgaaggaagccagtgcagtcattgcagctgaccctctctattcagacggcgcgtggtccgagcccaccttcacgtccactgaagcagccatccagtccatgctggagtgcctgaagaacaacgaactcggcaaagctttgcggcagatcagggagtgcagaagtctgtggcccaatgacatctttggaagcagttctgatgatgaggtccagacactactgaatatttatttccgtcaccaaactctgggacagacgggtacttatgccctggtggggtctaaccagagcctgaccgagatctgcaccaagctgatggagctgaacatggagatccgggacatgatccgcagggcccagagttaccgagtcctcactacttttcttccagactccagtgtttctggcactagtctctgacaggagcctcctgtccccactgggttccaaactgcagtgctgccatgctggggcaacgtcattcagtgtcttctcggccttcaaaaggcttggacagactgttctccctcttgttacctgtagggctttttctaaagaggatggcagaacttccaacgtgtagcaatactataagaaccaaggtagcttagaacgtcctggacagactccactcatcatgctgtgtggcacaaatgtgttacatttgaccgagcatatgcaactcgctactgaagaagtgacttccgttgcataccaaagccgactacactgaacagtaccttcctttctagaaacaattttagattggcaaaagtgcaatgttttcttcactcaaaaaattttatattctcaaacatgtatattctttccctgtcttgttccattttcttttcttttttcttttttctttttcctttctttcgtgggctgagaaaggggcaggcaaaatgaagctggccactgaaaactgtaagatggtcaaaagctgacagcctgtgtatgtgaaaagggaattgtaaatggactgcaatgtaatgtacactgtaatttgaatacaattactgtatctaaaaggagctgctatgaagtacctttcttatgttgctaggctactgtttctgaaagccctggatctctttgcaccaaaaatggtccagatagactctttttaaggatcttggctgctttttactagaaggttgcttttatgagcatatttatactgctgaaggatgagtgttaattttaattaactttgccgttttgtagagaaaactattcacaagataaattccaagtcttttcacctgtcaggcatgcatattttaatatctgtttggatagtcagaagtagaatcataaaggtaaaatatgagttgttactttgtttcttcgatgtcatattttatgtgtaatatatatgtaaagggccattcttaagttctctccttaaacttaatgctgtcaagtgttagatgtgtgcatgtgaacttgttgcactgcagaaacatattcagagtttatctatgtaacttattcactctgtaaatacatttaaagtttttgtgatgtaagcttaattgatattctgttcagaactttctttagactaaaaaaaaaaaaaaaagacaaa

SEQ ID NO: 1054 - protein, 2000 aa, Homo sapien
MASQQDSGFFEISIKYLLKSWSNTSPVGNGYIKPPVPPASGTHREKGPPTMLPINVDPDSKPGEYVLKSLFVNFTTQAERKIRIIMAEPLEKPLTKSLQRGEDPQFDQVISSMSSLSEYCLPSILRTLFDWYKRQNGIEDESHEYRPRTSNKSKSDEQQRDYLMERRDLAIDFIFSLVLIEVLKQIPLHPVIDSLIHDVINLAFKHFKYKEGYLGPNTGNMHIVADLYAEVIGVLAQAKFPAVKKKFMAELKELRHKEQNPYVVQSIISLIMGMKFFRIKMYPVEDFEASLQFMQECAHYFLEVKDKDIKHALAGLFVEILVPVAAAVKNEVNVPCLRNFVESLYDTTLELSSRKKHSLALYPLVTCLLCVSQKQLFLNRWHIFLNNCLSNLKNKDPKMARVALESLYRLLWVYMIRIKCESNTATQSRLITIITTLFPKGSRGVVPRDMPLNIFVKIIQFIAQERLDFAMKEIIFDFLCVGKPAKAFSLNPERMNIGLRAFLVIADSLQQKDGEPPMPVTGAVLPSGNTLRVKKTYLSKTLTEEEAKMIGMSLYYSQVRKAVDNILRHLDKEVGRCMMLTNVQMLNKEPEDMITGERKPKIDLFRTCVAAIPRLLPDGMSKLELIDLLARLSIHMDDELRHIAQNSLQGLLVDFSDWREDVLFGFTNFLLREVNDMHHTLLDSSLKLLLQLLTQWKLVIQTQGKVYEQANKIRNSELIANGSSHRIQSERGPHCSVLHAVEGFALVLLCSFQVATRKLSVLILKEIRALFIALGQPEDDDRPMIDVMDQLSSSILESFIHVAVSDSATLPLTHNVDLQWLVEWNAVLVNSHYDVKSPSHVWIFAQSVKDPWVLCLFSFLRQENLPKHCPTALSYAWPYAFTRLQSVMPLVDPNSPINAKKTSTAGSGDNYVTLWRNYLILCFGVAKPSIMSPGHLRASTPEIMATTPDGTVSYDNKAIGTPSVGVLLKQLVPLMRLESIEITESLVLGFGRTNSLVFRELVEELHPLMKEALERRPENKKRRERRDLLRLQLLRIFELLADAGVISDSTNGALERDTLALGALFLEYVDLTRMLLEAENDKEVEILKDIRAHFSAMVANLIQCVPVHHRRFLFPQQSLRHHLFILFSQWAGPFSIMFTPLDRYSDRNHQITRYQYCALKAMSAVLCCGPVFDNVGLSPDGYLYKWLDNILACQDLRVHQLGCEVVVLLLELNPDQINLFNWAIDRCYTGSYQLASGCFKAIATVCGSRNYPFDIVTLLNLVLFKASDTNREIYEISMQLMQILEAKLFVYSKKVAEQRPGSILYGTHGPLPPLYSVSLALLSCELARMYPELTLPLFSGKPAIPHNTPQRAPDHAYLPAALAAQHRAGGQQAPPPGSSPSSPEDEVKDREGDVTASHGLRGNGWGSPEATSLVLNNLMYMTAKYGDEVPGPEMENAWNALANNEKWSNNLRITLQFLISLCGVSSDTVLLPYIKKVAIYLCRNNTIQTMEELLFELQQTEPVNPIVQHCDNPPFYRFTASSKASAAASGTTSSSNTVVAGQENFPDAEENKILKESDERFSNVIRAHTRLESRYSNSSGGSYDEDKNDPISPYTGWLLTITETKQPQPLPMPCTGGCWAPLVDYLPETITPRGPLHRCNIAVIFMTEMVVDHSVREDWALHLPLLLHAVFLGLDHYRPEVFEHSKKLLLHLLIALSCNSNFHSIASVLLQTREMGEAKTLTVQPAYQPEYLYTGGFDFLREDQSSPVPDSGLSSSSTSSSISLGGSSGNLPQMTQEVEDVDTAAETDEKANKLIEFLTTRAFGPLWCHEDITPKNQNSKSAEQLTNFLRHVVSVFKDSKSGFHLEHQLSEVALQTALASSSRHYAGRSFQIFRALKQPLSAHALSDLLSRLVEVIGEHGDEIQGYVMEALLTLEAAVDNLSDCLKNSDLLTVLSRSSSPDLSSSSKLTASRKSTGQLNMNPGTTSGNTATAERSRHQRSFSVPKKFGVIDRSSDPPRSA

SEQ ID NO: 1055 - DNA, 1855 bp, Homo sapien
ctgggtgcgtggggctgcctcgccgcgtctcgccacgggctctgccagcagacagccttggcacacaggcacaagggctggagcccagagatgagagtgcccaagggagatgtgagcctggcgggctgcccgctaacctgtcgctgaagccccagaagcgggccctcaggccaggcctaccctgcctccggcccagcatgcgcctgtcggtgcggagggtgctgctggcagccggctgcgccctggtcctggtgctggcggttcagctgggacagcaggtgctagagtgccgggcggtgctggcgggcctgcggagcccccggggggccatgcggcctgagcaggaggagctggtgatggtgggcaccaaccacgtggaataccgctatggcaaggccatgccgctcatcttcgtgggtggcgtgcctcgcagtggcaccacgttgatgcgcgccatgctggacgcccaccccgaggtgcgctgcggcgaggagacccgcatcatcccgcgcgtgctggccatgcgccaggcctggtccaagtctggccgtgagaagctgcggctggatgaggcgggggtgacggatgaggtgctggacgccgccatgcaggccttcatcctggaggtgattgccaagcacggagagccggcccgcgtgctctgcaacaaggacccatttacgctcaagtcctcggtctacctgtcgcgcctgttccccaactccaagttcctgctgatggtgcgggacggccgggcctccgtgcactccatgatcacgcgcaaagtcaccattgcgggctttgacctcagcagctaccgtgactgcctcaccaagtggaacaaggccatcgaggtgatgtacgcccagtgcatggaggtaggcaaggagaagtgcttgcctgtgtactacgagcagctggtgctgcaccccaggcgctcactcaagctcatcctcgacttcctcggcatcgcctggagcgacgctgtcctccaccatgaagacctcattggcaagcccggtggtgtctccctgtccaagatcgagcggtccacggaccaggtcatcaagcctgttaacctggaagcgctctccaagtggactggccacatccctggggatgtggtgcgggacatggcccagatcgcccccatgctggctcagctcggctatgacccttatgcaaacccccccaactatggcaaccctgaccccttcgtcatcaacaacacacagcgggtcttgaaaggggactataaaacaccagccaatctgaaaggatattttcaggtgaaccagaacagcacctcctcccacttaggaagctcgtgatttccagatctccgcaaatgacttcattgccaagaagagaagaaaatgcatttaagtggaaatcggacctctaatccaagcatattgcttgctattaatcgccaaaacaggactgctgatgaggaatgtatttgcatatgtttgcaaaagctgaatcattgaaaacgtaccttgaaactctctatctctggacactccagggtagagaatgaagggtatggaagtagtccggcttttgaaacttaggtattttatatttttcccctcaagaacttttttttaagagacagatttgccatcctccttaatttgcaggactgccttggtggctttgtttgctgggacaaggcccacaacctgtgcctctcctattgacccttactttgaattcaaagaatctatttaagagtttaatatatgaggctttctttgattcctcctcagttctacctagtttcacagaggaaaaaaatactctttgaataaagtgaacagaggctcatttgtttgtgcctcactttaca

SEQ ID NO: 1056 - protein, 377 aa, Homo sapien
MRLSVRRVLLAAGCALVLVLAVQLGQQVLECRAVLAGLRSPRGAMRPEQEELVMVGTNHVEYRYGKAMPLIFVGGVPRSGTTLMRAMLDAHPEVRCGEETRIIPRVLAMRQAWSKSGREKLRLDEAGVTDEVLDAAMQAFILEVIAKHGEPARVLCNKDPFTLKSSVYLSRLFPNSKFLLMVRDGRASVHSMITRKVTIAGFDLSSYRDCLTKWNKAIEVMYAQCMEVGKEKCLPVYYEQLVLHPRRSLKLILDFLGIAWSDAVLHHEDLIGKPGGVSLSKIERSTDQVIKPVNLEALSKWTGHIPGDVVRDMAQIAPMLAQLGYDPYANPPNYGNPDPFVINNTQRVLKGDYKTPANLKGYFQVNQNSTSSHLGSS

SEQ ID NO: 1057 - DNA, 2591 bp, Homo sapien
gcggccgcctccccctccccctccccctctttcttctcctccctcgtcgccgccgccgccgccgccgcctcagccttcgcctcagcgccgcccgctcgccgcgcgcggcgggatggacgatcaatccaggatgctgcagactctggccggggtgaacctggctggccactcggtgcaggggggcatggccctgccgcctcccccgcacggccacgaaggggcggacggcgacggcaggaagcaggacatcggcgacatcctccaccagatcatgaccatcaccgaccagagcttggacgaggcgcaagcaaagaaacatgccctgaactgtcacagaatgaaaccagcgctcttcagcgtcctgtgtgagatcaaagagaaaacaggtctcagcatcagaggagcccaggaggaggaccctcccgatccccagctaatgagactggacaatatgcttttggcagaaggggtttcaggtcctgagaaaggtgggggatcggcggcagcagctgcagccgcggcagcctctggaggttcttcagataactctattgaacactcagattacagagccaaattgacccagatcagacaaatctatcacacagaactggagaaatatgaacaggcatgtaatgaatttactacacatgtgatgaaccttctccgagaacagagtagaacacgtcccatttctccaaaagagattgaaagaatggtgggcatcatccatcgaaaatttagttccattcagatgcagctcaaacaaagcacttgtgaagcagttatgattttaagatcaaggttccttgatgccagacggaaaaggcgtaacttcagtaaacaggccacagaaatcttgaatgaatatttttactcacacctcagcaacccctaccccagtgaagaagccaaagaggagctggccaagaaatgcagcatcacagtgtcacaggtatccaattggtttggcaacaaacgaatcaggtacaagaagaacattggcaagtttcaggaagaagccaacctctatgctgcaaagacggccgtgacagctgcacacgcagtagcagcagctgtgcagaacaaccagaccaattcgcccaccacaccaaattccggttcttctggttcttttaacctcccaaattctggggacatgttcatgaacatgcagagtctgaatggggattcttaccaagggtcccaagtcggagccaatgtgcaatcacaggtggataccctccgtcatgttatcaatcagacgggaggctacagtgatggccttggaggaaattcactgtacagtccacataatttaaatgctaatggaggctggcaggacgcaacaactccatcttctgtgacttctcctacagaaggcccaggaagtgtgcactcggatacctctaactaatctctggccacacttttcctgagctacatgccttgataagtgcattcagagcaataggaggaaaaggaaagcgtttttgtagcccaccatctacagctttactgtaaaaccttgtcttattcgagaacttggtaaatctgtttttaaggaatcataatcatttgtatttatacttaaaaacacacaatgttaaaaaaaataaagcactttatccaattaggccaagatttaacattgttgacagtcctgtagctattttatcataatttattatcaatattttacattaatggtttcacagttgccaattacttggccttaagggtaaaaagtacaatatacactaaacctcaaccgttaaagcagatgcaaaaattcacctcacctaaattgaacttcttgcatatttccattactgacttggattgtctttctttcatatcactaatggagttggaataaagagctgtttgcctatccctgttaatgatggttgtgtttaagaatcttcctcgtcacgtttgtgttcagatctcttatgttataattagatcagagactggtagcatcgtttctctctctgaaagcaccagtgcccagagtctgctcggtaataaaattatggatccagattgttctgagagacgaagatacttgctgctgatagaggtgaaaacgagattgatccgtctggggttttacggtgtgcactgggtgctgcacagacttgtcaaggtttgctacgtcctctgggcatctgcaaaaggccctgctctctggagtgttgtatatagtgtagcaaaagagtatttatacatcccaccaatcaaaacacagctttattacctcatgcgaactcatacaaaccaatagaatttcaacatgttctgtagcttagagtgctcacttactacctctgaacaatactcacgctgtagtttgtctctttcttatctttttgcatcttgtaattaactctttgtttcccttcataaaatgtaatgtacattgtaatcttttaaaagaaaaatcagggttgcacttgcaacttttaaaaaaccgagtgtggaaacattgggtcttaattcaacacaggatcggtaaaactgttgtaaatactgagaaacattttgaatgttcttcaatcttattactaatccatgcaaaaaaaaaa

SEQ ID NO: 1058 - protein, 434 aa, Homo sapien
MDDQSRMLQTLAGVNLAGHSVQGGMALPPPPHGHEGADGDGRKQDIGDILHQIMTITDQSLDEAQAKKHALNCHRMKPALFSVLCEIKEKTGLSIRGAQEEDPPDPQLMRLDNMLLAEGVSGPEKGGGSAAAAAAAAASGGSSDNSIEHSDYRAKLTQIRQIYHTELEKYEQACNEFTTHVMNLLREQSRTRPISPKEIERMVGIIHRKFSSIQMQLKQSTCEAVMILRSRFLDARRKRRNFSKQATEILNEYFYSHLSNPYPSEEAKEELAKKCSITVSQVSNWFGNKRIRYKKNIGKFQEEANLYAAKTAVTAAHAVAAAVQNNQTNSPTTPNSGSSGSFNLPNSGDMFMNMQSLNGDSYQGSQVGANVQSQVDTLRHVINQTGGYSDGLGGNSLYSPHNLNANGGWQDATTPSSVTSPTEGPGSVHSDTSN

SEQ ID NO: 1059 - DNA, 2253 bp, Homo sapien
ggaagacttgggtccttgggtcgcaggtgggagccgacgggtgggtagaccgtgggggatatctcagtggcggacgaggacggcggggacaaggggcggctggtcggagtggcggagcgtcaagtcccctgtcggttcctccgtccctgagtgtccttggcgctgccttgtgcccgcccagcgcctttgcatccgctcctgggcaccgaggcgccctgtaggatactgcttgttacttattacagctagaggcatcatggaccgatctaaagaaaactgcatttcaggacctgttaaggctacagctccagttggaggtccaaaacgtgttctcgtgactcagcaaattccttgtcagaatccattacctgtaaatagtggccaggctcagcgggtcttgtgtccttcaaattcttcccagcgcgttcctttgcaagcacaaaagcttgtctccagtcacaagccggttcagaatcagaagcagaagcaattgcaggcaaccagtgtacctcatcctgtctccaggccactgaataacacccaaaagagcaagcagcccctgccatcggcacctgaaaataatcctgaggaggaactggcatcaaaacagaaaaatgaagaatcaaaaaagaggcagtgggctttggaagactttgaaattggtcgccctctgggtaaaggaaagtttggtaatgtttatttggcaagagaaaagcaaagcaagtttattctggctcttaaagtgttatttaaagctcagctggagaaagccggagtggagcatcagctcagaagagaagtagaaatacagtcccaccttcggcatcctaatattcttagactgtatggttatttccatgatgctaccagagtctacctaattctggaatatgcaccacttggaacagtttatagagaacttcagaaactttcaaagtttgatgagcagagaactgctacttatataacagaattggcaaatgccctgtcttactgtcattcgaagagagttattcatagagacattaagccagagaacttacttcttggatcagctggagagcttaaaattgcagattttgggtggtcagtacatgctccatcttccaggaggaccactctctgtggcaccctggactacctgccccctgaaatgattgaaggtcggatgcatgatgagaaggtggatctctggagccttggagttctttgctatgaatttttagttgggaagcctccttttgaggcaaacacataccaagagacctacaaaagaatatcacgggttgaattcacattccctgactttgtaacagagggagccagggacctcatttcaagactgttgaagcataatcccagccagaggccaatgctcagagaagtacttgaacacccctggatcacagcaaattcatcaaaaccatcaaattgccaaaacaaagaatcagctagcaaacagtcttaggaatcgtgcagggggagaaatccttgagccagggctgccatataacctgacaggaacatgctactgaagtttattttaccattgactgctgccctcaatctagaacgctacacaagaaatatttgttttactcagcaggtgtgccttaacctccctattcagaaagctccacatcaataaacatgacactctgaagtgaaagtagccacgagaattgtgctacttatactggttcataatctggaggcaaggttcgactgcagccgccccgtcagcctgtgctaggcatggtgtcttcacaggaggcaaatccagagcctggctgtggggaaagtgaccactctgccctgaccccgatcagttaaggagctgtgcaataaccttcctagtacctgagtgagtgtgtaacttattgggttggcgaagcctggtaaagctgttggaatgagtatgtgattctttttaagtatgaaaataaagatatatgtacagacttgtattttttctctggtggcattcctttaggaatgctgtgtgtctgtccggcaccccggtaggcctgattgggtttctagtcctccttaaccacttatctcccatatgagagtgtgaaaaataggaacacgtgctctacctccatttagggatttgcttgggatacagaagaggccatgtgtctcagagctgttaagggcttatttttttaaaacattggagtcatagcatgtgtgtaaactttaaatatgcaaataaataagtatctatgtctaaaaaaaaaaaaaaaa

SEQ ID NO: 1060 - protein, 403 aa, Homo sapien
MDRSKENCISGPVKATAPVGGPKRVLVTQQIPCQNPLPVNSGQAQRVLCPSNSSQRVPLQAQKLVSSHKPVQNQKQKQLQATSVPHPVSRPLNNTQKSKQPLPSAPENNPEEELASKQKNEESKKRQWALEDFEIGRPLGKGKFGNVYLAREKQSKFILALKVLFKAQLEKAGVEHQLRREVEIQSHLRHPNILRLYGYFHDATRVYLILEYAPLGTVYRELQKLSKFDEQRTATYITELANALSYCHSKRVIHRDIKPENLLLGSAGELKIADFGWSVHAPSSRRTTLCGTLDYLPPEMIEGRMHDEKVDLWSLGVLCYEFLVGKPPFEANTYQETYKRISRVEFTFPDFVTEGARDLISRLLKHNPSQRPMLREVLEHPWITANSSKPSNCQNKESASKQS

SEQ ID NO: 1061 - DNA, 696 bp, Homo sapien
ttccccccccccccccccccccccgcccgagcacaggacacagctgggttctgaagcttctgagttctgcagcctcacctctgagaaaacctcttttccaccaataccatgaagctctgcgtgactgtcctgtctctcctcatgctagtagctgccttctgctctccagcgctctcagcaccaatgggctcagaccctcccaccgcctgctgcttttcttacaccgcgaggaagcttcctcgcaactttgtggtagattactatgagaccagcagcctctgctcccagccagctgtggtattccaaaccaaaagaagcaagcaagtctgtgctgatcccagtgaatcctgggtccaggagtacgtgtatgacctggaactgaactgagctgctcagagacaggaagtcttcagggaaggtcacctgagcccggatgcttctccatgagacacatctcctccatactcaggactcctctccgcagttcctgtcccttctcttaatttaatcttttttatgtgccgtgttattgtattaggtgtcatttccattatttatattagtttagccaaaggataagtgtcctatggggatggtccactgtcactgtttctctgctgttgcaaatacatggataacacatttgattctgtgtgttttccataataaaactttaaaataaaatgcagacagtta

SEQ ID NO: 1062 - protein, 92 aa, Homo sapien
MKLCVTVLSLLMLVAAFCSPALSAPMGSDPPTACCFSYTARKLPRNFVVDYYETSSLCSQPAVVFQTKRSKQVCADPSESWVQEYVYDLELN

SEQ ID NO: 1063 - DNA, 1099 bp, Homo sapien
tcctgcgttgctgggaagttctggaaggaagcatgtgctccagaggttgggattcgtgtctggctctggaattgctactgctgcctctgtcactcctggtgaccagcattcaaggtcacttggtacatatgaccgtggtctccggcagcaacgtgactctgaacatctctgagagcctgcctgagaactacaaacaactaacctggttttatactttcgaccagaagattgtagaatgggattccagaaaatctaagtactttgaatccaaatttaaaggcagggtcagacttgatcctcagagtggcgcactgtacatctctaaggtccagaaagaggacaacagcacctacatcatgagggtgttgaaaaagactgggaatgagcaagaatggaagatcaagctgcaagtgcttgaccctgtacccaagcctgtcatcaaaattgagaagatagaagacatggatgacaactgttatttgaaactgtcatgtgtgatacctggcgagtctgtaaactacacctggtatggggacaaaaggcccttcccaaaggagctccagaacagtgtgcttgaaaccacccttatgccacataattactccaggtgttatacttgccaagtcagcaattctgtgagcagcaagaatggcacggtctgcctcagtccaccctgtaccctggcccggtcctttggagtagaatggattgcaagttggctagtggtcacggtgcccaccattcttggcctgttacttacctgagatgagctcttttaactcaagcgaaacttcaaggccagaagatcttgcctgttggtgatcatgctcctcaccaggacagagactgtataggctgaccagaagcatgctgctgaattatcaacgaggattttcaagttaacttttaaatactggttattatttaattttatatccctttgttgttttctagtacacagagatatagagatacacatgcttttttcccacccaaaattgtgacaacattatgtgaatgttttattattttttaaaataaacatttgatataattatcaattaactgaaaaaaaaaaaaaaaaaaaaaaaaaaaaaaa

SEQ ID NO: 1064 - protein, 243 aa, Homo sapien
MCSRGWDSCLALELLLLPLSLLVTSIQGHLVHMTVVSGSNVTLNISESLPENYKQLTWFYTFDQKIVEWDSRKSKYFESKFKGRVRLDPQSGALYISKVQKEDNSTYIMRVLKKTGNEQEWKIKLQVLDPVPKPVIKIEKIEDMDDNCYLKLSCVIPGESVNYTWYGDKRPFPKELQNSVLETTLMPHNYSRCYTCQVSNSVSSKNGTVCLSPPCTLARSFGVEWIASWLVVTVPTILGLLLT

SEQ ID NO: 1065 - DNA, 1932 bp, Homo sapien
ggcacgaggcctcgtgccgccgggctcttggtacctcagcgcgagcgccaggcgtccggccgccgtggctatgttcgtgtccgatttccgcaaagagttctacgaggtggtccagagccagagggtccttctcttcgtggcctcggacgtggatgctctgtgtgcgtgcaagatccttcaggccttgttccagtgtgaccacgtgcaatatacgctggttccagtttctgggtggcaagaacttgaaactgcatttcttgagcataaagaacagtttcattattttattctcataaactgtggagctaatgtagacctattggatattcttcaacctgatgaagacactatattctttgtgtgtgacacccataggccagtcaatgtcgtcaatgtatacaacgatacccagatcaaattactcattaaacaagatgatgaccttgaagttcccgcctatgaagacatcttcagggatgaagaggaggatgaagagcattcaggaaatgacagtgatgggtcagagccttctgagaagcgcacacggttagaagaggagatagtggagcaaaccatgcggaggaggcagcggcgagagtgggaggcccggagaagagacatcctctttgactacgagcagtatgaatatcatgggacatcgtcagccatggtgatgtttgagctggcttggatgctgtccaaggacctgaatgacatgctgtggtgggccatcgttggactaacagaccagtgggtgcaagacaagatcactcaaatgaaatacgtgactgatgttggtgtcctgcagcgccacgtttcccgccacaaccaccggaacgaggatgaggagaacacactctccgtggactgcacacggatctcctttgagtatgacctccgcctggtgctctaccagcactggtccctccatgacagcctgtgcaacaccagctataccgcagccaggttcaagctgtggtctgtgcatggacagaagcggctccaggagttccttgcagacatgggtcttcccctgaagcaggtgaagcagaagttccaggccatggacatctccttgaaggagaatttgcgggaaatgattgaagagtctgcaaataaatttgggatgaaggacatgcgcgtgcagactttcagcattcattttgggttcaagcacaagtttctggccagcgacgtggtctttgccaccatgtctttgatggagagccccgagaaggatggctcagggacagatcacttcatccaggctctggacagcctctccaggagtaacctggacaagctgtaccatggcctggaactcgccaagaagcagctgcgagccacccagcagaccattgccagctgcctttgcaccaacctcgtcatctcccaggggcctttcctgtactgctctctcatggagggcactccagatgtcatgctgttctctaggccggcatccctaagcctgctcagcaaacacctgctcaagtcctttgtgtgttcgacaaagaaccggcgctgcaaactgctgcccctggtgatggctgcccccctgagcatggagcatggcacagtgaccgtggtgggcatccccccagagaccgacagctcggacaggaagaacttttttgggagggcgtttgagaaggcagcggaaagcaccagctcccggatgctgcacaaccattttgacctctcagtaattgagctgaaagctgaggatcggagcaagtttctggacgcacttatttccctcctgtcctaggaatttgattcttccagaatgaccttcttatttatgtaactggctttcatttagattgtaagttatggacatgatttgagatgtagaagccattttttattaaataaaatgcttattttaggctccgtccccaaaaaaaaaaaaaaaaaaaaaaaaaaaaa

SEQ ID NO: 1066 - protein, 566 aa, Homo sapien
MFVSDFRKEFYEVVQSQRVLLFVASDVDALCACKILQALFQCDHVQYTLVPVSGWQELETAFLEHKEQFHYFILINCGANVDLLDILQPDEDTIFFVCDTHRPVNVVNVYNDTQIKLLIKQDDDLEVPAYEDIFRDEEEDEEHSGNDSDGSEPSEKRTRLEEEIVEQTMRRRQRREWEARRRDILFDYEQYEYHGTSSAMVMFELAWMLSKDLNDMLWWAIVGLTDQWVQDKITQMKYVTDVGVLQRHVSRHNHRNEDEENTLSVDCTRISFEYDLRLVLYQHWSLHDSLCNTSYTAARFKLWSVHGQKRLQEFLADMGLPLKQVKQKFQAMDISLKENLREMIEESANKFGMKDMRVQTFSIHFGFKHKFLASDVVFATMSLMESPEKDGSGTDHFIQALDSLSRSNLDKLYHGLELAKKQLRATQQTIASCLCTNLVISQGPFLYCSLMEGTPDVMLFSRPASLSLLSKHLLKSFVCSTKNRRCKLLPLVMAAPLSMEHGTVTVVGIPPETDSSDRKNFFGRAFEKAAESTSSRMLHNHFDLSVIELKAEDRSKFLDALISLLS

SEQ ID NO: 1067 - DNA, 1479 bp, Homo sapien
cgagctgccatgagcctctgggtggacaagtatcggccctgctccttgggacggctggactatcacaaggagcaggcggcccagctgcggaacctggtgcagtgtggtgactttcctcatctgttagtgtacggaccatcaggtgctggaaaaaagacaagaattatgtgtattttacgtgaactttatggtgttggagtggaaaaattgagaattgaacatcagaccatcacaactccatctaaaaaaaaaattgaaattagcaccattgcaagtaactaccaccttgaagttaatcctagtgatgctggaaatagtgaccgagtagtcattcaggagatgttgaaaacagtggcacaatcacaacaacttgaaacaaactctcaaagggattttaaagtggtattattgacagaagttgacaaactcaccaaagatgctcagcatgccttgcgaagaaccatggaaaaatatatgtctacctgcagattgatcttgtgctgcaattctacatctaaagtgatcccacctattcgtagtaggtgcttggcggttcgtgtgcctgctcccagcattgaagatatttgccacgtgttatctactgtgtgtaagaaggaaggtctgaatcttccttcacaactggctcatagacttgcagagaagtcttgtagaaatctcagaaaagccctgcttatgtgtgaagcctgcagagtgcaacaatatccttttactgcagatcaagaaatccctgagacagattgggaggtgtatctgagggagactgcaaatgctattgtcagtcagcaaactccacaaaggctccttgaagttcgtggaaggctgtatgagcttctaactcattgtattcctcctgagataataatgaagggccttctctcagaactgttacataattgtgatggacaactgaaaggggaggtggcacaaatggcagcttactatgagcatcgtctacagctgggtagcaaagccatttatcacttggaagcgtttgtggccaaattcatggcactttataagaagttcatggaggatggattggaaggcatgatgttctgacttctgtcagttattcttgcaaagatttctcagtatcagtatttacatacagcttatattaaaagagctgtgggtaaattaactgaacttaatcatgtcgtatttgggtttttttggtaataacttctctgtgaactattaatcatcctctgagttaaataattgctcctatactattgaagtatgtagttttgtacataacttagagactttagagtctaagaaaatgatcttaatttactttaagcattggttattcaagtattcattgttgatcctcctattctcttccgtctaatctctcacctgctaaaggagatttacacattagaaagcaaagattattttcatttatccagatgaccattttctgccacaggtaacatgattgtttgacgg

SEQ ID NO: 1068 - protein, 356 aa, Homo sapien
MSLWVDKYRPCSLGRLDYHKEQAAQLRNLVQCGDFPHLLVYGPSGAGKKTRIMCILRELYGVGVEKLRIEHQTITTPSKKKIEISTIASNYHLEVNPSDAGNSDRVVIQEMLKTVAQSQQLETNSQRDFKVVLLTEVDKLTKDAQHALRRTMEKYMSTCRLILCCNSTSKVIPPIRSRCLAVRVPAPSIEDICHVLSTVCKKEGLNLPSQLAHRLAEKSCRNLRKALLMCEACRVQQYPFTADQEIPETDWEVYLRETANAIVSQQTPQRLLEVRGRLYELLTHCIPPEIIMKGLLSELLHNCDGQLKGEVAQMAAYYEHRLQLGSKAIYHLEAFVAKFMALYKKFMEDGLEGMMF

SEQ ID NO: 1069 - DNA, 3025 bp, Homo sapien
gcacgagcaggcagttcagattaaagaagctaattgatcaagaaatcaagtctcaggaggagaaggagcaagaaaaggagaaaagggtcaccaccctgaaagaggagctgaccaagctgaagtcttttgctttgatggtggtggatgaacagcaaaggctgacggcacagctcacccttcaaagacagaaaatccaagagctgaccacaaatgcaaaggaaacacataccaaactagcccttgctgaagccagagttcaggaggaagagcagaaggcaaccagactagagaaggaactgcaaacgcagaccacaaagtttcaccaagaccaagacacaattatggcgaagctcaccaatgaggacagtcaaaatcgccagcttcaacaaaagctggcagcactcagccggcagattgatgagttagaagagacaaacaggtctttacgaaaagcagaagaggagctgcaagatataaaagaaaaaatcagtaagggagaatatggaaacgctggtatcatggctgaagtggaagagctcataaaaatggaggagcagtgcagagatctcaataagaggcttgaaagggagacgttacagagtaaagactttaaactagaggttgaaaaactcagtaaaagaattatggctctggaaaagttagaagacgctttcaacaaaagcaaacaagaatgctactctctgaaatgcaatttagaaaaagaaaggatgaccacaaagcagttgtctcaagaactggagagtttaaaagtaaggatcaaagagctagaagccattgaaagtcggctagaaaagacagaattcactctaaaagaggatttaactaaactgaaaacattaactgtgatgtttgtagatgaacggaaaacaatgagtgaaaaattaaagaaaactgaagataaattacaagctgcttcttctcagcttcaagtggagcaaaataaagtaacaacagttactgagaagttaattgaggaaactaaaagggcgctcaagtccaaaaccgatgtagaagaaaagatgtacagcgtaaccaaggagagagatgatttaaaaaacaaattgaaagcggaagaagagaaaggaaatgatctcctgtcaagagttaatatgttgaaaaataggcttcaatcattggaagcaattgagaaagatttcctaaaaaacaaattaaatcaagactctgggaaatccacaacagcattacaccaagaaaacaataagattaaggagctctctcaagaagtggaaagactgaaactgaagctaaaggacatgaaagccattgaggatgacctcatgaaaacagaagatgaatatgagactctagaacgaaggtatgctaatgaacgagacaaagctcaatttttatctaaagagctagaacatgttaaaatggaacttgctaagtacaagttagcagaaaagacagagaccagccatgaacaatggcttttcaaaaggcttcaagaagaagaagctaagtcagggcacctctcaagagaagtggatgcattaaaagagaaaattcatgaatacatggcaactgaagacctaatatgtcacctccagggagatcactcagtctgcaaaaaaaaactaaatcaacaagaaaacaggaacagagatttaggaagagagattgaaaacctcactaaggagttagagaggtaccggcatttcagtaagagcctcaggcctagtctcaatggaagaagaatttccgatcctcaagtattttctaaagaagttcagacagaagcagtagacaatgaaccacctgattacaagagcctcattcctctggaacgtgcagtcatcaatggtcagttatatgaggagagtgagaatcaagacgaggaccctaatgatgagggatctgtgctgtccttcaaatgcagccagtctactccatgtcctgttaacagaaagctatggattccctggatgaaatccaaggagggccatcttcagaatggaaaaatgcaaactaaacccaatgccaactttgtgcaacctggagatctagtcctaagccacacacctgggcagccacttcatataaaggttactccagaccatgtacaaaacacagccactcttgaaatcacaagtccaaccacagagagtcctcactcttacacgagtactgcagtgataccgaactgtggcacgccaaagcaaaggataaccatcctccaaaacgcctccataacaccagtaaagtccaaaacctctaccgaagacctcatgaatttagaacaaggcatgtccccaattaccatggcaacctttgccagagcacagaccccagagtcttgtggttctctaactccagaaaggacaatgtccctattcaggttttggctgtgactggttcagctagctctcctgagcagggacgctccccagaaccaacagaaatcagtgccaagcatgcgatattcagagtctccccagaccggcagtcatcatggcagtttcagcgttcaaacagcaatagctcaagtgtgataactactgaggataataaaatccacattcacttaggaagtccttacatgcaagctgtagccagcccttcagcaccactgcaggataaccgaactcaaggcttaattaacggggcactaaacaaaacaaccaataaagtcaccagcagtattactatcacaccaacagccacacctcttcctcgacaatcacaaattacagtaagtaatatatataactgaccacgctcaccctcatccagtccatactgatatttttgcaaggaactcaatccttttttaatcatccctccatatcccccaagactgactgaactcgtactttgggaaggtttgtgcatgaactatacaagagtatctgaaactaactgttgcctgcatagtcatatcgagtgtgcacttactgtatatcttttcatttacatacttgtatggaaaatatttagtctgcacttgtataaatacatctttatgtatttgaaaaaaaaaaaa

SEQ ID NO: 1070 - protein, 752 aa, Homo sapien
MVVDEQQRLTAQLTLQRQKIQELTTNAKETHTKLALAEARVQEEEQKATRLEKELQTQTTKFHQDQDTIMAKLTNEDSQNRQLQQKLAALSRQIDELEETNRSLRKAEEELQDIKEKISKGEYGNAGIMAEVEELIKMEEQCRDLNKRLERETLQSKDFKLEVEKLSKRIMALEKLEDAFNKSKQECYSLKCNLEKERMTTKQLSQELESLKVRIKELEAIESRLEKTEFTLKEDLTKLKTLTVMFVDERKTMSEKLKKTEDKLQAASSQLQVEQNKVTTVTEKLIEETKRALKSKTDVEEKMYSVTKERDDLKNKLKAEEEKGNDLLSRVNMLKNRLQSLEAIEKDFLKNKLNQDSGKSTTALHQENNKIKELSQEVERLKLKLKDMKAIEDDLMKTEDEYETLERRYANERDKAQFLSKELEHVKMELAKYKLAEKTETSHEQWLFKRLQEEEAKSGHLSREVDALKEKIHEYMATEDLICHLQGDHSVCKKKLNQQENRNRDLGREIENLTKELERYRHFSKSLRPSLNGRRISDPQVFSKEVQTEAVDNEPPDYKSLIPLERAVINGQLYEESENQDEDPNDEGSVLSFKCSQSTPCPVNRKLWIPWMKSKEGHLQNGKMQTKPNANFVQPGDLVLSHTPGQPLHIKVTPDHVQNTATLEITSPTTESPHSYTSTAVIPNCGTPKQRITILQNASITPVKSKTSTEDLMNLEQGMSPITMATFARAQTPESCGSLTPERTMSLFRFWL

SEQ ID NO: 1071 - DNA, 2143 bp, Homo sapien
gaagccaacaagaatttgagaactgtaaataccaagccttgaaagggaccatggtgcggcctgtgagacataagaaaccagtcaattactcacagtttgaccactctgacagtgatgatgattttgtttctgcaactgtacctttaaacaagaaatccagaacagcaccaaaggagttaaaacaagataaaccaaaacctaacttgaacaatctccggaaagaagaaatcccagtacaagagaaaacccctaaaaaaaggatggctttagatgacaagctctaccagagagacttagaagttgcactagctttatcagtgaaggaacttccaacagtcaccactaatgtgcagaactctcaagataaaagcattgaaaaacatggcagtagtaaaatagaaacaatgaataagtctcctcatatctctaattgcagtgtagccagtgattatttagatttggataagattactgtggaagatgatgttggtggtgttcaagggaaaagaaaagcagcatctaaagctgcagcacagcagaggaagattcttctggaaggcagtgatggtgatagtgctaatgacactgaaccagactttgcacctggtgaagattctgaggatgattctgatttttgtgagagtgaggataatgacgaagacttctctatgagaaaaagtaaagttaaagaaattaaaaagaaagaagtgaaggtaaaatccccagtagaaaagaaagagaagaaatctaaatccaaatgtaatgctttggtgacttcggtggactctgctccagctgccgtcaaatcagaatctcagtccttgccaaaaaaggtttctctgtcttcagataccactaggaaaccattagaaatacgcagtccttcagctgaaagcaagaaacctaaatgggtcccaccagcggcatctggaggtagcagaagtagcagcagcccactggtggtagtgtctgtgaagtctcccaatcagagtctccgccttggcttgtccagattagcacgagttaaacctttgcatccaaatgccactagcacctgagtgtggtacaggaggaatgtttggttgggagaatcacagctttacaagggtgtttatatttgatttgtgtttatatttgaggcaggtattgtaatataaaggaatccattaccatgtcctataaatgacctctagccattttatgattatgttctctgtaaaactcttcaagacttcaatgagaagtttgtttataagaattatcttctcatacctttccttgtgaagagcgtattctgtttttctatcagttcgacatgaagtccacatcacatgctgttcttttctagttacatgatgtgcctttctagctttgtctagtttatagcaccttaactttaactgttcagttttatctggcagaggaaacattcttatttctttcagaagacatttctgaaatcttataagctacttaagctacgttgtcagttttatcgcaaagatgttttgtattttagccaaatctttttatagtacaaacttagaattattttacacactaaaatggttgcagttttatggcatatgtctccgatttagatggttgttctctagaaaatagtatttaaagacattttatgaaatcttcattgtcaaaacctttaataaaagtggaaatattttgaaatgccctttttcttgataccactcatccacgtgttcctgattgtccacatttcatgataaaatgagagctctgcagagaatgttagcctttctgttgtaaatgtaatcttcaagtagtcactttttgttaagttctttagaaagtagttgtcaagtacttagtcatccctattatgatatgagatagtacagcttttcaggaagcttagatctgaatttactttgaaaaacaattgtaatgaatattttatatttacattgagaatttcaactagcttctgatcaatttttaataaaaaattttcaaatcatgttagctgttaaaaaatgtataataactcagtttttcttggtttatggaaatatctatattaatgtgaaaataattaatttagaattgtgattaaagtgagcatttgtctatcaaaaaaaaaaaaaaaaaaaaaaaaaaaaaa

SEQ ID NO: 1072 - protein, 335 aa, Homo sapien
MVRPVRHKKPVNYSQFDHSDSDDDFVSATVPLNKKSRTAPKELKQDKPKPNLNNLRKEEIPVQEKTPKKRMALDDKLYQRDLEVALALSVKELPTVTTNVQNSQDKSIEKHGSSKIETMNKSPHISNCSVASDYLDLDKITVEDDVGGVQGKRKAASKAAAQQRKILLEGSDGDSANDTEPDFAPGEDSEDDSDFCESEDNDEDFSMRKSKVKEIKKKEVKVKSPVEKKEKKSKSKCNALVTSVDSAPAAVKSESQSLPKKVSLSSDTTRKPLEIRSPSAESKKPKWVPPAASGGSRSSSSPLVVVSVKSPNQSLRLGLSRLARVKPLHPNATST

SEQ ID NO: 1073 - DNA, 3689 bp, Homo sapien
  Unsure 2359-2453: Unknown base
tgtcagagtgtgactggacggtgctgtcctaagacaaagtcccagtggagatggggataggtcagaaacctggttttagaaggccatgtaggtatcaagatgtcaccaccagctgagatttgccacatccgccccaccctcagccccccgactgggcagagccaagcagcttcccacactgtcgctgtggagcaccccctttgggtggtgctttagaggaaggagtctggagtggggccccgggctgtcttttgcttgggctccttcagaaggaccagctgtctctaggggttgcctgagagtggtgtcttgtgtgcttatttcttctcttaactgttttctgcaggtacagctggataacttgccaggaatgagtctcgtggctgggaaagcacttagctctgcccggatgtcggatgcagttctcagtcagtcttcgctcatgggcagccagcagtttcaggatggggaaaatgaggaatgtggggcaagcctgggaggtcatgagcacccagacctgagtgatggcagccagcatttaaactcctcttgctatccatctacgtgtattacagacattctgctcagctacaagcaccccgaagtctccttcagcatggagcaggcaggcgtgtaacaagaaacagagagtgagtgtcaccctggccagagccaaaccagccctgtggcccagtgcctgctcccaatcccatcaggagcttcagcccatgtgttgtggtggccagtgcagtcgacagtaccacgcctcccctcgtggccttcacagtttcttgcttttcattaacgacgctgctagttttagggcgcgaggtaggggtgggggtgtgcagaagaaatgctaaacacagtctcttggttgggttatgggaataagacacaagactcgccgtgtgttacaggtgctctagccttcatagcgacagaagtgagctacggctccagaggatgcaggtgacctccggtcagcataatgaggaaaggaggaagtccttaaactcagtcctaaaagacaaaacctggcaggaaaatatgtccagccatattttttaaggccatacagaagcaagtggcaggatattccagattagggaaatgtgtgatgagaggcccatggtagaaagaatggggaaattggcttgtttggctggagtaatgcaaagagtacacagcaggcaccattggttgtatctggaaaatccttgacagaagaggcctgatgaaagggaagccacttggcaaatccacatcagagcctcagtatggcaagctacctgaacacctgagggaaagtaaacccgttgcattttttaaaaggttttaaatggaatatttgagcctttctcttttcaaactaattctcctctgtgtctgctttattccaggttttgtgtacagcttgggaatgaaaaggttgattgtaaacccacagtatctagcagcgttgtgccaaattgcccttgtgtttctctccacccaaaatatcacagctgctttcctcacatttggttcatccgtgtgctgttcttttgggttctgagagggttttgccatgtttgcttgtatgaccaagtcaccaaggaaataaacaggaaggaaatccatgttctccatcttttgtgaaagtatatttgagttggtggttttttgttttgtttgggggtttgtgttttgttttgctttttggtactgttttcttccagaggtgatatactttcttttttttcttcctttctatttttttctttcgttccttttttgaaacaggagagcaaagcagttagagttcagaggccagcggcctcagggccactccctccctagccttcatcagcagagcaccctccatccccctgcattgctcttctgtgaaagcaaatactaaaggatgccatcctctggaatcctaatggcaggcaaagggagagaggaagggtgacggcttctggcacttagaaaacaaaaagaacaaaaaaagagaaacccccaagcctggaacgcagagaggtctttactgctgggatccacggaaaacatgtctgtcctagccaagatcatatgaagagtttggcacggaggctgagaatgacctggcatagatggtttgccagttaggatgtctcaatttgagcctttgcttttggtggataactcagctcccctcttgtaacctggaaagttggttgcctttatcatcctgctggttttatccatggactgaacacccaacagcagtgcactatgctttctatggcatctttcattctcattttatattgtgctataaaaaggattgtttctccatatatatattatatatgtgtgtatatatataatatannnnnnnnnnnnnnnnnnnnnnnnnnnnnnnnnnnnnnnnnnnnnnnnnnnnnnnnnnnnnnnnnnnnnnnnnnnnnnnnnnnnnnnnnnnnnnngctctcctctttcagcctctttgtcacagggaagaagtgtaggaggttgccttgggccctgcctctctcctaacctcctcttccccactgggtaccctcagcccctatattttaattcttgatcatgtagaaattgtttttggtaaatgttgatattattgttattatcattattaataaataaagagaaaaggaatttttgtttaaatgagaaatgtttaaccagattctgttctatttgaattgtgacttgcaccttttgttcaaagtatttcctttaggcattgtaattgtgaacagctcttacttgtgccagtgacagatgcagtggtctcctttccccagttgaagcagtgcatacgcagtagctattatttgtgttatctttatttctcttcattgttagaaaccaaagtcttctctgctggctggggctgagagagggtctgggttatctccttctgatcttcaaaacaagagagagaccttgaatacactgactcttccaccctttttttttctgggaaaggagagcaagaggtcccgagtcccctcctagtctttcatcctgaatttgcacagaggaaagcgggtgcccggcatggccatcctgatgttgctggcgggatccccatgcaccttgtccttctccactgatactggcagctcggctcctggacccaagatcccttgagtggaattctgcagtgcaagagcccttcgtgggagctgtcccatgtttccatggtccccagtctcccctccacttggtggggtcaccaactactcaccagaagggggcttaccaagaaagccctaaaaagctgttgacttatctgcgcttgttccaactcttatgcccccaacctgccctaccaccaccacgcgctcagcctgatgtgtttacatggtactgtatgtatgggagagcagactgcaccctccagcaacaacagatgaaagccagtgagcctactaaccgtgccatcttgcaaactacactttaaaaaaaactcattgctttgtattgtagtaaccaatatgtgcagtatacgttgaatgtatatgaacatactttcctatttctgttctttgaaaatgtcagaaatatttttttctttctcattttatgttgaactaaaaaggattaaaaaaaaaatctccaaaaaaatctatgtcgggtgcggagaaagaggtaatgaaatggcaggaaatcgatatgcaagcttatcgata

SEQ ID NO: 1074 - protein, 19 aa, Homo sapien
  Unsure 2359-2453: Unknown amino acid
CQSVTGRCCPKTKSQWRWG

SEQ ID NO: 1075 - DNA, 1315 bp, Homo sapien
cggggattttgtgccccgatctatagttccttgagtctccacacacactcctcacagagatctgtagcgtaggtacgtgacagctctgcctacatctgacgtccggagtcattaaccaggaatgtatgtgtgtctgtgtgtctctctgtggagtcgtcagaattcttcataggggttaagctaaaaaagcgaggcgaggagcccctctccaatggctcagttttgctgaataatcacgtgtgaatcgaggggcgggcttttggcaggcagatcttactagtatttactaccaagctctactccagattaaccatcccagtccttctgtcagtctccgatgccatcatgcagcctggttaggagcaaaggaaaggggaaaaagaaaaacgactaattcatcttttcctgatcgtcaggaccctaaagaatggccgagccttgggggaacgagttggcgtccgcagctgccaggggggacctagagcaacttactagtttgttgcaaaataatgtaaacgtcaatgcacaaaatggatttggaaggactgcgctgcaggttatgaaacttggaaatcccgagattgccaggagactgctacttagaggtgctaatcccgatttgaaagaccgaactggtttcgctgtcattcatgatgcggccagagcaggtttcctggacactttacagactttgctggagtttcaagctgatgttaacatcgaggataatgaagggaacctgcccttgcacttggctgccaaagaaggccacctccgggtggtggagttcctggtgaagcacacggccagcaatgtggggcatcggaaccataagggggacaccgcctgtgatttggccaggctctatgggaggaatgaggttgttagcctgatgcaggcaaacggggctgggggagccacaaatcttcaataaacgtggggagggctcccccacgttgcctctactttatcaattaactgagtagctctcctgacttttaatgtcatttgttaaaatacagttctgtcatatgttaagcagctaaattttctgaaactgcataagtgaaaatcttacaacaggtttatgaatatatttaagcaacatctttttaacctgcaaaatctgttctaacatgtaattgcagataactttgactttcttctgaatattttatctttccttggcttttcccttgcttccccttttgccaatctcaacacccaagttgaagactttgtttttaaaatggtttgtcctgatgcttttgtctaattaaaacactttcaaaacaggaaaaaaaaaaaaaaaaaa

SEQ ID NO: 1076 - protein, 168 aa, Homo sapien
MAEPWGNELASAAARGDLEQLTSLLQNNVNVNAQNGFGRTALQVMKLGNPEIARRLLLRGANPDLKDRTGFAVIHDAARAGFLDTLQTLLEFQADVNIEDNEGNLPLHLAAKEGHLRVVEFLVKHTASNVGHRNHKGDTACDLARLYGRNEVVSLMQANGAGGATNLQ

SEQ ID NO: 1077 - DNA, 2150 bp, Homo sapien
ctcgagccacgaaggccccgctgtcctgtctagcagatacttgcacggtttacagaaattcggtccctgggtcgtgtcaggaaactggaaaaaaggtcataagcatgaagcgcagttcagtttccagcggtggtgctggccgcctctccatgcaggagttaagatcccaggatgtaaataaacaaggcctctatacccctcaaaccaaagagaaaccaacctttggaaagttgagtataaacaaaccgacatctgaaagaaaagtctcgctatttggcaaaagaactagtggacatggatcccggaatagtcaacttggtatattttccagttctgagaaaatcaaggacccgagaccacttaatgacaaagcattcattcagcagtgtattcgacaactctgtgagtttcttacagaaaatggttatgcacataatgtgtccatgaaatctctacaagctccctctgttaaagacttcctgaagatcttcacatttctttatggcttcctgtgcccctcatacgaacttcctgacacaaagtttgaagaagaggttccaagaatctttaaagaccttgggtatccttttgcactatccaaaagctccatgtacacagtgggggctcctcatacatggcctcacattgtggcagccttagtttggctaatagactgcatcaagatacatactgccatgaaagaaagctcacctttatttgatgatgggcagccttggggagaagaaactgaagatggaattatgcataataagttgtttttggactacaccataaaatgctatgagagttttatgagtggtgccgacagctttgatgagatgaatgcagagctgcagtcaaaactgaaggatttatttaatgtggatgcttttaagctggaatcattagaagcaaaaaacagagcattgaatgaacagattgcaagattggaacaagaaagagaaaaagaaccgaatcgtctagagtcgttgagaaaactgaaggcttccttacaaggagatgttcaaaagtatcaggcatacatgagcaatttggagtctcattcagccattcttgaccagaaattaaatggtctcaatgaggaaattgctagagtagaactagaatgtgaaacaataaaacaggagaacactcgactacagaatatcattgacaaccagaagtactcagttgcagacattgagcgaataaatcatgaaagaaatgaattgcagcagactattaataaattaaccaaggacctggaagctgaacaacagaagttgtggaatgaggagttaaaatatgccagaggcaaagaagcgattgaaacacaattagcagagtatcacaaattggctagaaaattaaaacttattcctaaaggtgctgagaattccaaaggttatgactttgaaattaagtttaatcccgaggctggtgccaactgccttgtcaaatacagggctcaagtttatgtacctcttaaggaactcctgaatgaaactgaagaagaaattaataaagccctaaataaaaaaatgggtttggaggatactttagaacaattgaatgcaatgataacagaaagcaagagaagtgtgagaactctgaaagaagaagttcaaaagctggatgatctttaccaacaaaaaattaaggaagcagaggaagaggatgaaaaatgtgccagtgagcttgagtccttggagaaacacaagcacctgctagaaagtactgttaaccaggggctcagtgaagctatgaatgaattagatgctgttcagcgggaataccaactagttgtgcaaaccacgactgaagaaagacgaaaagtgggaaataacttgcaacgtctgttagagatggttgctacacatgttgggtctgtagagaaacatcttgaggagcagattgctaaagttgatagagaatatgaagaatgcatgtcagaagatctctcggaaaatattaaagagattagagataagtatgagaagaaagctactctaattaagtcttctgaagaatgaagataaaatgttgatcatgtatatatatccatagtgaataaaattgtctcagtaaaaaaaaaaaaaaaaaaaaaaaaaaaaaaaaaaaaaaaaaaaaaaaaaaaaaaaaaaaaaaaa

SEQ ID NO: 1078 - protein, 642 aa, Homo sapien
MKRSSVSSGGAGRLSMQELRSQDVNKQGLYTPQTKEKPTFGKLSINKPTSERKVSLFGKRTSGHGSRNSQLGIFSSSEKIKDPRPLNDKAFIQQCIRQLCEFLTENGYAHNVSMKSLQAPSVKDFLKIFTFLYGFLCPSYELPDTKFEEEVPRIFKDLGYPFALSKSSMYTVGAPHTWPHIVAALVWLIDCIKIHTAMKESSPLFDDGQPWGEETEDGIMHNKLFLDYTIKCYESFMSGADSFDEMNAELQSKLKDLFNVDAFKLESLEAKNRALNEQIARLEQEREKEPNRLESLRKLKASLQGDVQKYQAYMSNLESHSAILDQKLNGLNEEIARVELECETIKQENTRLQNIIDNQKYSVADIERINHERNELQQTINKLTKDLEAEQQKLWNEELKYARGKEAIETQLAEYHKLARKLKLIPKGAENSKGYDFEIKFNPEAGANCLVKYRAQVYVPLKELLNETEEEINKALNKKMGLEDTLEQLNAMITESKRSVRTLKEEVQKLDDLYQQKIKEAEEEDEKCASELESLEKHKHLLESTVNQGLSEAMNELDAVQREYQLVVQTTTEERRKVGNNLQRLLEMVATHVGSVEKHLEEQIAKVDREYEECMSEDLSENIKEIRDKYEKKATLIKSSEE

SEQ ID NO: 1079 - DNA, 4877 bp, Homo sapien
gcccgaaacccggaagtgagcggcggcagctgcgaggctcggagaaacaggcgccgcgggctccgcgcccggccggacccgggcccgagatcatgatgctgccgccaccgccgccaccacggagcgagaagcccagatagacgccccggcggccccgggtcctggagtcccgccgcctgctgcccggccgaggaccccaccccgcctgccgcccgatgcttgcagtggggcccgccatggacagggattacccgcagcatgaacccccgccggcgggcagcctcctgtacagcccgccgcccctgcagagcgccatgctgcactgcccctactggaacaccttctcgctgccgccataccctgccttctccagcgacagccgcccgttcatgagctccgcctccttcctcggcagccagccctgcccagacaccagctatgcccccgtggccaccgcctccagcttgccaccaaagacctgcgactttgctcaggactcctcctattttgaggacttctccaacatctccatcttctcctcgtccgtggactccctgtcggacatcgtggacacgcccgacttcctgccggctgacagcctcaaccaggtgtccaccatctgggacgataaccctgccccctccacccacgataagctgttccagctcagcaggccgtttgcaggcttcgaggactttctgccctcccacagcaccccgcttctcgtcagctaccaggagcagagtgtgcagagccagccagaggaggaggacgaggctgaggaggaggaggcggaggagctggggcacacagagacctacgccgactacgtgccgtccaagtccaagatcgggaagcagcacccagaccgcgtggtggagaccagcacactgtccagcgtcccacccccagacatcacctacaccctggccctgccctcggacagcggggccctgtctgccctgcagctagaggccatcacctacgcctgccagcaacacgaggtcctgctccccagcgggcagcgcgcgggctttctcatcggcgatggggccggcgtgggcaaaggccggacggtggccggagtcatcctggagaaccacctgcgcggccggaagaaagcattgtggttcagcgtctccaacgacctcaagtacgatgcggagcgcgacctgcgggacatcgaagccacgggcatcgcggtgcacgcgctcagcaagatcaagtacggtgacaccactacctcagagggcgtcctcttcgccacctactccgccctgattggggagagccaggccggtggccagcaccgcactcgcctccggcagatcctggactggtgtggggaggcctttgagggcgtcatcgtgttcgacgagtgtcacaaagccaagaatgccggctccaccaagatgggcaaggccgtgctagacctgcagaacaagctgcccctggcccgcgtggtctacgccagcgccacaggtgcctctgagcctcggaacatgatctacatgagccgcttgggtatctggggcgagggcacacccttccggaactttgaggagttcctgcacgccatcgagaagaggggcgttggcgccatggagatcgtggccatggacatgaaggtcagcggcatgtacatcgcacgccagctcagcttctccggcgtcaccttccgcatcgaggagatcccgctggccccagccttcgagtgcgtctacaaccgcgcagccctgctgtgggccgaggccctgaacgtgttccagcaggcggccgactggatcggcctggagtcgcgcaagtccctgtggggccagttctggtcggcacaccagcgcttcttcaagtatctgtgcatcgcagccaaggtgcgccggctggtggagctggcccgagaggagctggcgcgagacaagtgcgtggtcatcgggctgcagtccacgggcgaggcgcgcacgcgggaggtgctgggggagaacgatgggcacctcaactgcttcgtctcggccgctgaaggcgtgttcctgtcgctaattcagaagcactttccgtccaccaagagaaagcgggacagaggagcgggcagcaagcggaaacggcgacctcggggacgcggggccaaagccccccggctggcgtgcgagacagcgggcgtcatccgcatcagtgacgacagcagcacggagtcggaccctggcctggacagcgacttcaactcctcccccgagtccctggtggatgacgacgttgtcatcgttgatgcagtcgggctccccagtgacgaccggggatccctgtgcctcctgcagagagacccgcatggccccggggtcctggagcgggtggagcggctgaagcaggatctgctggacaaagtgcgccggctgggccgggaactgccagtcaacaccctggacgagctcatcgaccagctgggcggcccccagcgggtggcggagatgaccggcaggaaaggccgcgtggtgtccaggcccgacgggacggtggccttcgagtcgcgggcagagcagggtctgtccatcgaccacgtgaacctcagggagaagcagcgcttcatgagcggcgagaagctcgtggccatcatctcggaggcctccagctcgggtgtctccctccaagccgaccgccgtgtccagaaccagcggcgccgcgtgcacatgaccttggagctgccgtggagcgccgaccgcgccatccagcagttcggccgcacccaccggtccaaccaggtctccgcgccagagtatgtcttcctcatctcggagctggccggggagcgccggttcgcctccatcgtggccaagcgcctggagagtctgggggccctgacccacggagaccgccgcgccacggagtcccgtgacctcagcaagtacaactttgagaacaagtatggcacccgggccctgcactgtgtcctcaccaccatcctgagccagactgagaacaaagtgcctgtgccccagggataccctggaggggtccccaccttcttccgggacatgaagcagggcctgctgtctgtgggcattggtggccgggagtcccggaatggctgcctggacgtggagaaggactgttccatcaccaagttcctgaaccgcatcctggggctggaggtgcacaagcagaatgccctgttccagtacttctcagacaccttcgaccacctcatcgagatggacaagcgggagggcaaatacgacatgggcatcctggaccttgctcccggtatcgaggagatctacgaggagagccagcaggtgttcctggctcccgggcacccgcaggacgggcaggtggtcttctacaagatcagcgtggaccgcggcctgaagtgggaggacgcctttgccaagtcgctggcgctgacgggcccctatgacggcttctacctctcctacaaggtccgcggtaacaagcccagctgcctgctggcggagcagaaccgcggccagttcttcacggtgtacaagcccaacatcggccggcagagccagctggaggccctggacagcctccgccgcaagttccaccgggtcaccgcggaggaggccaaggagccctgggagagtggctacgctttgtcgctgacgcactgcagccacagcgcctggaaccggcactgccggctggcgcaggagggtaaggactgcctgcaggggctgcggctgcggcaccactacatgctgtgcggcgcgctgctgcgcgtgtggggccgcatcgccgccgtcatggccgacgtcagcagcagcagctacctgcagatcgtgcggctgaagaccaaggacaggaagaagcaagtgggcatcaagatccccgagggctgcgtgcgccgggtgctgcaggagctgcggctgatggatgcggacgtgaagcgcaggcaggcgcccgccctgggctgccccgccccgcccgccccgcgcccgctggcgctgccttgcggccccggagaggtgctggacctcacctacagccccccggccgaggccttcccgccgcccccgcacttctctttcccggcgccgctgtccctggacgccggccccggcgtcgtgccgctgggcacccccgacgcccaggccgaccctgcggccctcgcgcaccagggctgcgacatcaacttcaaggaggtgctggaggacatgctgcgctcgctgcacgcggggccgccctccgagggcgcgctgggggagggcgcgggggcggggggcgcggcgggcggtggtcccgagcggcagagcgtgatccagttcagcccacccttccccggcgcccaggctcctctctgacacgcctttaggcgaaacatgccccaagacacagggaccgtttctcccctaggagcagcggtggggagcagggccaaggtcccctgaccactgctcagaggagccctaggccctggccgcagtgccttcagcgcccgacccgggcccccacctggtcagccctggcggggcccactcaggacagctgggggccggggcgtggcagggccctctctgtgcctctcctcctaagtaggaaggggctccgggtggctgctctgggactgggcacccacaagggctcagtgggcccaaacccttgaaatccgtgaaaccgggtggtcccaagagctagaaactcaggaaaccccaggtgctcagggccccgcgtctcgggggctccgtggggcagacccctgctaatatatgcaattctccctcccccagcccttccctgacccctaagttattgcccgctcacctctcccaggccccaggccgcggagctggcagggtggcgcctgcggtttctatgtatttatagcaagttctgatgtacatatgtaaaggacttttttaaat

SEQ ID NO: 1080 - protein, 1366 aa, Homo sapien
MLAVGPAMDRDYPQHEPPPAGSLLYSPPPLQSAMLHCPYWNTFSLPPYPAFSSDSRPFMSSASFLGSQPCPDTSYAPVATASSLPPKTCDFAQDSSYFEDFSNISIFSSSVDSLSDIVDTPDFLPADSLNQVSTIWDDNPAPSTHDKLFQLSRPFAGFEDFLPSHSTPLLVSYQEQSVQSQPEEEDEAEEEEAEELGHTETYADYVPSKSKIGKQHPDRVVETSTLSSVPPPDITYTLALPSDSGALSALQLEAITYACQQHEVLLPSGQRAGFLIGDGAGVGKGRTVAGVILENHLRGRKKALWFSVSNDLKYDAERDLRDIEATGIAVHALSKIKYGDTTTSEGVLFATYSALIGESQAGGQHRTRLRQILDWCGEAFEGVIVFDECHKAKNAGSTKMGKAVLDLQNKLPLARVVYASATGASEPRNMIYMSRLGIWGEGTPFRNFEEFLHAIEKRGVGAMEIVAMDMKVSGMYIARQLSFSGVTFRIEEIPLAPAFECVYNRAALLWAEALNVFQQAADWIGLESRKSLWGQFWSAHQRFFKYLCIAAKVRRLVELAREELARDKCVVIGLQSTGEARTREVLGENDGHLNCFVSAAEGVFLSLIQKHFPSTKRKRDRGAGSKRKRRPRGRGAKAPRLACETAGVIRISDDSSTESDPGLDSDFNSSPESLVDDDVVIVDAVGLPSDDRGSLCLLQRDPHGPGVLERVERLKQDLLDKVRRLGRELPVNTLDELIDQLGGPQRVAEMTGRKGRVVSRPDGTVAFESRAEQGLSIDHVNLREKQRFMSGEKLVAIISEASSSGVSLQADRRVQNQRRRVHMTLELPWSADRAIQQFGRTHRSNQVSAPEYVFLISELAGERRFASIVAKRLESLGALTHGDRRATESRDLSKYNFENKYGTRALHCVLTTILSQTENKVPVPQGYPGGVPTFFRDMKQGLLSVGIGGRESRNGCLDVEKDCSITKFLNRILGLEVHKQNALFQYFSDTFDHLIEMDKREGKYDMGILDLAPGIEEIYEESQQVFLAPGHPQDGQVVFYKISVDRGLKWEDAFAKSLALTGPYDGFYLSYKVRGNKPSCLLAEQNRGQFFTVYKPNIGRQSQLEALDSLRRKFHRVTAEEAKEPWESGYALSLTHCSHSAWNRHCRLAQEGKDCLQGLRLRHHYMLCGALLRVWGRIAAVMADVSSSSYLQIVRLKTKDRKKQVGIKIPEGCVRRVLQELRLMDADVKRRQAPALGCPAPPAPRPLALPCGPGEVLDLTYSPPAEAFPPPPHFSFPAPLSLDAGPGVVPLGTPDAQADPAALAHQGCDINFKEVLEDMLRSLHAGPPSEGALGEGAGAGGAAGGGPERQSVIQFSPPFPGAQAPL

SEQ ID NO: 1081 - DNA, 627 bp, Homo sapien
agtctccggcgagttgttgcctgggctggacgtggttttgtctgctgcgcccgctcttcgcgctctcgtttcattttctgcagcgcgccacgaggatggcccacaagcagatctactactcggacaagtacttcgacgaacactacgagtaccggcatgttatgttacccagagaactttccaaacaagtacctaaaactcatctgatgtctgaagaggagtggaggagacttggtgtccaacagagtctaggctgggttcattacatgattcatgagccagaaccacatattcttctctttagacgacctcttccaaaagatcaacaaaaatgaagtttatctggggatcgtcaaatctttttcaaatttaatgtatatgtgtatataaggtagtattcagtgaatacttgagaaatgtacaaatctttcatccatacctgtgcatgagctgtattcttcacagcaacagagctcagttaaatgcaactgcaagtaggttactgtaagatgtttaagataaaagttcttccagtcagtttttctcttaagtgcctgtttgagtttactgaaacagtttacttttgttcaataaagtttgtatgttgcatttaaaaaaaaaaaaaaa

SEQ ID NO: 1082 - protein, 79 aa, Homo sapien
MAHKQIYYSDKYFDEHYEYRHVMLPRELSKQVPKTHLMSEEEWRRLGVQQSLGWVHYMIHEPEPHILLFRRPLPKDQQK

SEQ ID NO: 1083 - DNA, 2691 bp, Homo sapien
ggcacgaggggggctcaaacgcagggctctgggacgcaggcactgctccaggtgatagtgcgggaacatggccttgcagctgggcaggctgagctcgggcccctgctggctcgtggcgcggggcggctgcggagggccccgcgcctggtcccagtgcggcggcggagggctccgagcctggtcccagcgcagcgcagccggacgcgtctgccggccccctggcccggctggcacggagcagagccgcgggctggggcacggctcgacgtcgagaggcggcccctgggtggggacagggctggccgcggcgctggcggggttggtggggctggccaccgccgccttcgggcatgtgcagcgggcggagatgttgcctaagacctcggggacgcgggccacttcgctggggaggccggaggaggaggaggatgagctggcccaccgctgcagcagcttcatggccccgcctgtgaccgacctgggcgagctgcgaaggaggccgggcgacatgaagaccaagatggagctgctgattctggagacccaggcccaggtgtgccaggctctggcacaggtagacgggggcgccaacttttctgtggaccggtgggagaggaaggaaggaggtggcggcatcagctgtgtacttcaagatgggtgtgttttcgaaaaggctggggtgagcatttctgttgttcatggaaatctttcagaggaagctgcaaaacaaatgagaagcagaggaaaagttctgaagactaaagatggtaaattgccattttgtgctatgggcgtgagctctgttatccaccccaagaatcctcatgctcctactatccatttcaactacagatactttgaagtagaagaagctgatggccacaagcagtggtggtttggtggtggatgtgacctcactccaacatacttgaatcaagaagacgctgtccattttcacagaactctgaaggaggcttgtgaccagcatggtccagatctctaccccaaatttaaaaaatggtgtgatgattacttctttatagcccatcgtggagagcggcggggcattggtggtatcttttttgatgatcttgactctccgtccaaggaggaggtgtttcgctttgtacagagctgtgccagggctgtagttccttcttacattccccttgtgaaaaagcactgtgatgactcattcaccccccaggagaagctgtggcagcagctcagaagaggacggtatgtagaatttaatctgctgtatgatcggggcacaaagtttggcctcttcactccaggatccagaattgaaagtatcttgatgtctttacctctaactgcccgatgggagtacatgcattcaccctcagagaattccaaagaagctgaaattctggaagttctacgccatccaagggactgggtgcgttgatgcaggcagaatggctgtgcaggggtttggagggcacacgatgtgtgctccccatgccactggtcggcactttgccactgtgtggcagttacccgtgccttagtcttctccactctgcaccctacctcgtgggcagatgataacatgttttggatgctgtcagtgatgaatggtgagatggcagattgtcagagtcaattgattaaacctcatttatacttctagtgtcattttatatgactagtttacaaaataggacattgagtttccaagtattgagataagggaatataaatagtattatatgtatcaggaaatctctcatcttgtttttgtttcatgtattttttaaagttttcatttgtgccacaaaaatctgtcgtggaatatattttattttcattaattcagtgaagttgagacttcatagtaattttagaatgcaacttgaaggtaaaaattttactttgtcaatactgaagtctctgctgtaatccttatatatctttctccagagaacataatattgtcaaatagatacacatttttctaataggtatttagaagcacttgaaatattcttaatctctgcatgtgttacaattcagttatttctgtagtttgtaaactctaaagtgacattactattattttagagatgtctaagttgtaattttgatttttgtggaaccattgtttgttaatgttgggattctctgcacttttgaatgtgaaagcttatatccctgaattctgatacttaagagttttctatttcagacatctctgtgtggaagttgagactaagaataatcctagggatgtcatgaatttaggcaatgtttctcatttggaaaatgaaatgagaaataatttccttctttaaagcaagtatatatagtatgagaaacttggaggcatttcatacacacgtttcttaggaaaatggacacattgaaaatgtcctctttttttatattagagattctgcagctctttgctcttaagagcaaatcacaacaggattcttaatgtatgatttctttgttcatatattatgaatgtattattttatttgcttcgtaataaagtttataaggaagagcatctcatacatatcattatcgtggaacacgttgaatgtttgtgattctgtgtggcctttttggggctggaaaatgtatgaattcttcaactgtcttacaagagatctgctaataaattttattattaaataagaaaaaaaaaaaaaaaaaaaa

SEQ ID NO: 1084 - protein, 454 aa, Homo sapien
MALQLGRLSSGPCWLVARGGCGGPRAWSQCGGGGLRAWSQRSAAGRVCRPPGPAGTEQSRGLGHGSTSRGGPWVGTGLAAALAGLVGLATAAFGHVQRAEMLPKTSGTRATSLGRPEEEEDELAHRCSSFMAPPVTDLGELRRRPGDMKTKMELLILETQAQVCQALAQVDGGANFSVDRWERKEGGGGISCVLQDGCVFEKAGVSISVVHGNLSEEAAKQMRSRGKVLKTKDGKLPFCAMGVSSVIHPKNPHAPTIHFNYRYFEVEEADGHKQWWFGGGCDLTPTYLNQEDAVHFHRTLKEACDQHGPDLYPKFKKWCDDYFFIAHRGERRGIGGIFFDDLDSPSKEEVFRFVQSCARAVVPSYIPLVKKHCDDSFTPQEKLWQQLRRGRYVEFNLLYDRGTKFGLFTPGSRIESILMSLPLTARWEYMHSPSENSKEAEILEVLRHPRDWVR

SEQ ID NO: 1085 - DNA, 873 bp, Homo sapien
acttccccttcctgtacagggcaggttgtgcagctggaggcagagcagtcctctctggggagcctgaagcaaacatggatcaagaaactgtaggcaatgttgtcctgttggccatcgtcaccctcatcagcgtggtccagaatggattctttgcccataaagtggagcacgaaagcaggacccagaatgggaggagcttccagaggaccggaacacttgcctttgagcgggtctacactgccaaccagaactgtgtagatgcgtaccccactttcctcgctgtgctctggtctgcggggctactttgcagccaagttcctgctgcgtttgctggactgatgtacttgtttgtgaggcaaaagtactttgtcggttacctaggagagagaacgcagagcacccctggctacatatttgggaaacgcatcatactcttcctgttcctcatgtccgttgctggcatattcaactattacctcatcttctttttcggaagtgactttgaaaactacataaagacgatctccaccaccatctcccctctacttctcattccctaactctctgctgaatatggggttggtgttctcatctaatcaatacctacaagtcatcataattcagctcttgagagcattctgctcttctttagatggctgtaaatctattggccatctgggcttcacagcttgagttaaccttgcttttccgggaacaaaatgatgtcatgtcagctccgccccttgaacatgaccgtggccccaaatttgctattcccatgcattttgtttgtttcttcacttatcctgttctctgaagatgttttgtgaccaggtttgtgttttcttaaaataaaatgcagagacatgtttt

SEQ ID NO: 1086 - protein, 161 aa, Homo sapien
MDQETVGNVVLLAIVTLISVVQNGFFAHKVEHESRTQNGRSFQRTGTLAFERVYTANQNCVDAYPTFLAVLWSAGLLCSQVPAAFAGLMYLFVRQKYFVGYLGERTQSTPGYIFGKRIILFLFLMSVAGIFNYYLIFFFGSDFENYIKTISTTISPLLLIP

SEQ ID NO: 1087 - DNA, 1125 bp, Homo sapien
gtctcccccactgtcagcacctcttctgtgtggtgagtggaccgcttaccccactaggtgaagatgtcagcccaggagagctgcctcagcctcatcaagtacttcctcttcgttttcaacctcttcttcttcgtcctcggcagcctgatcttctgcttcggcatctggatcctcatcgacaagaccagcttcgtgtcctttgtgggcttggccttcgtgcctctgcagatctggtccaaagtcctggccatctcaggaatcttcaccatgggcatcgccctcctgggttgtgtgggggccctcaaggagctccgctgcctcctgggcctgtattttgggatgctgctgctcctgtttgccacacagatcaccctgggaatcctcatctccactcagcgggcccagctggagcgaagcttgcgggacgtcgtagagaaaaccatccaaaagtacggcaccaaccccgaggagaccgcggccgaggagagctgggactatgtgcagttccagctgcgctgctgcggctggcactacccgcaggactggttccaagtcctcatcctgagaggtaacgggtcggaggcgcaccgcgtgccctgctcctgctacaacttgtcggcgaccaacgactccacaatcctagataaggtgatcttgccccagctcagcaggcttggacacctggcgcggtccagacacagtgcagacatctgcgctgtccctgcagagagccacatctaccgcgagggctgcgcgcagggcctccagaagtggctgcacaacaaccttatttccatagtgggcatttgcctgggcgtcggcctactcgagctcgggttcatgacgctctcgatattcctgtgcagaaacctggaccacgtctacaaccggctcgctcgataccgttaggccccgccctccccaaagtcccgccccgcccccgtcacgtgcgctgggcacttccctgctgcctgtaaatatttgtttaatccccagttcgcctggagccctccgccttcacattcccctggggacccacgtggctgcgtgcccctgctgctgtcacctctcccacgggacctggggctttcgtccacagcttcctgtccccatctgtcggcctac

SEQ ID NO: 1088 - protein, 281 aa, Homo sapien
MSAQESCLSLIKYFLFVFNLFFFVLGSLIFCFGIWILIDKTSFVSFVGLAFVPLQIWSKVLAISGIFTMGIALLGCVGALKELRCLLGLYFGMLLLLFATQITLGILISTQRAQLERSLRDVVEKTIQKYGTNPEETAAEESWDYVQFQLRCCGWHYPQDWFQVLILRGNGSEAHRVPCSCYNLSATNDSTILDKVILPQLSRLGHLARSRHSADICAVPAESHIYREGCAQGLQKWLHNNLISIVGICLGVGLLELGFMTLSIFLCRNLDHVYNRLARYR

SEQ ID NO: 1089 - DNA, 3809 bp, Homo sapien
gccgctgttatgcgtattcccgtagacccaagcaccagccgccgcttcacacctccctccccggccttcccctgcggcggcggcggcggcaagatgggcgagaacagcggcgcgctgagcgcgcaggcggccgtggggcccggagggcgcgcccggcccgaggtgcgctcgatggtggacgtgctggcggaccacgcaggcgagctcgtgcgcaccgacagccccaacttcctctgctccgtgctgccctcgcactggcgctgcaacaagacgctgcccgtcgccttcaaggtggtggcattgggggacgtgccggatggtacggtggtgactgtgatggcaggcaatgacgagaactactccgctgagctgcgcaatgcctcggccgtcatgaagaaccaggtggccaggttcaacgaccttcgcttcgtgggccgcagtgggcgagggaagagtttcaccctgaccatcactgtgttcaccaaccccacccaagtggcgacctaccaccgagccatcaaggtgaccgtggacggaccccgggagcccagacggcaccggcagaagctggaggaccagaccaagccgttccctgaccgctttggggacctggaacggctgcgcatgcgggtgacaccgagcacacccagcccccgaggctcactcagcaccacaagccacttcagcagccagccccagaccccaatccaaggcacctcggaactgaacccattctccgacccccgccagtttgaccgctccttccccacgctgccaaccctcacggagagccgcttcccagaccccaggatgcattatcccggggccatgtcagctgccttcccctacagcgccacgccctcgggcacgagcatcagcagcctcagcgtggcgggcatgccggccaccagccgcttccaccatacctacctcccgccaccctacccgggggccccgcagaaccagagcgggcccttccaggccaacccgtccccctaccacctctactacgggacatcctctggctcctaccagttctccatggtggccggcagcagcagtgggggcgaccgctcacctacccgcatgctggcctcttgcaccagcagcgctgcctctgtcgccgccggcaacctcatgaaccccagcctgggcggccagagtgatggcgtggaggccgacggcagccacagcaactcacccacggccctgagcacgccaggccgcatggatgaggccgtgtggcggccctactgaccgccctggtggactcctcccgctggaggcggggaccctaacaaccttcaagaccagtgatgggccggctccgaggctccgggcgggaatgggacctgcgctccagggtggtctcggtcccagggtggtcccagctggtgggagcctctggctgcatctgtgcagccacatccttgtacagaggcataggttaccacccccaccccggcccgggatactgcccccggcccagatcctggccgtctcatcccatacttctgtggggaatcagcctcctgccacccccccggaaggacctcactgtctccagctatgcccagtgctgcatgggacccatgtctcctgggacagaggccatctctcttccagagagaggcagcattggcccacaggataagcctcaggccctgggaaacctcccgacccctgcaccttcgttggagcccctgcatcccctgggtccagccccctctgcatttacacagatttgagtcagaactggaaagtgtcccccacccccaccaccctcgagcggggttcccctcattgtacagatggggcaggacccagcacgctgctggcagagatggtttgagaacacatccaagccagtccccccagcccagcttcccctccgttcctaactgttggctttcccccagccgcacggtcccaggcccagagaagatgagtctatggcatcaggttcttaaaccaggaaagcacctacagaccggctcctccatgcactttaccagctcaacgcatccactctctgttctcttggcagggcgggggaggggggataggaggtcccctttcccctaggtggtctcataattccatttgtggagagaacaggagggccagatagataggtcctagcagaaggcattgaggtgagggatcattttgggtcagacatcaatgtccctgtcccccctgggtccagccaagctgtgccccatcccccaagcctcctgggaggatccagccaaatcttgcgactcctggcacacacctgtctgtaacctgttttgtgctctgaaagcaaatagtcctgagcaaaaaaaaaaaaaaaaaacaaaaaaacaaaaaaaaaacaaaacagtttttaaaactgattttagaaaaagaagcttaatctaacgttttcaaacacaaggtctcttacaggtatagttccgtgattatgatagctctgtgattataagcaacatccccgccccctctcccccccgcggacccccagctgcctcctgagggtgtggggttattagggtctcaatactttctcaaggggctacactccccatcaggcagcatcccaccagcctgcaccacaggctcccctgggaggacgagggaaacgctgatgagacgctgggcatctctcctctgtggctctaggacatctgtccaggaggctgggcggaggtgggcaggatgtgagaggtggggagtactggctgtgcgtggcaggacagaagcactgtaaagggctctccagcgcagctcagctgcactgcgttccgaggtgaagtcttgcccctgaattttgcaaaatgggaaagtgggcgcttgccaagggccaggctgcatggattctcacatcagagttctctggccctagaaaggcttagaaaaggcgtaagggaactcataaaggctagcagcatgcggtattttaactttctgcctcggcctctgtggatgcagaaatctgccctacaaaatgctcttcattggttgtctctgtgagagcactgtccccacccaacctgtcacaacggccagaaccatacaccagagacacactggcaggttaggcagtccttctggtgatcctattccattccctcctgctgcggtttctcttggcctgtcctcactggaaaaacagtctccatctcctcaaaatagttgctgactccctgcacccaaggggcctctccatgccttcttaggaagcagctatgaatccattgtccttgtagtttcttccctcctgttctctggttatagctggtcccaggtcagcgtgggaggcacctttgggttcccagtgcccagcactttgtagtctcatcccagattactaacccttcctgatcctggagaggcagggatagtaaataaattgctcttcctaccccatcccccatcccctgacaaaaagtgacggcagccgtactgagtctgtaaggcccaaagtgggtacagacagcctgggctggtaaaagtaggtccttatttacaaggctgcgttaaagttgtactaggcaaacacactgatgtaggaagcacgaggaaaggaagacgttttgatatagtgttactgtgagcctgtcagtagtgggtaccaatcttttgtgacatattgtcatgctgaggtgtgacacctgctgcactcatctgatgtaaaaccatcccagagctggcgagaggatggagctgggtggaaactgctttgcactatcgtttgcttggtgtttgtttttaacgcacaacttgcttgtacagtaaactgtcttctgtactatttaactgta

SEQ ID NO: 1090 - protein, 415 aa, Homo sapien
MRIPVDPSTSRRFTPPSPAFPCGGGGGKMGENSGALSAQAAVGPGGRARPEVRSMVDVLADHAGELVRTDSPNFLCSVLPSHWRCNKTLPVAFKVVALGDVPDGTVVTVMAGNDENYSAELRNASAVMKNQVARFNDLRFVGRSGRGKSFTLTITVFTNPTQVATYHRAIKVTVDGPREPRRHRQKLEDQTKPFPDRFGDLERLRMRVTPSTPSPRGSLSTTSHFSSQPQTPIQGTSELNPFSDPRQFDRSFPTLPTLTESRFPDPRMHYPGAMSAAFPYSATPSGTSISSLSVAGMPATSRFHHTYLPPPYPGAPQNQSGPFQANPSPYHLYYGTSSGSYQFSMVAGSSSGGDRSPTRMLASCTSSAASVAAGNLMNPSLGGQSDGVEADGSHSNSPTALSTPGRMDEAVWRPY

SEQ ID NO: 1091 - DNA, 1001 bp, Homo sapien
gccgcggctgcggaacgggcggaggctgccggtttcgtaaccgtcgctcctcctcgctgactcgcgggctgtgaggcctgggtcggctcgggccgcaccgcgcggggccgctcggagtggaggccgcctgggggcaggcgggctagaggagcaggtacatgtgaagattttttggcagcttagcgtggaaaccattgatcaccctgctctcatttctacctgttctgtgttggcaagggagagtgcccaaatgagcaagatatcgcagcaaaacagcactccaggggtgaacggaattagtgttatccatacccaggcacatgccagcggcttacagcaggttcctcagctggtgcctgctggccctgggggaggaggcaaagctgtggctcccagcaagcagagcaaaaagagttcgcccatggatcgaaacagtgacgagtatcggcaacgccgagagaggaacaacatggctgtgaaaaagagccggttgaaaagcaagcagaaagcacaagacacactgcagagagtcaatcagctcaaagaagagaatgaacggttggaagcaaaaatcaaattgctgaccaaggaattaagtgtactcaaagatttgtttcttgagcatgcacacaaccttgcagacaacgtacagtccattagcactgaaaatacgacagcagatggcgacaatgcaggacagtagacctcaccctttccagactttagagcttgtggcttgaatgttaaaggtgtgaccaccgacaccactcatgtcaatggctgaaagttgtccatttccatgactcaaagacccattggaggctattttctgggatcagcactgaagagttgattagctaaaaatgttagccttgtaattcgaatatctggttttaaatgatagaggtttttgtgggaatcaaaatcccccaaatgttaaggtatatggtaaaaaaagaaatatctgggatcccgatgttcttaataaatcctgacttccc

SEQ ID NO: 1092 - protein, 150 aa, Homo sapien
MSKISQQNSTPGVNGISVIHTQAHASGLQQVPQLVPAGPGGGGKAVAPSKQSKKSSPMDRNSDEYRQRRERNNMAVKKSRLKSKQKAQDTLQRVNQLKEENERLEAKIKLLTKELSVLKDLFLEHAHNLADNVQSISTENTTADGDNAGQ

SEQ ID NO: 1093 - DNA, 1717 bp, Homo sapien
ctgccagggggagggccccagagaaaaccagaaagagggtgagagactgaggaagataaagcgtcccagggcctcctacaccagcgcctgagcaggaagcgggaggggccatgactacgaggccctgggaggtcactttagggagggctgtcctaaaaccagaagcttggagcagaaagtgaaaccctggtgctccagacaaagatcttagtcgggactagccggccaaggatgaagcctcacttcagaaacacagtggagcgaatgtatcgagacacattctcctacaacttttataatagacccatcctttctcgtcggaataccgtctggctgtgctacgaagtgaaaacaaagggtccctcaaggccccctttggacgcaaagatctttcgaggccaggtgtattccgaacttaagtaccacccagagatgagattcttccactggttcagcaagtggaggaagctgcatcgtgaccaggagtatgaggtcacctggtacatatcctggagcccctgcacaaagtgtacaagggatatggccacgttcctggccgaggacccgaaggttaccctgaccatcttcgttgcccgcctctactacttctgggacccagattaccaggaggcgcttcgcagcctgtgtcagaaaagagacggtccgcgtgccaccatgaagatcatgaattatgacgaatttcagcactgttggagcaagttcgtgtacagccaaagagagctatttgagccttggaataatctgcctaaatattatatattactgcacatcatgctgggggagattctcagacactcgatggatccacccacattcactttcaactttaacaatgaaccttgggtcagaggacggcatgagacttacctgtgttatgaggtggagcgcatgcacaatgacacctgggtcctgctgaaccagcgcaggggctttctatgcaaccaggctccacataaacacggtttccttgaaggccgccatgcagagctgtgcttcctggacgtgattcccttttggaagctggacctggaccaggactacagggttacctgcttcacctcctggagcccctgcttcagctgtgcccaggaaatggctaaattcatttcaaaaaacaaacacgtgagcctgtgcatcttcactgcccgcatctatgatgatcaaggaagatgtcaggaggggctgcgcaccctggccgaggctggggccaaaatttcaataatgacatacagtgaatttaagcactgctgggacacctttgtggaccaccagggatgtcccttccagccctgggatggactagatgagcacagccaagacctgagtgggaggctgcgggccattctccagaatcaggaaaactgaaggatgggcctcagtctctaaggaaggcagagacctgggttgagcctcagaataaaagatcttcttccaagaaatgcaaacaggctgttcaccaccatctccagctgatcacagacaccagcaaagcaatgcactcctgaccaagtagattcttttaaaaattagagtgcattactttgaatcaaaaatttatttatatttcaagaataaagtactaagattgtgctcaatacacagaaaagtttcaaacctactaatccagcgacaatttgaatcggttttgtaggtagaggaataaaatgaaatactaaatctttctgtaaaaaaaaaa

SEQ ID NO: 1094 - protein, 384 aa, Homo sapien
MKPHFRNTVERMYRDTFSYNFYNRPILSRRNTVWLCYEVKTKGPSRPPLDAKIFRGQVYSELKYHPEMRFFHWFSKWRKLHRDQEYEVTWYISWSPCTKCTRDMATFLAEDPKVTLTIFVARLYYFWDPDYQEALRSLCQKRDGPRATMKIMNYDEFQHCWSKFVYSQRELFEPWNNLPKYYILLHIMLGEILRHSMDPPTFTFNFNNEPWVRGRHETYLCYEVERMHNDTWVLLNQRRGFLCNQAPHKHGFLEGRHAELCFLDVIPFWKLDLDQDYRVTCFTSWSPCFSCAQEMAKFISKNKHVSLCIFTARIYDDQGRCQEGLRTLAEAGAKISIMTYSEFKHCWDTFVDHQGCPFQPWDGLDEHSQDLSGRLRAILQNQEN

SEQ ID NO: 1095 - DNA, 561 bp, Homo sapien
aatcatgtctgactccctggtggtgtgcgaggtagacccagagctaacagaaaagctgaggaaattccgcttccgaaaagagacagacaatgcagccatcataatgaaggtggacaaagaccggcagatggtggtgctggaggaagaatttcagaacatttccccagaggagctcaaaatggagttgccggagagacagcccaggttcgtggtttacagctacaagtacgtgcatgacgatggccgagtgtcctaccctttgtgtttcatcttctccagccctgtgggctgcaagccggaacaacagatgatgtatgcagggagtaaaaacaggctggtgcagacagcagagctcacaaaggtgttcgaaatccgcaccactgatgacctcactgaggcctggctccaagaaaagttgtctttctttcgttgatctctgggctggggactgaattcctgatgtctgagtcctcaggtgactggggacttggaaccctaggacctgaacaaccaagactttaaataattttaaatgcaaaaactcagaaaaaaaaaaaaaaa

SEQ ID NO: 1096 - protein, 142 aa, Homo sapien
MSDSLVVCEVDPELTEKLRKFRFRKETDNAAIIMKVDKDRQMVVLEEEFQNISPEELKMELPERQPRFVVYSYKYVHDDGRVSYPLCFIFSSPVGCKPEQQMMYAGSKNRLVQTAELTKVFEIRTTDDLTEAWLQEKLSFFR

SEQ ID NO: 1097 - DNA, 1061 bp, Homo sapien
ctctgttttctcaaagctgaagtcggctaggtttgcaaagctgtgggctgagcactcaggcaatcacactctcagaaactgcggcggctctggactgcagcctcccaaggctccatgccagacaaagcatgcgtgtcacacttgctacaatagcctggatggtttcttttgtctccaattattcacacacagcaaatattttgccagatatcgaaaatgaagatttcatcaaagactgcgttcgaatccataacaagttccgatcagaggtgaaaccaacagccagtgatatgctatacatgacttgggacccagcactagcccaaattgcaaaagcatgggccagcaattgccagttttcacataatacacggctgaagccaccccacaagctgcacccaaacttcacttcactgggagagaacatctggactgggtctgtgcccattttttctgtgtcttccgccatcacaaactggtatgacgaaatccaggactatgacttcaagactcggatatgcaaaaaagtctgtggccactacactcaggttgtttgggcagatagttacaaagttggctgcgcagttcaattttgccctaaagtttctggctttgacgctctttccaatggagcacattttatatgcaactacggaccaggagggaattacccaacttggccatataagagaggagccacctgcagtgcctgccccaataatgacaagtgtttggacaatctctgtgttaaccgacagcgagaccaagtgaaacgttactactctgttgtatatccaggctggcccatatatccacgtaacagatacacttctctctttctcattgttaattcagtaattctaatactgtctgttataattaccattttggtacagctcaagtaccctaatttagttcttttggactaatacaattcaggaaagaaaaaacccaaaaaccaacctcattcacatatggcttttttttaaccaataacaattaggtgtacttctattttaaaacatttcagaaaaaaatatatgttatagcaatactcttac

SEQ ID NO: 1098 - protein, 266 aa, Homo sapien
MRVTLATIAWMVSFVSNYSHTANILPDIENEDFIKDCVRIHNKFRSEVKPTASDMLYMTWDPALAQIAKAWASNCQFSHNTRLKPPHKLHPNFTSLGENIWTGSVPIFSVSSAITNWYDEIQDYDFKTRICKKVCGHYTQVVWADSYKVGCAVQFCPKVSGFDALSNGAHFICNYGPGGNYPTWPYKRGATCSACPNNDKCLDNLCVNRQRDQVKRYYSVVYPGWPIYPRNRYTSLFLIVNSVILILSVIITILVQLKYPNLVLLD

SEQ ID NO: 1099 - DNA, 4166 bp, Homo sapien
cggcgcgggtgttgagagcggtgtggtaggtgttgtagccgctatggtgaagttcgctttgtagcggccccggctagagagttggcctgttccctgcctttgtgacccggaggagcttttgggggtgcgtcaagcccctggcctgaggcagcgaactggtttgtggcctgtttgattcctgtcagaggtttgctgacccaagacagtatcgaaaatgcatattaagtcaattattctagagggattcaagtcctatgctcagaggaccgaagtcaatggttttgaccccctcttcaatgctatcactggcttaaatggtagtgggaaatccaacatattggactccatctgctttttactgggcatctccaacctgtctcaggttcgggcttctaatttacaagatttagtttacaaaaatgggcaggctggtattaccaaagcctctgtgtcaatcacttttgataattctgacaaaaagcaaagtcctttaggatttgaggttcatgatgaaatcacagtaacaaggcaggtggttattggtggtagaaataaatatttaatcaatggagtcaatgccaacaacaccagagtacaggatctcttctgttctgttggccttaatgttaacaaccctcactttctcatcatgcagggccgaattacaaaagtattgaatatgaaaccaccagagattttatccatgatagaagaagcagctggaaccaggatgtatgaatacaaaaaaatagctgcacagaaaactatagaaaaaaaggaggctaagctgaaagaaattaagacgatacttgaagaagagattactccaaccattcaaaaattaaaagaggaaagatcgtcctacttggagtaccaaaaagtaatgagagaaatagaacatttgagtcgtttatatattgcttatcagtttttgctggctgaagataccaaagtacgctcagctgaggaattaaaagaaatgcaagataaagttataaagcttcaggaagaattgtctgagaatgataaaaaaataaaagcacttaatcatgaaatagaagaattggaaaaaagaaaagataaggaaactggagttatacttcgatctttagaagatgctcttgcagaggctcagcgagttaatactaaatctcaaagcgcatttgatctcaagaagaaaaatctggcatgtgaggaaagcaaacgcaaagagctggaaaaaaatatggttgaggactcaaaaactttagcagcaaaggaaaaagaggttaaaaagataacagatggactgcatgcccttcaagaagcaagtaataaagatgctgaagctctggcagctgcacagcagcacttcaatgctgtttccgctggcctgtccagtaatgaagatggagcagaagcaactcttgctggtcaaatgatggcctgtaaaaatgatataagtaaagctcagacagaagccaaacaggctcagatgaagttgaagcatgctcaacaggaattaaagaataaacaagctgaagttaagaagatggatagtggctacaggaaggatcaagaagctctagaagctgtaaaaagacttaaagaaaaacttgaagctgaaatgaaaaagctaaattatgaagaaaataaagaggaaagccttttggaaaagcgcaggcagctgtctcgtgatattggtagattgaaagaaacatatgaagctctattagccagatttcccaatcttcgatttgcatacaaggatccagagaagaactggaatagaaattgtgtgaaaggacttgtggcttctctgattagtgtgaaagacacttctgcaaccacagctttagaattagtggctggagaacgactctacaatgttgtagtagacacagaagttactggtaaaaagctactagaaaggggggaactgaaacgtcgatacactataattccactcaataaaatttcagccagatgtattgcaccagaaactctgagagttgctcagaatcttgttggccctgacaacgttcatgtggctctttccttggttgaatataaaccagaacttcagaaagcaatggagtttgtctttggaacaacatttgtttgtgacaatatggataatgccaaaaaagtggcctttgataagaggataatgactagaactgtaactctcggaggtgatgtgtttgatcctcatgggacattgagtggaggtgctcgatcccaggcagcttccattttaaccaagtttcaagaactcaaagatgttcaggatgaactgagaatcaaagagaatgagctgcgggctctagaagaggaattagcaggtcttaaaaacactgctgaaaagtatcgccaactaaaacagcagtgggagatgaaaactgaagaggcagatttattacaaaccaagctccagcaaagctcatatcacaagcaacaagaagaattagatgcccttaaaaaaaccattgaggaaagtgaggagactttgaaaaacactaaagaaatccaaagaaaagcagaagaaaaatatgaagtattggaaaataaaatgaaaaatgcagaagctgaaagagagcgagaactgaaagatgctcagaaaaaactggattgtgccaaaacaaaggcagatgcatctagcaagaagatgaaagaaaaacaacaggaagttgaagctatcactctggaactggaagagctcaagagagagcatacatcttacaaacaacagcttgaagctgtaaatgaagctatcaaatcctatgaaagtcagattgaagtaatggcagctgaggtggctaaaaataaggagtcagtaaataaagctcaagaagaggtgaccaagcaaaaagaggtgataacagcccaagacactgtaattaagctaaatatgcagaagtggcaaaacacaaggagcaaaacaatgattctcagccttaaaattaaggaattagaccaccacatcagcaaacataaacgggaggctgaagatggtgctgcaaaggtatccaaaatgttgaaagattatgactggattaatgcagagagacacctctttggccaacccaatagtgcctatgatttcaaaactaacaaccctaaagaagctggtcagagacttcagaagttgcaagaaatgaaggagaaactaggaagaaatgtcaatatgagagctatgaatgtattgacagaagctgaagagcgatgcaatgacttgatgaagaagaagagaattgtagaaaatgacaaatccaaaattcttacaactatagaagaccttgaccagaagaaaaaccaagccctaaatattgcatggcaaaaggtgaacaaggactttgggtctattttttctactcttttgcctggtgctaatgctatgcttgcaccaccagagggtcaaactgttttggatggtctggagttcaaggttgccttaggaaatacctggaaagaaaacctaactgaacttagtggtggtcagaggtctttagtggccttgtcattaatactgtccatgcttctcttcaaacctgctccaatttatatccttgatgaggtagatgcagccttggatctttctcatacccaaaacattggacagatgctgcgtactcatttcacacattctcagttcattgtggtgtcactaaaagaaggtatgttcaacaatgcaaacgttcttttcaaaaccaagtttgtggatggtgtttctacagtagccagatttactcaatgtcaaaatggaaagatttcaaaggaagcaaaatccaaggcaaaaccacccaaaggagcacatgtggaagtttaaactacaaagttatttcttcatcttgacctgtttttttaaatgtaaacttttaaggacttgagataactaatttgtttatatacaaaaattaatgttactgtgttacttaacccatgttttctctttatataatcacttatcgcttacaaatgagcatatattcctcatctcttaactagtctaattatggtccaattattgtggttgtgattttatgcatatccatcaaaatgttttttttcttatgcgggtcttttatatattagggatcctgagatacccgattctatatgtaaaagctaatatacaaaaaagcagattaaattacatgataaatgtagctgaaaaaaaaaaaaaa

SEQ ID NO: 1100 - protein, 1197 aa, Homo sapien
MHIKSIILEGFKSYAQRTEVNGFDPLFNAITGLNGSGKSNILDSICFLLGISNLSQVRASNLQDLVYKNGQAGITKASVSITFDNSDKKQSPLGFEVHDEITVTRQVVIGGRNKYLINGVNANNTRVQDLFCSVGLNVNNPHFLIMQGRITKVLNMKPPEILSMIEEAAGTRMYEYKKIAAQKTIEKKEAKLKEIKTILEEEITPTIQKLKEERSSYLEYQKVMREIEHLSRLYIAYQFLLAEDTKVRSAEELKEMQDKVIKLQEELSENDKKIKALNHEIEELEKRKDKETGVILRSLEDALAEAQRVNTKSQSAFDLKKKNLACEESKRKELEKNMVEDSKTLAAKEKEVKKITDGLHALQEASNKDAEALAAAQQHFNAVSAGLSSNEDGAEATLAGQMMACKNDISKAQTEAKQAQMKLKHAQQELKNKQAEVKKMDSGYRKDQEALEAVKRLKEKLEAEMKKLNYEENKEESLLEKRRQLSRDIGRLKETYEALLARFPNLRFAYKDPEKNWNRNCVKGLVASLISVKDTSATTALELVAGERLYNVVVDTEVTGKKLLERGELKRRYTIIPLNKISARCIAPETLRVAQNLVGPDNVHVALSLVEYKPELQKAMEFVFGTTFVCDNMDNAKKVAFDKRIMTRTVTLGGDVFDPHGTLSGGARSQAASILTKFQELKDVQDELRIKENELRALEEELAGLKNTAEKYRQLKQQWEMKTEEADLLQTKLQQSSYHKQQEELDALKKTIEESEETLKNTKEIQRKAEEKYEVLENKMKNAEAERERELKDAQKKLDCAKTKADASSKKMKEKQQEVEAITLELEELKREHTSYKQQLEAVNEAIKSYESQIEVMAAEVAKNKESVNKAQEEVTKQKEVITAQDTVIKLNMQKWQNTRSKTMILSLKIKELDHHISKHKREAEDGAAKVSKMLKDYDWINAERHLFGQPNSAYDFKTNNPKEAGQRLQKLQEMKEKLGRNVNMRAMNVLTEAEERCNDLMKKKRIVENDKSKILTTIEDLDQKKNQALNIAWQKVNKDFGSIFSTLLPGANAMLAPPEGQTVLDGLEFKVALGNTWKENLTELSGGQRSLVALSLILSMLLFKPAPIYILDEVDAALDLSHTQNIGQMLRTHFTHSQFIVVSLKEGMFNNANVLFKTKFVDGVSTVARFTQCQNGKISKEAKSKAKPPKGAHVEV

SEQ ID NO: 1101 - DNA, 2328 bp, Homo sapien
ggaagcagggcggggcctctggtggcggtcgggaactcggtgggaggcggcaacattgtttcaagttggccaaattgacaagagcgagaggtatactgcgttccatcccgacccggggccacggtactgggccctgtttccccctcctcggcccccgagagccagggtccgccttctgcagggttcccaggcccccgctccagggccgggctgacccgactcgctggcgcttcatggagaacttccaaaaggtggaaaagatcggagagggcacgtacggagttgtgtacaaagccagaaacaagttgacgggagaggtggtggcgcttaagaaaatccgcctggacactgagactgagggtgtgcccagtactgccatccgagagatctctctgcttaaggagcttaaccatcctaatattgtcaagctgctggatgtcattcacacagaaaataaactctacctggtttttgaatttctgcaccaagatctcaagaaattcatggatgcctctgctctcactggcattcctcttcccctcatcaagagctatctgttccagctgctccagggcctagctttctgccattctcatcgggtcctccaccgagaccttaaacctcagaatctgcttattaacacagagggggccatcaagctagcagactttggactagccagagcttttggagtccctgttcgtacttacacccatgaggtggtgaccctgtggtaccgagctcctgaaatcctcctgggctgcaaatattattccacagctgtggacatctggagcctgggctgcatctttgctgagatggtgactcgccgggccctattccctggagattctgagattgaccagctcttccggatctttcggactctggggaccccagatgaggtggtgtggccaggagttacttctatgcctgattacaagccaagtttccccaagtgggcccggcaagattttagtaaagttgtacctcccctggatgaagatggacggagcttgttatcgcaaatgctgcactacgaccctaacaagcggatttcggccaaggcagccctggctcaccctttcttccaggatgtgaccaagccagtaccccatcttcgactctgatagccttcttgaagcccccagccctaatctcaccctctcctccagtgtgggcttgaccaggcttggccttgggctatttggactcaggtgggccctctgaacttgccttaaacactcaccttctagtcttggccagccaactctgggaatacaggggtgaaaggggggaaccagtgaaaatgaaaggaagtttcagtattagatgcacttaagttagcctccaccaccctttcccccttctcttagttattgctgaagagggttggtataaaaataattttaaaaaagccttcctacacgttagatttgccgtaccaatctctgaatgccccataattattatttccagtgtttgggatgaccaggatcccaagcctcctgctgccacaatgtttataaaggccaaatgatagcgggggctaagttggtgcttttgagaaccaagtaaaacaaaaccactgggaggagtctattttaaagaattcggttgaaaaaatagatccaatcagtttataccctagttagtgttttgcctcacctaataggctgggagactgaagactcagcccgggtggggctgcagaaaaatgattggccccagtccccttgtttgtcccttctacaggcatgaggaatctgggaggccctgagacagggattgtgcttcattccaatctattgcttcaccatggccttatgaggcaggtgagagatgtttgaatttttctcttccttttagtattcttagttgttcagttgccaaggatccctgatcccattttcctctgacgtccacctcctaccccataggagttagaagttagggtttaggcatcattttgagaatgctgacactttttcagggctgtgattgagtgagggcatgggtaaaaatatttctttaaaagaaggatgaacaattatatttatatttcaggttatatccaatagtagagttggcttttttttttttttttttggtcatagtgggtggatttgttgccatgtgcaccttggggttttgtaatgacagtgctaaaaaaaaaaaagcatttttttttatgatttgtctctgtcacccttgtccttgagtgctcttgctattaacgttatttgtaatttagtttgtagctcattaaaaaaatgtgcctagttttataaaaaaaaaaaaaaaaaaaaaaaaaaaaaaaaaaaaaaa

SEQ ID NO: 1102 - protein, 298 aa, Homo sapien
MENFQKVEKIGEGTYGVVYKARNKLTGEVVALKKIRLDTETEGVPSTAIREISLLKELNHPNIVKLLDVIHTENKLYLVFEFLHQDLKKFMDASALTGIPLPLIKSYLFQLLQGLAFCHSHRVLHRDLKPQNLLINTEGAIKLADFGLARAFGVPVRTYTHEVVTLWYRAPEILLGCKYYSTAVDIWSLGCIFAEMVTRRALFPGDSEIDQLFRIFRTLGTPDEVVWPGVTSMPDYKPSFPKWARQDFSKVVPPLDEDGRSLLSQMLHYDPNKRISAKAALAHPFFQDVTKPVPHLRL

SEQ ID NO: 1103 - DNA, 4604 bp, Homo sapien
ggaacagcttgtccacccgccggccggaccagaagcctttgggtctgaagtgtctgtgagacctcacagaagagcacccctgggctccacttacctgccccctgctccttcagggatggaggcaatggcggccagcacttccctgcctgaccctggagactttgaccggaacgtgccccggatctgtggggtgtgtggagaccgagccactggctttcacttcaatgctatgacctgtgaaggctgcaaaggcttcttcaggcgaagcatgaagcggaaggcactattcacctgccccttcaacggggactgccgcatcaccaaggacaaccgacgccactgccaggcctgccggctcaaacgctgtgtggacatcggcatgatgaaggagttcattctgacagatgaggaagtgcagaggaagcgggagatgatcctgaagcggaaggaggaggaggccttgaaggacagtctgcggcccaagctgtctgaggagcagcagcgcatcattgccatactgctggacgcccaccataagacctacgaccccacctactccgacttctgccagttccggcctccagttcgtgtgaatgatggtggagggagccatccttccaggcccaactccagacacactcccagcttctctggggactcctcctcctcctgctcagatcactgtatcacctcttcagacatgatggactcgtccagcttctccaatctggatctgagtgaagaagattcagatgacccttctgtgaccctagagctgtcccagctctccatgctgccccacctggctgacctggtcagttacagcatccaaaaggtcattggctttgctaagatgataccaggattcagagacctcacctctgaggaccagatcgtactgctgaagtcaagtgccattgaggtcatcatgttgcgctccaatgagtccttcaccatggacgacatgtcctggacctgtggcaaccaagactacaagtaccgcgtcagtgacgtgaccaaagccggacacagcctggagctgattgagcccctcatcaagttccaggtgggactgaagaagctgaacttgcatgaggaggagcatgtcctgctcatggccatctgcatcgtctccccagatcgtcctggggtgcaggacgccgcgctgattgaggccatccaggaccgcctgtccaacacactgcagacgtacatccgctgccgccacccgcccccgggcagccacctgctctatgccaagatgatccagaagctagccgacctgcgcagcctcaatgaggagcactccaagcagtaccgctgcctctccttccagcctgagtgcagcatgaagctaacgccccttgtgctcgaagtgtttggcaatgagatctcctgactaggacagcctgtgcggtgcctgggtggggctgctcctccagggccacgtgccaggcccggggctggcggctactcagcagccctcctcacccgtctggggttcagcccctcctctgccacctcccctatccacccagcccattctctctcctgtccaacctaacccctttcctgcgggcttttccccggtcccttgagacctcagccatgaggagttgctgtttgtttgacaaagaaacccaagtgggggcagagggcagaggctggaggcaggccttgcccagagatgcctccaccgctgcctaagtggctgctgactgatgttgagggaacagacaggagaaatgcatccattcctcagggacagagacacctgcacctccccccactgcaggccccgcttgtccagcgcctagtggggtctccctctcctgccttactcacgataaataatcggcccacagctcccaccccacccccttcagtgcccaccaacatcccattgccctggttatattctcacgggcagtagctgtggtgaggtgggttttcttcccatcactggagcaccaggcacgaacccacctgctgagagacccaaggaggaaaaacagacaaaaacagcctcacagaagaatatgacagctgtccctgtcaccaagctcacagttcctcgccctgggtctaaggggttggttgaggtggaagccctccttccacggatccatgtagcaggactgaattgtccccagtttgcagaaaagcacctgccgacctcgtcctccccctgccagtgccttacctcctgcccaggagagccagccctccctgtcctcctcggatcaccgagagtagccgagagcctgctcccccaccccctccccaggggagagggtctggagaagcagtgagccgcatcttctccatctggcagggtgggatggaggagaagaattttcagaccccagcggctgagtcatgatctccctgccgcctcaatgtggttgcaaggccgctgttcaccacagggctaagagctaggctgccgcaccccagagtgtgggaagggagagcggggcagtctcgggtggctagtcagagagagtgtttgggggttccgtgatgtagggtaaggtgccttcttattctcactccaccacccaaaagtcaaaaggtgcctgtgaggcaggggcggagtgatacaacttcaagtgcatgctctctgcaggtcgagcccagcccagctggtgggaagcgtctgtccgtttactccaaggtgggtctttgtgagagtgagctgtaggtgtgcgggaccggtacagaaaggcgttcttcgaggtggatcacagaggcttcttcagatcaatgcttgagtttggaatcggccgcattccctgagtcaccaggaatgttaaagtcagtgggaacgtgactgccccaactcctggaagctgtgtccttgcacctgcatccgtagttccctgaaaacccagagaggaatcagacttcacactgcaagagccttggtgtccacctggccccatgtctctcagaattcttcaggtggaaaaacatctgaaagccacgttccttactgcagaatagcatatatatcgcttaatcttaaatttattagatatgagttgttttcagactcagactccatttgtattatagtctaatatacagggtagcaggtaccactgatttggagatatttatggggggagaacttacattgtgaaacttctgtacattaattattattgctgttgttattttacaagggtctagggagagacccttgtttgattttagctgcagaactgtattggtccagcttgctcttcagtgggagaaaaacacttgtaagttgctaaacgagtcaatcccctcattcaggaaaactgacagaggagggcgtgactcacccaagccatatataactagctagaagtgggccaggacaggccgggcgcggtggctcacgcctgtaatcccagcagtttgggaggtcgaggtaggtggatcacctgaggtcgggagttcgagaccaacctgaccaacatggagaaaccctgtctctattaaaaatacaaaaaaaaaaaaaaaaaaaaatagccgggcatggtggcgcaagcctgtaatcccagctactcaggaggctgaggcagaagaattgaacccaggaggtggaggttgcagtgagctgagatcgtgccgttactctccaacctggacaacaagagcgaaactccgtcttagaagtggaccaggacaggaccagattttggagtcatggtccggtgtccttttcactacaccatgtttgagctcagacccccactctcattccccaggtggctgacccagtccctgggggaagccctggatttcagaaagagccaagtctggatctgggaccctttccttccttccctggcttgtaactccaccaagcccatcagaaggagaaggaaggagactcacctctgcctcaatgtgaatcagaccctaccccaccacgatgtgccctggctgctgggctctccacctcaggccttggataatgctgttgcctcatctataacatgcatttgtctttgtaatgtcaccaccttcccagctctccctctggccctgcttcttcggggaactcctgaaatatcagttactcagccctgggccccaccacctaggccactcctccaaaggaagtctaggagctgggaggaaaagaaaagaggggaaaatgagtttttatggggctgaacggggagaaaaggtcatcatcgattctactttagaatgagagtgtgaaatagacatttgtaaatgtaaaacttttaaggtatatcattataactgaaggagaaggtgccccaaaatgcaagattttccacaagattcccagagacaggaaaatcctctggctggctaactggaagcatgtaggagaatccaagcgaggtcaacagagaaggcaggaatgtgtggcagatttagtgaaagctagagatatggcagcgaaaggatgtaaacagtgcctgctgaatgatttccaaagagaaaaaaagtttgccagaagtttgtcaagtcaaccaatgtagaaagctttgcttatggtaataaaaatggctcatacttatatagcacttactttgtttgcaagtactgctgtaaataaatgctttatgcaaacc

SEQ ID NO: 1104 - protein, 427 aa, Homo sapien
MEAMAASTSLPDPGDFDRNVPRICGVCGDRATGFHFNAMTCEGCKGFFRRSMKRKALFTCPFNGDCRITKDNRRHCQACRLKRCVDIGMMKEFILTDEEVQRKREMILKRKEEEALKDSLRPKLSEEQQRIIAILLDAHHKTYDPTYSDFCQFRPPVRVNDGGGSHPSRPNSRHTPSFSGDSSSSCSDHCITSSDMMDSSSFSNLDLSEEDSDDPSVTLELSQLSMLPHLADLVSYSIQKVIGFAKMIPGFRDLTSEDQIVLLKSSAIEVIMLRSNESFTMDDMSWTCGNQDYKYRVSDVTKAGHSLELIEPLIKFQVGLKKLNLHEEEHVLLMAICIVSPDRPGVQDAALIEAIQDRLSNTLQTYIRCRHPPPGSHLLYAKMIQKLADLRSLNEEHSKQYRCLSFQPECSMKLTPLVLEVFGNEIS

SEQ ID NO: 1105 - DNA, 4604 bp, Homo sapien; identical to SEQ ID NO: 1103

SEQ ID NO: 1106 - protein, 427 aa, Homo sapien; identical to SEQ ID NO: 1104

SEQ ID NO: 1107 - DNA, 3045 bp, Homo sapien
actaagaccgcaaggcattcatttcctcctacggtggatgcggacgccgggaggaggagagccccagagagaggagctgggagcggaggcgcaggcaatgctcagccctggatgtagctgagaggctgggagaagagacgaccgctggagaccgagcggcgtggggaagacctaggggggtgggtgggggaagcagacaggagaacactcgaaatcaagcgctttacagattattttattttgtatagagaacacgtagcgactccgaagatcagccccaatgaacatgtcagtgttgactttacaagaatatgaattcgaaaagcagttcaacgagaatgaagccatccaatggatgcaggaaaactggaagaaatctttcctgttttctgctctgtatgctgcctttatattcggtggtcggcacctaatgaataaacgagcaaagtttgaactgaggaagccattagtgctctggtctctgacccttgcagtcttcagtatattcggtgctcttcgaactggtgcttatatggtgtacattttgatgaccaaaggcctgaagcagtcagtttgtgaccagggtttttacaatggacctgtcagcaaattctgggcttatgcatttgtgctaagcaaagcacccgaactaggagatacaatattcattattctgaggaagcagaagctgatcttcctgcactggtatcaccacatcactgtgctcctgtactcttggtactcctacaaagacatggttgccgggggaggttggttcatgactatgaactatggcgtgcacgccgtgatgtactcttactatgccttgcgggcggcaggtttccgagtctcccggaagtttgccatgttcatcaccttgtcccagatcactcagatgctgatgggctgtgtggttaactacctggtcttctgctggatgcagcatgaccagtgtcactctcactttcagaacatcttctggtcctcactcatgtacctcagctaccttgtgctcttctgccatttcttctttgaggcctacatcggcaaaatgaggaaaacaacgaaagctgaatagtgttggaactgaggaggaagccatagctcagggtcatcaagaaaaataatagacaaaagaaaatggcacaaggaatcacacgtggtgcagctaaaacaaaacaaaacatgagcaaacacaaaacccaaggcagcttagggataattaggttgatttaacccagtaagtttatgatccttttagggtgaggactcactgagtgcacctccatctccaagcactgctgctggaagaccccattccctctttatctatcaactctaggacaagggagaacaaaagcaagccagaagcagaggagactaatcaaaggcaaacaaaggctattaacacataggaaaatatgtatttactaagtgtcacatttctctaagatgaaagatttttactctagaaactgtgcgagcacaacacacacaatcctttctaactttatggacactaaactggagccaatagaaaagacaaaaatgaaagagacacagggtgtatatctagaacgataatgcttttgcagaaactaaagcctttttaagaaatgccagctgctgtagaccccatgagaaaagatgtcttaatcatccttatgaaaacagatgtaaacaactatatttcaactaacttcatcttcactgcatagcctcaggctagtgagtttgccaaaaccaaagggggtgaatacttccccaagattcttcctgggaggatggaaacagtgcagcccaggtcccatgggggcagctccatcccagagcatttctgatagttgaactgtaatttctactcttaagtgagatatgaagtattatccttttgttcagttgccccgggcttttgaacagaagagtaaatacagaattgaaaaagataaacactcaaccaaacaatgtgaaaacgggttctgtagtatttgtaaaaaggcccggcccaggaccactgtgagctggaaaagggagaaaggcagtgggaaaagaggtgagccgaagatcaattcgacagacagacggtgtgtatgcccctccctgtttgacttcacacacactcataactttccaaatgaaaccccacagtatagcgcatattttcgatatttttgtgaattccaaaaggaaatcacagggctgttcgaaatattgggggaacactgtgtttctgcatcatctgcatttgctccccaagcaatgtagaggtgtttaaagggccctctgctggctgagtggcaatactacaacaaacttcaaggcaagtttggctgaaaacagttgacaacaaagggcccccatacacttatccctcaaattttaagtgatatgaaatacttgtcatgtctttggccaaatcagaagatattcatcctgcttcaagtcagcttcagaaatgttttaaaagggactttagctctggaactcaaaatcaatttattaagagccatattctttaaaaaaaaaagctggataatattatctgtaatatttcagtcctttacaagccaaatacatgtgtcaatgtttctagtatttcaaagaagcaattatgtaaagttgttcaatgtgacataatagtattataattggttaagtagcttaatgattaggcaaactagatgaaaagattaggggcttccacactgcatagatcacacgcacatagccacgcatacacacacagacacacagatgtggggtacactgaatttcaaagcccaaatgaatagaaacacattttctggctagcagaaaaaaacaaaacaaaactgttgtttctctttcttgctttgagagtgtacagtaaaagggattttttcgaattatttttatattattttagctttaattgtgctgtcgttcatgaaacagagctgctctgcttttctgtcagagatggcaagggctttttcagcatctcgtttatgtgtggaatttaaaaagaataaagttttattccattctgaaaaaaaaaaaaaaaaa

SEQ ID NO: 1108 - protein, 265 aa, Homo sapien
MNMSVLTLQEYEFEKQFNENEAIQWMQENWKKSFLFSALYAAFIFGGRHLMNKRAKFELRKPLVLWSLTLAVFSIFGALRTGAYMVYILMTKGLKQSVCDQGFYNGPVSKFWAYAFVLSKAPELGDTIFIILRKQKLIFLHWYHHITVLLYSWYSYKDMVAGGGWFMTMNYGVHAVMYSYYALRAAGFRVSRKFAMFITLSQITQMLMGCVVNYLVFCWMQHDQCHSHFQNIFWSSLMYLSYLVLFCHFFFEAYIGKMRKTTKAE

SEQ ID NO: 1109 - DNA, 1885 bp, Homo sapien
cgggcactcaccgtgtgtagttggcatctccgcgcgtccggacacccgatcccagcatccctgcctgcaggactgttcgtgttcagctcgcgtcctgcagctgtccgaggtgctccagttggaggctgaggttcccgggctctgtcgctgagtgggcggcggcaccggcggagatgcctgggaagaaggcgcgcaagaacgctcaaccgagccccgcgcgggctccagcagagctggaagtcgagtgtgctactcaactcaggagatttggagacaaactgaacttccggcagaaacttctgaatctgatatccaaactcttctgctcaggaacctgactgcatcaaaaacttgcatgaggggactccttcaaaagagttttctcaggaggtgcacgtttcatcaatttgaagaaagactgcattgtaattgagaggaatgtgaaggtgcattcatgggtgcccttggaaacggaagatggaatacatcaaagtgaatttctgttcaagttttcccagattatcattctttgggatgagagaacattataaaaccactttgtttattttaaagcaagaatggaagacccttgaaaataaagaagtaattattgacacatttcttttttacttagagaatcgttctagtgtttttgccgaagattaccgctggcctactgtgaaggtagatgacctgtgattagactgggcggctggggagaaacagttcagtgcattgttgttgttgctgtttttggtgttttgcttttcagtgccaactcagcacattgtatatgattcggtttatacatattaccttgttataatgaaaaaactcattctgagaacactgaaatgttatactcagtgttgatttcttcggtcactacacaacgtaaaatcatttgtttcttttgactcaaattgtattgcttctgttcagatgatctttcattcaatgtgttcctgttgggcgttactagaaactatggaaaactggaaaataactttgaaaaaattggataaagtataggagggttacttggggccagtaaatcagtagactgaacattcaatataataaaagaacatggggattttgtataaccagggataataaaaagaaaaagaagttaatttttaattgatgtttttgaaacttagtagaacaaatattcagaagtaacttgataagatatgaatgtttctaaagagtttctaaaggttcgaaatgctccttgtcacattagtgtgcatcctacaaaaagtgatctcttaatgtaaattaagaatattttcataattggaatatacttttcttaaaaaaaaggaacagttagttctcatctagaatgaaagttccatatatgcattggtgaatatatatgtatacacatacttacatacttatatgggtatctgtatagataatttgtattagagtattatatagcttcttagtagggtctcaagtaagttcattttttttatctgggctatatacagtcctcaaataaataatgtcttgattttatttcagcaggaataattttatttattttgcctatttataattaaagtatttttctttagtttgaaatgtgtattaaagttacatttttgagttacaagagtcttataactacttgaatttttagttaaaatgtcttaatgtaggttgtagtcactttagatggaaaattacctcacatctgttttcttcagtattacttaagattgtttatttagtggtagagagattttttttttcagcctagaggcagctattttaccatctggtatttatggtctaatttgtatttaaacatatgcacacatataaaagttgatactgtggcagtaaactattaaaagttttcactgtt

SEQ ID NO: 1110 - protein, 54 aa, Homo sapien
MPGKKARKNAQPSPARAPAELEVECATQLRRFGDKLNFRQKLLNLISKLFCSGT

SEQ ID NO: 1111 - DNA, 1885 bp, Homo sapien; identical to SEQ ID NO: 1109

SEQ ID NO: 1112 - protein, 54 aa, Homo sapien; identical to SEQ ID NO: 1110

SEQ ID NO: 1113 - DNA, 664 bp, Homo sapien
ggattgttggtctgcgtggaacttctcaggtggacaccagagcatggaacacatccacgacagcgatggcagttccagcagcagccaccagagcctcaagagcacagccaaatgggcggcatccctggagaatctgctggaagacccagaaggcgtgaaaagatttagggaatttttaaaaaaggaattcagtgaagaaaatgttttgttttggctagcatgtgaagattttaagaaaatgcaagataagacgcagatgcaggaaaaggcaaaggagatctacatgacctttctgtccagcaaggcctcatcacaggtcaacgtggaggggcagtctcggctcaacgagaagatcctggaagaaccgcaccctctgatgttccagaaactccaggaccagatctttaatctcatgaagtacgacagctacagccgctttcttaagtctgacttgtttttaaaacacaagcgaaccgaggaagaggaagaagatttgcctgatgctcaaactgcagctaaaagagcttccagaatttataacacatgagcccccaaaaagccgggactggcagctttaagaagcaaaggaatttcctctcaggacgtgccgggtttatcattgctttgttatttgtaaggactgaaatgtacaaaacccttcaat

SEQ ID NO: 1114 - protein, 167 aa, Homo sapien
MEHIHDSDGSSSSSHQSLKSTAKWAASLENLLEDPEGVKRFREFLKKEFSEENVLFWLACEDFKKMQDKTQMQEKAKEIYMTFLSSKASSQVNVEGQSRLNEKILEEPHPLMFQKLQDQIFNLMKYDSYSRFLKSDLFLKHKRTEEEEEDLPDAQTAAKRASRIYNT

SEQ ID NO: 1115 - DNA, 415 bp, Homo sapien
ccgctgcgtgttttcctcttgatcgggaactcctgcttctccttgcctcgaaatggaccccaactgctcctgctcgcctgttggctcctgtgcctgtgccggctcctgcaaatgcaaagagtgcaaatgcacctcctgcaagaagagctgctgctcctgctgccctgtgggctgtgcmaagtgtgcccagggctgcatctgcaaagggacgtcagacaagtgcagctgctgtgcctgatgccaggacagctgtgctctcagatgtaaatagagcaacctatataaacctggatttttttttttttttttttgtacaaccctgacccgtttgctacatctttttttctatgaaatatgtgaatggcaataaattcatctagactaaaaaaaaaaaaaaaaaaaaaaaaaaaaaaaa

SEQ ID NO: 1116 - protein, 61 aa, Homo sapien
MDPNCSCSPVGSCACAGSCKCKECKCTSCKKSCCSCCPVGCAKCAQGCICKGTSDKCSCCA

SEQ ID NO: 1117 - DNA, 439 bp, Homo sapien
ggtgggtctgaatctagcaccatgacggaactagagacagccatgggcatgatcatagacgtcttttcccgatattcgggcagcgagggcagcacgcagaccctgaccaagggggagctcaaggtgctgatggagaaggagctaccaggcttcctgcagagtggaaaagacaaggatgccgtggataaattgctcaaggacctggacgccaatggagatgcccaggtggacttcagtgagttcatcgtgttcgtggctgcaatcacgtctgcctgtcacaagtactttgagaaggcaggactcaaatgatgccctggagatgtcacagattcctgcagagccatggtcccaggcttcccaaaagtgtttgttggcaattattcccctaggctgagcctgctcatgtacctctgattaataaatgcttatgaaaaaaaaa

SEQ ID NO: 1118 - protein, 95 aa, Homo sapien
MTELETAMGMIIDVFSRYSGSEGSTQTLTKGELKVLMEKELPGFLQSGKDKDAVDKLLKDLDANGDAQVDFSEFIVFVAAITSACHKYFEKAGLK

SEQ ID NO: 1119 - DNA, 11740 bp, Homo sapien
cccggagccggtgcgaggagggcacccggtgcgtccccggagcggggaggccaggccgggcaaccctggggccggtcggggcggcgtcactgcaccctccgccaggctccgcgggatgcaccgtggtagccgagggcggaggcgacactctcaggtaaattggcaggatgaggagcagcaaatcaaaagaggtgcctttaccaaatccaaggaactctcaaagcaaggatactgttcaagcagatataaccacatcgtgggatgcactttctcaaaccaaggctgctctgagacacattgaaaataaattagaagtagcccctacaagtacagctgtgtgtgattctgtcatggataccaagaagtcttctacaagtgctactcgaaaaataagtagaaaagatggtagatacctggatgattcttgggttaatgctccaatctccaaatccactaaatcacgaaaagagaaatctcgtagtcctctcagggccaccaccctggagggtaatgtgaagaaaaataatcgtgtggaatttcgtgaacctttggtttcttatagggaaatccatggtgcaccttccaatttcagttccagccatctggaatcaaagcacgtatactgtgtagatgttaatgaagaaaagactgagagcggtaactggatgataggcagtcgagaagaacggaatatacggagctgtgattttgagagctcccaatcatctgtcatcaatgatacagttgttaggtttttaaatgatcgaccagcaattgatgcattgcaaaattctgaatgtttgattaggatgggagcttctatgagaactgaggaagaaatgcctaacagaacaaaaggaagtgagaataatttgaagctttctgtgaataacatggcccatgatactgatccaaaagcgttacgactaactgactcttctccatcctctactagtacttctaattcccaaagattagatattctaaagcggcgacaacatgatgtcaaactggaaaaacttaaggaacggattagaaaacagtgggaacactcagaagaaacaaatggccggggccagaagctgggtcatattgaccatccagtaatggttgttaatgttgataactcagtaacagcaaaagtcagaaaagtggcaacagcaccacctgctccagcatataaaggtttcaacccttcagagaccaagattcgaacacctgatgggaaagtgtggcaggaggctgagtttcaaaacatgagtagagaactgtatcgagatttagcacttcactttgcagatgatatttctataaaggagaaacctgctgaaaaaagtaaagagaagaaagtagtcaagccagtacgaaaagtccaaaaagtagcacagttatcaagtacagaatgcagaacaggtagtagtcatcttataagtacatcttcttggcgagatggacaaaaattagtaaagaagattctgggacctgctcccagaatggagccaaaagagcaaagaacagcatcaagtgacagaggtggaagaagaagaactgctaaatctgggggtcacattggaagagcagaatctgatcccaggttggacgttttacatagacatcttcaaagaaactcagaacgttcgagaagtaaatctcggtctgaaaataatataaagaaactagcttcatctcttccagataataagcaggaggaaaatactgccttaaataaggactttttacctattgaaattcgtggcattcttgatgacctacagctggattctacagctcacactgcaaagcaagatactgtagagttacagaaccagaagtcatcagcaccagtacatgctcctaggagtcacagcccagtaaaaagaaaacctgacaaaataacagctaatgaagatccccctgttatttccaaaaggcgccactatgacacagatgaggtacgacagtacattgttaggcagcaggaggaaaggaagagaaagcaaaatgaagagaagaaggctcaaaaggaggctacagaacagaaaaacaaacgattacaagagctctaccggaagcagaaggaagcctttactaaagtaaaaaatgtccctccttctgagccatcagcaactaggcgactacaggaaacttactccaaattgctactagaaaagaccttgcttgaagagccatctcatcaacatgttacgcaggaaacacaggccaaaccagggtatcagccatctggagaatctgacaaagaaaacaaagtacaggaacgtcccccaagtgcatcttccagtagtgacatgtctctctcagaacctccacagcctcttgcaagaaaagacttgatggaatctacatggatgcagcctgaaagattgagcccacaagttcaccattctcaaccacagccttttgctggaacagctggaagtttactctcccatctcttgagtttagagcatgtaggaattttgcataaggattttgaatctattttaccaaccaggaagaatcataatatggcttcaaggccattaacttttacacctcaaccatatgtgacctcaccagctgcttatacagatgccttgttaaaacctagtgccagccaatataagagtaaactggatcgtattgaagccttgaaagcaacagctgcttctttgtccagcagaattgaaagtgaagccaagaaattagctggggccagcattaactatgggtcagcatggaacactgagtatgatgtgcagcaggcacctcaagaagatggaccttggaccaaggctgtaactccacctgtgaaagatgataatgaagatgttttctctgccagaattcagaagatgctgggaagctgtgtatctcatgcaacttttgatgatgatcttcctggtgtaggcaatcttagtgaatttaaaaagcttcctgagatgataagaccacagagtgccatatcaagctttagagtgagatcccctggtcccaaaccacaagggctactggcacagttatgtaaaaggcagactgactcttctagctctgatatgcaagcctgttctcaagacaaagccaaaatatctcttggttccagcatagattcagtcagtgaagggcctcttcttagtgaggggagtctctctgaagaagagggagaccaggatggacagccccttttgaaagtagcagaaattttaaaagaaaaggaattttgtcctggagaaagaaatagttatgaacccatcaaagagtttcagaaagaagctgaaaaattcttgccactttttgggcacataggtggtacacaaagcaaaggaccatgggaagaattggcaaagggaagtccacatagcgtcattaatatttttacaaaatcctatcagttatatggaaaagggtttgaagacaagttggacagaggaacatcaacatcacggcctttgaatgccaccgcaactcctctaagtggtgtttcatatgaagatgattttgtctcctctccagggactgggacttcgacagaaaaaaaatcaactcttgaacctcatagcactttaagccctcaggaggaccattctaacagaaagtctgcctatgatccttcctctgtggatgttacctcccagcattcatcaggagcccagtctgctgcatcgtctcgttcatctacttcttctaaaggaaagaaaggaaaaaaggaaaagacagaatggttggattcattcactggaaatgttcagaactcacttcttgatgaggaaaaagcagaacgtggctcccatcaaggaaagaaatctgggaccagcagcaaactttctgttaaagattttgagcagactcttgatacagatagcactttggaggatctttctggacattctgtgagtgtctcatcagataagggaagatctcagaaaactccaacttctcccctgtcaccaagttcccagaaatcattgcagtttgacgttgcaggaacttcttcagaaagatctaagtcgtcagtaatgcctccaactataacaggatttaagcctaatgcacctctcactgatctgaacccggcagccagcagaacaacgacagagaacatggctccaataccaggttctaagcgcttttctcctgctggcctccatcatcgtatggcagcagaactcagttatctgaacgccattgaggagtcggtgcgccaactgtcagatgtagaaagagttagaggcatttcacttgctcagcaggagagtgtgtctctagctcagataataaaggcacaacagcaacgccatgaaagagacttggccctcttgaaactaaaggctgaacaagaggctctggagagtcagagacaattagaagaaacccgaaacaaagcagctcaggtccatgcagaatcattacagcaggtggttcaatcacaacgggaagtaactgaagtcctgcaggaagcaacgtgtaaaatagcagctcagcagtcagaaactgctcgcctcaccacagacgcagcacgtcaaatctgtgagatggcagagttgactagaactcatatctcagatgctgtcgtggcttcaggagctccccttgcaatactgtatgaccaccaacggcagcaccttccagactttgtgaaacagctgaggaccagaactgaaacagataggaaaagtccatctgtttcactctctcagagtaaagaagggacccttgactcaaagcatcagaagtattctgcttcatatgatagttattctgagtcttcaggatacaagaatcatgatagaagaagtagcagtggtagcagccgccaagaaagtccttcagttccatcttgtaaggaaaatgagaagaaacttaatggtgaaaagatagagagttccattgatgaacaggttcagactgctgcagatgattctctacgaagtgatagtgttccatctcttcctgatgaaaaagactcaacgtctattgcaacagaatattctctgaaatttgatgaatccatgacagaagatgaaatagaagaacaatcatttcgatcattactaccttcagagagtcaccgcagatttaacatggaaaagagaagaggtcatcatgatgactctgatgaagaagcttctccagaaaaaactacactgtctactgccaaggaactgaacatgccattctcaggaggacaagatagcttttctaaatttactatggagatggttcgacagtatatgaaagaggaagaaatgagggcagctcaccagtcttcactcctgcgtctccgtgaaaaggccttgaaggagaagactaaggctgaattggcctggttagagcatcaaaaaaaacatctacgagacaaaggagaggatgataaaatgcccccgctccggaagaaacagcgtggtttgcttttaaggttgcagcaagaaaaggcagaaataaaacgtcttcaagaagccaataaggcagctcggaaggaaagacagctgattcttaaacagcaggaggagatagaaaagatccgacagaccaccataaaactacaggagaaattgaagtctgcaggggagagtaaattggactctcatagtgatgatgatacaaaggataataaggcaaccagtcctggtccaactgacttggagacccgcagtccttctcccatttcaatctccagcagtgaaactagcagcattatgcagaaactgaagaaaatgagaagccgcatggatgaaaagtttctgacaaagcgggagcaaaaattaatgcaacggcgacaacatgcagaggagctcctagagtggaagcgacgtttagatgcagaagaagcagaaattcgtcaaatggaaaaacaagctttggctgcctgggacaaagaattaataaaacccaaaactcctaagaaagaactggaggaccagagaacagaacagaaagaaatagcaagtgaagaggaatctccagtacctctgtactctcatctaaacagtgaaagctccattccagaagaattaggcagccctgctgttgaatatgtaccatccgagtctataggacaggagcagccagggagtccagatcacagtatacttactgaagaaatgatttgttcacaggaactagaatcttctacctctcctagtaaacattcacttcccaaaagctgcacatctgtgtcaaagcaggagtctagcaaaggaagtcataggactggaggacaatgtcacctgcctatcaagtcccatcagcactgttatagttggtcagatgagtcattatctatgacacagtcagaaactacatctgaccagagtgatattgaaggtaggatcagagctctgaaggatgagttgcggaaaagaaaatcagttgtgaaccagctgaagaaggaacagaaaaaaaggcaaaaggaaagactgaaagcccaagaagccagtctgatcaagcagttagagtcatatgatgaatttattaagaaaactgaagccgagcttagccaagatttggaaacatcaccaacagccaagcctcagattaaaacgctctcctcagcttctgaaaaacccaagatcaaacccctcacaccactacacagatctgaaacggcaaagaattggaaatcactaacagagtcagaacgttccagaggatccctggagcctattgctgaacatgttgatgcttcactgtctggttctgagagatcagtatcagaaaggtctttatctgcatatgcaaagagagtaaatgaatgggacagtcgaacagaagattttcagaccccatctccagttctcagatcatcaaggaaaatcagagaagaatctggagattctctagaaaatgtacctgcattacatcttctcaaagaattaaatgccactagtagaattcttgatatgtcagatggcaaggttggagaatctagtaaaaaatcagaaataaaagaaatagagtatacaaaattgaagaagagtaagattgaagatgccttttctaaagaaggtaaatctgatgtcttactgaaattagtcctagaacagggagattcatctgaaattctttcaaagaaagatcttcctttagattctgaaaatgttcagaaagacctagttggattagctattgaaaatctccataaaagtgaggaaatgttgaaagagagacagtcagatcaagatatgaatcatagtccaaacatccaatcaggaaaagacattcacgaacaaaagaacacaaaggaaaaagatttgtcttggtcagaacatctttttgctcctaaagagataccatactctgaagattttgaagtgtcttctttcaagaaagaaatttcagctgaattgtacaaagatgattttgaggtgtcatctttgctgtcactcaggaaagactctcagtcttgcagagataagccacagccaatgaggagctctacaagtggagccactagctttggtagtaatgaggaaatcagtgagtgcctaagtgagaaaagcctttctatccatagcaatgttcattctgacaggctgttggaactcaagtcccctactgagctgatgaaaagtaaggagcgcagtgatgtggagcatgaacagcaagttactgaatccccttccttggcttcagttcctactgcagacgagttatttgatttccacattggtgatagggtgttgattggaaatgttcagccaggaattcttcgattcaaaggtgagactagttttgctaaaggattttgggccggagtggagttagataaacctgaaggaaataacaatggaacatatgatggtattgcatattttgagtgcaaagaaaagcatggtatttttgctcctcctcaaaaaatatctcacattccagaaaactttgatgactatgtagacattaatgaagatgaagactgttactcagatgaacgatatcagtgctataatcaagagcaaaatgatacagagggtccaaaagacagagaaaaggatgtcagtgaatatttttatgagaaatccctacctagtgtgaatgatatagaagcctcagttaatagaagtagaagccttaaaatagaaacagacaatgtacaggacatttctggggtacttgaagcccatgttcaccagcagtcttcagtggattcacagatttcttcaaaggaaaacaaagacctcatttctgatgccacagaaaaggtttccatcgctgcagaagatgacactttagacaataccttttccgaagaattggagaagcaacagcagtttacagaagaggaagacaacctatatgctgaagcttcagaaaagctttgtacaccacttctggatcttttaacaagagaaaaaaaccaactggaagcccagctgaagtcatcactaaatgaggaaaaaaagtcaaaacaacaactggaaaaaatcagcttactgacagacagtttactaaaagtctttgtaaaggacacagtcaatcaactacaacaaatcaaaaaaaccagggatgagaaaatccagcttagcaatcaggagcttcttggtgatgaccaaaagaaagtaacaccccaagacctatcccaaaatgttgaggaacagtcgccaagtatttcaggttgcttcttaagttctgaattggaagatgaaaaagaagagatttcctctccagatatgtgtcccagaccggagagcccagtatttggtgccagtgggcaggaagaacttgctaagagacttgctgaacttgaactcagccgggagttcctgagcgcgttaggagatgatcaagactggtttgatgaagactttggtttgagctcttctcacaagatccaaaaaaataaggcagaagaaaccattgtacctctaatggcagaacctaaaagagtaacccaacaaccatgtgaaacattattggcagtcccccatactgcagaagaagtagagattcttgtacataatgcagcagaagaactttggaaatggaaagaattaggccacgatcttcatagcatcagtattcctacaaaactgcttggctgtgccagtaaaggtctagatatagaaagcactagtaaaagggtctacaaacaggcggtttttgatttaacaaaagagatttttgaggaaatatttgctgaggatcccaacttaaatcaacctgtctggatgaagccatgtagaatcaactctagttatttccgacgagtgaaaaatccaaataaccttgatgaaatcaagagcttcatagcaagtgaagtactcaagttgttcagtcttaaaaaggagccaaaccacaaaacagattggcagaaaatgatgaaatttggaagaaagaaaagagaccgagtggatcatatcctggttcaggagctccatgaggaggaggcacagtgggtgaactatgatgaggatgagttgtgtgtgaaaatgcagctagccgacgggatctttgagaccctgatcaaagatactattgatgttctgaatcagatcagtgaaaagcaggggagaatgctactagtgtgacatcttgcaaataaatcgaacgctgagtgctaatgtgagtcctgggcctttctgcctcctgatgtacacccatcgccatcatagcaagagtgcttctggaccttgtacttattcttaaagactaccagtatggagttcataggacaatgtggtacacctggtattacagcctttgcctttcgagactatccactggattaatgggttattttcagtgggcagggttgcacagtgtaatcctacaccttttgctaacacccctactaggtcccagagggccagaaacacctgacttacctctgagtttagactagggtatcacttctttgagtctgaagtcaagtgagagaggtatagataaatgcatcacatcacttttgaaatgtaattctggtctataccatggaagtcataaatggacattatagtctctaaacagtattaaacccttaaccacttctaaaataggcaagctcaataatgtctgccaacttcacattctggagtttatttcatttctttttgaagaccattttcttccattattgtagttgagcagcaccaagtggactgtcaggctaacaggaataagtggtagccttgctttctgagcaccatctaaagaattttaaacctctgcattatgtttagtgttctctgtgtgggcatgaaaacaaagaaatgcccctactgaagactgggctcaaaggaccaatgcagggctggttcttttaccccttggtttactcctgcacttgtcttactcattctgaatctctaccagctgctcccagaatcacagatactcaggaccatctcaggcatccaggcatggcaaagtggaaataattcattttggcctgcaaaccttcaactcccatctttccccaagaagtcagagatgctgttacttgaatgatttaggaaatgagtgtgtgcaccaaagacaaaaagatattgtctattgtttgtgtgcttgttttgcgctatggaacattttttaatttattttaagataaattattaagttgaaaatgtgtgtccctattcagaagtgaaagattcatcttgtaatagttaaacctccatcttgaagcttctatggttcatagtctttgcacaggaacctgtggttttaacaaaccaatacacatattgaagaagtcattttaattcagtgaaacgaagatgggcttttccagatcacctgcaatagcagcagtgggataaaatgatttaaaaacactgtacaatttaactctgcctctcttgcagcattgcttctcacaactattacctgcatctgaaaaaaaatctatagactccagctgctacattagagcataagagatgctctcctgggacctcagtaccctgccttcttgactggtttccgttcatcagtcctgtccctcttcaagtaatctagaagaatgtggatactcttaggcgtgaatgtaaatgccttaatattgaaggtcctggttagaagcatgatacaagacatctactggattcatatttacaaatatcctggaatgttatagcttcaaagtatattagaaaaaccccaaagatggtataatctttaagtgtgcacgttcgtttatttctgcatcttccctccaaacttgcctttgcatcttaaatatttcactatgcacactcccattcctcttgggtttcatcttgtcgtttaagaaatgtactgaaataatcattggaatatttgcattttgcacaatgactggtatgatagctcttgacaaataaggaaagcactgaaatgttgtgattgggtctcgggaaatgctcagattgatgtcttaccagcatttcttctgggcttgtgatgttgagctgtagtcttgtagccataatgagcaaattgactaagagaagcaaaggtttcttggggttattaaccagtagtgtggaaatactagttttatgtggccaaggaaaagcaaagccttttcttttcagtttgtgttatttggaagacagaaaaacatcttgtctacatcctttggctgtttgtaggatcacgttgtccttacgatactgaaactttacagctgctgtaaattttttataaatgaatttcaaaatgttataatgggactgtaggttgtttttctacatcttcattatttggacctaaaaccagtttttaataagaaagtttatctttactctttctgaaattatgactccag

SEQ ID NO: 1120 - protein, 2000 aa, Homo sapien
MRSSKSKEVPLPNPRNSQSKDTVQADITTSWDALSQTKAALRHIENKLEVAPTSTAVCDSVMDTKKSSTSATRKISRKDGRYLDDSWVNAPISKSTKSRKEKSRSPLRATTLEGNVKKNNRVEFREPLVSYREIHGAPSNFSSSHLESKHVYCVDVNEEKTESGNWMIGSREERNIRSCDFESSQSSVINDTVVRFLNDRPAIDALQNSECLIRMGASMRTEEEMPNRTKGSENNLKLSVNNMAHDTDPKALRLTDSSPSSTSTSNSQRLDILKRRQHDVKLEKLKERIRKQWEHSEETNGRGQKLGHIDHPVMVVNVDNSVTAKVRKVATAPPAPAYKGFNPSETKIRTPDGKVWQEAEFQNMSRELYRDLALHFADDISIKEKPAEKSKEKKVVKPVRKVQKVAQLSSTECRTGSSHLISTSSWRDGQKLVKKILGPAPRMEPKEQRTASSDRGGRRRTAKSGGHIGRAESDPRLDVLHRHLQRNSERSRSKSRSENNIKKLASSLPDNKQEENTALNKDFLPIEIRGILDDLQLDSTAHTAKQDTVELQNQKSSAPVHAPRSHSPVKRKPDKITANEDPPVISKRRHYDTDEVRQYIVRQQEERKRKQNEEKKAQKEATEQKNKRLQELYRKQKEAFTKVKNVPPSEPSATRRLQETYSKLLLEKTLLEEPSHQHVTQETQAKPGYQPSGESDKENKVQERPPSASSSSDMSLSEPPQPLARKDLMESTWMQPERLSPQVHHSQPQPFAGTAGSLLSHLLSLEHVGILHKDFESILPTRKNHNMASRPLTFTPQPYVTSPAAYTDALLKPSASQYKSKLDRIEALKATAASLSSRIESEAKKLAGASINYGSAWNTEYDVQQAPQEDGPWTKAVTPPVKDDNEDVFSARIQKMLGSCVSHATFDDDLPGVGNLSEFKKLPEMIRPQSAISSFRVRSPGPKPQGLLAQLCKRQTDSSSSDMQACSQDKAKISLGSSIDSVSEGPLLSEGSLSEEEGDQDGQPLLKVAEILKEKEFCPGERNSYEPIKEFQKEAEKFLPLFGHIGGTQSKGPWEELAKGSPHSVINIFTKSYQLYGKGFEDKLDRGTSTSRPLNATATPLSGVSYEDDFVSSPGTGTSTEKKSTLEPHSTLSPQEDHSNRKSAYDPSSVDVTSQHSSGAQSAASSRSSTSSKGKKGKKEKTEWLDSFTGNVQNSLLDEEKAERGSHQGKKSGTSSKLSVKDFEQTLDTDSTLEDLSGHSVSVSSDKGRSQKTPTSPLSPSSQKSLQFDVAGTSSERSKSSVMPPTITGFKPNAPLTDLNPAASRTTTENMAPIPGSKRFSPAGLHHRMAAELSYLNAIEESVRQLSDVERVRGISLAQQESVSLAQIIKAQQQRHERDLALLKLKAEQEALESQRQLEETRNKAAQVHAESLQQVVQSQREVTEVLQEATCKIAAQQSETARLTTDAARQICEMAELTRTHISDAVVASGAPLAILYDHQRQHLPDFVKQLRTRTETDRKSPSVSLSQSKEGTLDSKHQKYSASYDSYSESSGYKNHDRRSSSGSSRQESPSVPSCKENEKKLNGEKIESSIDEQVQTAADDSLRSDSVPSLPDEKDSTSIATEYSLKFDESMTEDEIEEQSFRSLLPSESHRRFNMEKRRGHHDDSDEEASPEKTTLSTAKELNMPFSGGQDSFSKFTMEMVRQYMKEEEMRAAHQSSLLRLREKALKEKTKAELAWLEHQKKHLRDKGEDDKMPPLRKKQRGLLLRLQQEKAEIKRLQEANKAARKERQLILKQQEEIEKIRQTTIKLQEKLKSAGESKLDSHSDDDTKDNKATSPGPTDLETRSPSPISISSSETSSIMQKLKKMRSRMDEKFLTKREQKLMQRRQHAEELLEWKRRLDAEEAEIRQMEKQALAAWDKELIKPKTPKKELEDQRTEQKEIASEEESPVPLYSHLNSESSIPEELGSPAVEYVPSESIGQEQPGSPDHSILTEEMICSQELESSTSPSKHSLPKSCT

SEQ ID NO: 1121 - DNA, 3576 bp, Homo sapien
ggatcgcgctgatgtggccccaaccccgcctccctccccgccccgcgatgtcggaagaaacccgacagagcaaattggccgcagcgaagaaaaagttgagagaatatcagcagaggaatagccctggtgttcctacaggagcgaaaaagaagaagaaaataaaaaatggcagtaaccctgagacaaccacttctggtggttgccactcacctgaggatacacccaaggacaatgctgctactctacaaccatctgatgacaccgtgttacctggcggtgtcccttcccctggtgccagtctcactagcatggcggcatctcagaatcatgatgctgacaatgtccctaatctcatggatgaaaccaagactttctcatcaaccgagagcctgcgacaactctcccaacagctcaatggtcttgtttgtgagtctgcgacatgtgtcaatggggagggccctgcatcgtctgctaacctgaaggatctggagagccggtaccaacagctagcggtagccctggactccagctatgtaacaaacaaacaactcaatatcacgatagagaaattgaaacaacagaaccaagaaattacggatcagttggaagaagaaaagaaagaatgccaccaaaagcagggagccctaagggagcagttacaggttcacattcagaccatagggatcctcgtatcagagaaagctgagttacagacagccctggctcacactcagcatgctgccaggcagaaagaaggagagtctgaagatctggccagccgcctgcagtattcccggcggcgtgtgggagagttggagcgggctctctctgctgtctccacgcagcagaagaaggcagacaggtacaacaaggagttaaccaaagagagagacgccctcaggctggagttatacaagaacacccaaagcaatgaggacctgaagcaagagaaatcagaattggaagagaagcttcgggtcctagtgactgagaaggctggcatgcagcttaacttggaagaattgcaaaagaagttagagatgacggaactcctgcttcaacagttttcaagccggtgtgaagcccctgatgctaaccagcagttacagcaggccatggaggagcgggcacagctggaagcacacctggggcaggtaatggagtcggttagacaactacaaatggagagagataaatatgcggagaatctcaaaggagagagcgccatgtggcggcagaggatgcagcagatgtcagagcaggtgcacacattgagagaggagaaggaatgtagcatgagtcgggtacaggagctggagacgagcttggctgaactgaggaaccagatggctgaacccccgcccccagagcccccagcagggccctccgaggtggagcagcagctacaagcggaggctgagcacctgcggaaggagctggagggtctggcaggacagcttcaagcccaggtgcaagacaatgagggcttgagtcgcctgaaccgggagcaggaggagaggctgctggagctggagcgggcggccgagctctggggggagcaggcggaggcgcgcaggcaaatcctggagaccatgcagaacgaccgcactaccatcagccgcgcactctcccagaaccgggagctcaaggagcagctggctgagctgcagagcggatttgtaaagctgactaatgagaacatggagatcaccagcgcactgcagtcggagcagcacgtcaagagggagctgggaaagaagctgggcgagctgcaggagaagctgagcgagctgaaggaaacggtggagctgaagagccaagaggctcaaagtctgcagcagcagcgagaccagtacctgggacacctgcagcagtatgtggccgcctatcagcagctgacctctgagaaggaggtgctgcataatcagctactgctgcagacccagctcgtggaccagctgcagcagcaggaagctcagggcaaagcggtggccgagatggcccgccaagagttgcaggaaacccaggagcgcctggaagctgccacccagcagaatcagcagctacgggcccagttgagcctcatggctcaccctggggaaggagatggactggaccgggaggaggaggaggatgaggaggaggaggaggaggaggcggtggcagtacctcagcccatgccaagcatcccggaggacctggagagccgggaagccatggtggcatttttcaactcagctgtagccagtgccgaggaggagcaggcaaggctacgtgggcagctgaaggagcaaagggtgcgctgccggcgcctggctcacctgctggcctcggcccagaaggagcctgaggcagcagccccagccccagggaccgggggtgattctgtgtgtggggagacccaccgggccctgcagggggccatggagaagctgcagagccgctttatggagctcatgcaggagaaggcagacctgaaggagagggtagaggaactggaacatcgctgcatccagctttctggagagacagacaccattggagagtacattgcactgtaccagagccagagggcagtgctgaaggagcggcaccgggagaaggaggagtacatcagcaggctggcccaagacaaggaggagatgaaggtgaagctgctggagctgcaggagctggtcttacggcttgtgggcgaccgcaacgagtggcatggcagattcctggcagctgcccagaaccctgctgatgagcccacttcaggggccccagccccccaggaacttggggctgccaaccagcagggtgatctttgcgaggtgagcctcgccggcagtgtggagcctgcccaaggagaggccagggagggttctccccgtgacaaccccactgcacagcagatcatgcagctgcttcgtgagatgcagaacccccgggagcgcccaggcttgggcagcaacccctgcattccttttttttaccgggctgacgagaatgatgaggtgaagatcactgtcatctaaaagccggctactgtcagcaaagcctgaagaagtggggctggataccctgcccccaccatatccctaccatcccttctcagtcaaccctttacccttacagtagcaagcatagacccctgtctaacgggggtagacaggtgcagatgaggtgaagatcactgtcatctaaaagctggccactaaattaaaaaaaaattaaaagttatgggattaaaaaaagttatgggataaaaaaggttatgggtaacttatggtataaaagttatgaaaaaaggccaggtgcagtggctcacgcctgtaatcccagcacttttgggaggctgaggttgggagttcaagaccagcctggtcaacatggtgaaactgtgtctctactaaaaatacaaaaattagccaggcatggtggcacgtgcctgtaatcccagctactcgggaggctgaggcaggagaatcgcttgaacctgggaggtggaggttgcagtgggctgagatcacgccattgcactccagcctgggcgacagagtgagactctgtctcaaaaaaaaaaaaaaaaaa

SEQ ID NO: 1122 - protein, 990 aa, Homo sapien
MSEETRQSKLAAAKKKLREYQQRNSPGVPTGAKKKKKIKNGSNPETTTSGGCHSPEDTPKDNAATLQPSDDTVLPGGVPSPGASLTSMAASQNHDADNVPNLMDETKTFSSTESLRQLSQQLNGLVCESATCVNGEGPASSANLKDLESRYQQLAVALDSSYVTNKQLNITIEKLKQQNQEITDQLEEEKKECHQKQGALREQLQVHIQTIGILVSEKAELQTALAHTQHAARQKEGESEDLASRLQYSRRRVGELERALSAVSTQQKKADRYNKELTKERDALRLELYKNTQSNEDLKQEKSELEEKLRVLVTEKAGMQLNLEELQKKLEMTELLLQQFSSRCEAPDANQQLQQAMEERAQLEAHLGQVMESVRQLQMERDKYAENLKGESAMWRQRMQQMSEQVHTLREEKECSMSRVQELETSLAELRNQMAEPPPPEPPAGPSEVEQQLQAEAEHLRKELEGLAGQLQAQVQDNEGLSRLNREQEERLLELERAAELWGEQAEARRQILETMQNDRTTISRALSQNRELKEQLAELQSGFVKLTNENMEITSALQSEQHVKRELGKKLGELQEKLSELKETVELKSQEAQSLQQQRDQYLGHLQQYVAAYQQLTSEKEVLHNQLLLQTQLVDQLQQQEAQGKAVAEMARQELQETQERLEAATQQNQQLRAQLSLMAHPGEGDGLDREEEEDEEEEEEEAVAVPQPMPSIPEDLESREAMVAFFNSAVASAEEEQARLRGQLKEQRVRCRRLAHLLASAQKEPEAAAPAPGTGGDSVCGETHRALQGAMEKLQSRFMELMQEKADLKERVEELEHRCIQLSGETDTIGEYIALYQSQRAVLKERHREKEEYISRLAQDKEEMKVKLLELQELVLRLVGDRNEWHGRFLAAAQNPADEPTSGAPAPQELGAANQQGDLCEVSLAGSVEPAQGEAREGSPRDNPTAQQIMQLLREMQNPRERPGLGSNPCIPFFYRADENDEVKITVI

SEQ ID NO: 1123 - DNA, 1925 bp, Homo sapien
ctgacacgctcctgggtcgtaggcacaggagtgggggccaaagcatggagaatcaagagaaggcgagtatcgcgggccacatgttcgacgtagtcgtgatcggaggtggcatttcaggactatctgctgccaaactcttgactgaatatggcgttagtgttttggttttagaagctcgggacagggttggaggaagaacatatactataaggaatgagcatgttgattacgtagatgttggtggagcttatgtgggaccaacccaaaacagaatcttacgcttgtctaaggagctgggcatagagacttacaaagtgaatgtcagtgagcgtctcgttcaatatgtcaaggggaaaacatatccatttcggggcgcctttccaccagtatggaatcccattgcatatttggattacaataatctgtggaggacaatagataacatggggaaggagattccaactgatgcaccctgggaggctcaacatgctgacaaatgggacaaaatgaccatgaaagagctcattgacaaaatctgctggacaaagactgctaggcggtttgcttatctttttgtgaatatcaatgtgacctctgagcctcacgaagtgtctgccctgtggttcttgtggtatgtgaagcagtgcgggggcaccactcggatattctctgtcaccaatggtggccaggaacggaagtttgtaggtggatctggtcaagtgagcgaacggataatggacctcctcggagaccaagtgaagctgaaccatcctgtcactcacgttgaccagtcaagtgacaacatcatcatagagacgctgaaccatgaacattatgagtgcaaatacgtaattaatgcgatccctccgaccttgactgccaagattcacttcagaccagagcttccagcagagagaaaccagttaattcagcgtcttccaatgggagctgtcattaagtgcatgatgtattacaaggaggccttctggaagaagaaggattactgtggctgcatgatcattgaagatgaagatgctccaatttcaataaccttggatgacaccaagccagatgggtcactgcctgccatcatgggcttcattcttgcccggaaagctgatcgacttgctaagctacataaggaaataaggaagaagaaaatctgtgagctctatgccaaagtgctgggatcccaagaagctttacatccagtgcattatgaagagaagaactggtgtgaggagcagtactctgggggctgctacacggcctacttccctcctgggatcatgactcaatatggaagggtgattcgtcaacccgtgggcaggattttctttgcgggcacagagactgccacaaagtggagcggctacatggaaggggcagttgaggctggagaacgagcagctagggaggtcttaaatggtctcgggaaggtgaccgagaaagacatctgggtacaagaacctgaatcaaaggacgttccagcggtagaaatcacccacaccttctgggaaaggaacctgccctctgtttctggcctgctgaagatcattggattttccacatcagtaactgccctggggtttgtgctgtacaaatacaagctcctgccacggtcttgaagttctgttcttatgctctctgctcactggttttcaataccaccaagaggaaaatattgacaagtttaaaggctgtgtcattgggccatgtttaagtgtactggatttaactacctttggcttaattccaatcattgttaaagtaaaaacaattcaaagaatcacctaattaatttcagtaagatcaagctccatcttatttgtcagtgtagatcaactcatgttaattgatagaataaagccttgtgatcactttctgaaattcacaaagttaaacgtgatgtgctcatcagaaac

SEQ ID NO: 1124 - protein, 527 aa, Homo sapien
MENQEKASIAGHMFDVVVIGGGISGLSAAKLLTEYGVSVLVLEARDRVGGRTYTIRNEHVDYVDVGGAYVGPTQNRILRLSKELGIETYKVNVSERLVQYVKGKTYPFRGAFPPVWNPIAYLDYNNLWRTIDNMGKEIPTDAPWEAQHADKWDKMTMKELIDKICWTKTARRFAYLFVNINVTSEPHEVSALWFLWYVKQCGGTTRIFSVTNGGQERKFVGGSGQVSERIMDLLGDQVKLNHPVTHVDQSSDNIIIETLNHEHYECKYVINAIPPTLTAKIHFRPELPAERNQLIQRLPMGAVIKCMMYYKEAFWKKKDYCGCMIIEDEDAPISITLDDTKPDGSLPAIMGFILARKADRLAKLHKEIRKKKICELYAKVLGSQEALHPVHYEEKNWCEEQYSGGCYTAYFPPGIMTQYGRVIRQPVGRIFFAGTETATKWSGYMEGAVEAGERAAREVLNGLGKVTEKDIWVQEPESKDVPAVEITHTFWERNLPSVSGLLKIIGFSTSVTALGFVLYKYKLLPRS

SEQ ID NO: 1125 - DNA, 1925 bp, Homo sapien; identical to SEQ ID NO: 1123

SEQ ID NO: 1126 - protein, 527 aa, Homo sapien; identical to SEQ ID NO: 1124

SEQ ID NO: 1127 - DNA, 2240 bp, Homo sapien
gtccttcggtgtctgggtgtggtgagtagaggtgtgtgtcacaaagtacagaccattgtgtgtgacaaagcccatcgtgtgtctgtgtgtgtctttatccacgtggatggacgtctctttcttgctctgccccaagacacaccctagcccctccttattctcaaaagggggagctggggagcctccccctaccctggggcctcccctgcccctccccgccctgcctggccgtcaccactccccagagggcacagggctctgctgtgcctcagagcaaaagtcccagagccagcagagcaggctgacgacctgcaagccacagtggctgccctgtgcgtgctgcgaggtgggggaccctgggcaggaagctggctgagccccaagaccccgggggccatgggcggggatctggtgcttggcctgggggccttgagacgccgaaagcgcttgctggagcaggagaagtctctggccggctgggcactggtgctggcaggaactggcattggactcatggtgctgcatgcagagatgctgtggttcggggggtgctcgtgggcgctctacctgttcctggttaaatgcacgatcagcatttccaccttcttactcctctgcctcatcgtggcctttcatgccaaagaggtccagctgttcatgaccgacaacgggctgcgggactggcgcgtggcgctgaccgggcggcaggcggcgcagatcgtgctggagctggtggtgtgtgggctgcacccggcgcccgtgcggggcccgccgtgcgtgcaggatttaggggcgccgctgacctccccgcagccctggccgggattcctgggccaaggggaagcgctgctgtccctggccatgctgctgcgtctctacctggtgccccgcgccgtgctcctgcgcagcggcgtcctgctcaacgcttcctaccgcagcatcggcgctctcaatcaagtccgcttccgccactggttcgtggccaagctttacatgaacacgcaccctggccgcctgctgctcggcctcacgcttggcctctggctgaccaccgcctgggtgctgtccgtggccgagaggcaggctgttaatgccactgggcacctttcagacacactttggctgatccccatcacattcctgaccatcggctatggtgacgtggtgccgggcaccatgtggggcaagatcgtctgcctgtgcactggagtcatgggtgtctgctgcacagccctgctggtggccgtggtggcccggaagctggagtttaacaaggcagagaagcacgtgcacaacttcatgatggatatccagtataccaaagagatgaaggagtccgctgcccgagtgctacaagaagcctggatgttctacaaacatactcgcaggaaggagtctcatgctgcccgcaggcatcagcgcaagctgctggccgccatcaacgcgttccgccaggtgcggctgaaacaccggaagctccgggaacaagtgaactccatggtggacatctccaagatgcacatgatcctgtatgacctgcagcagaatctgagcagctcacaccgggccctggagaaacagattgacacgctggcggggaagctggatgccctgactgagctgcttagcactgccctggggccgaggcagcttccagaacccagccagcagtccaagtagctggacccacgaggaggaaccaggctactttccccagtactgaggtggtggacatcgtctctgccactcctgacccagccctgaacaaagcacctcaagtgcaaggaccaaagggggccctggcttggagtgggttggcttgctgatggctgctggaggggacgctggctaaagtgggtaggccttggcccacctgaggccccaggtgggaacatggtcacccccactctgcataccctcatcaaaaacactctcactatgctgctatggacgacctccagctctcagttacaagtgcaggcgactggaggcaggactcctgggtccctgggaaagagggtactaggggcccggatccaggattctgggaggcttcagttaccgctggccgagctgaagaactgggtatgaggctggggcggggctggaggtggcgccccctggtgggacaacaaagaggacaccatttttccagagctgcagagagcacctggtggggaggaagaagtgtaactcaccagcctctgctcttatctttgtaataaatgttaaagccagaa

SEQ ID NO: 1128 - protein, 427 aa, Homo sapien
MGGDLVLGLGALRRRKRLLEQEKSLAGWALVLAGTGIGLMVLHAEMLWFGGCSWALYLFLVKCTISISTFLLLCLIVAFHAKEVQLFMTDNGLRDWRVALTGRQAAQIVLELVVCGLHPAPVRGPPCVQDLGAPLTSPQPWPGFLGQGEALLSLAMLLRLYLVPRAVLLRSGVLLNASYRSIGALNQVRFRHWFVAKLYMNTHPGRLLLGLTLGLWLTTAWVLSVAERQAVNATGHLSDTLWLIPITFLTIGYGDVVPGTMWGKIVCLCTGVMGVCCTALLVAVVARKLEFNKAEKHVHNFMMDIQYTKEMKESAARVLQEAWMFYKHTRRKESHAARRHQRKLLAAINAFRQVRLKHRKLREQVNSMVDISKMHMILYDLQQNLSSSHRALEKQIDTLAGKLDALTELLSTALGPRQLPEPSQQSK

SEQ ID NO: 1129 - DNA, 1505 bp, Homo sapien
ccacgtggtggctttctcacgctagccctctttggtcctccttgacgtcccgggcctgtgggcccgctttctgccgagatgccgaaggtcaagtcgggggccatcggccgccgccgcgggcggcaggagcagcgccgggagctgaagagcgctggaggactcatgttcaacacggggattgggcagcacattttgaaaaatcctctcattattaacagcattatcgataaggctgccttaagaccaactgatgtagtgctggaagttggacctggaactggcaacatgactgtaaagttgttagaaaaggcaaaaaaggttgttgcttgtgaacttgacccaaggctagtagctgaacttcacaaaagagttcagggcacgcctgtggccagcaaacttcaagtactggtgggtgatgtgctgaaaacagatttgccattctttgatacttgtgtggcaaatttgccttatcagatctcttcgccttttgtcttcaagctgttgctacatcgaccttttttcaggtgtgctatacttatgtttcaaagagaatttgccctccgactggttgcaaaacctggagataagttatactgcagactctcaattaatacacagctgttggcacgtgtggaccatctaatgaaagtgggaaagaataacttcagaccaccgcccaaggtggaatccagtgttgtaaggatagaacctaagaatccaccaccacccatcaattttcaggaatgggatggtctagtaaggataacctttgttaggaaaaacaagacactctctgctgcatttaaatcaagtgcagtgcaacaactcttggaaaaaaactacagaattcactgttcagtccataatattataataccagaagatttcagcatagcagataaaatacagcaaatcctaaccagcacaggttttagtgacaaacgggcccgttccatggacatagatgacttcatcagattgctacatggattcaacgcagaaggtattcatttttcctaggtatttggaaaacagaaattttcaaggtcaagaaaagaaatgaattttgtattttttgtatttgagaagataatgcttttgctttactgagacattatttacttgactatttttggttcaatactactactgttgtcaccatttatgattctgaattttaaagttggaaagttctaagtatcaaagtttttaatatataatgctggtccaatctattcataataatcttcaagttcaggagccgcagagacgcacaactttacacttatcatttctaacagtttattgtataaagatgttactcttctatttactgttatatactgtaaggccttctttaggcctttagctctgttcctccagtaataaaaaagttaaaatatgcttcactagtcacacattccccataccatttcgtgttattcacattccccgtaccatttcttgttattcacatgtacagtaaaacaattgtttcttaaatt

SEQ ID NO: 1130 - protein, 313 aa, Homo sapien
MPKVKSGAIGRRRGRQEQRRELKSAGGLMFNTGIGQHILKNPLIINSIIDKAALRPTDVVLEVGPGTGNMTVKLLEKAKKVVACELDPRLVAELHKRVQGTPVASKLQVLVGDVLKTDLPFFDTCVANLPYQISSPFVFKLLLHRPFFRCAILMFQREFALRLVAKPGDKLYCRLSINTQLLARVDHLMKVGKNNFRPPPKVESSVVRIEPKNPPPPINFQEWDGLVRITFVRKNKTLSAAFKSSAVQQLLEKNYRIHCSVHNIIIPEDFSIADKIQQILTSTGFSDKRARSMDIDDFIRLLHGFNAEGIHFS

SEQ ID NO: 1131 - DNA, 3674 bp, Homo sapien
cagtagctaaggaaaccaggtgtgggcggctgggccttgcagctaacccttaaccctctggcaacccgcagatagccccaactggccccaacagttccctggggtcccttttggatggggccaaggtggagctgctagaaagattcctttggggagatggtcagaaatacttcagttatttattattttgttatttttattttttgctgttgcctcctggaaacggacttgaagtttcttcccctatattctttccctcagctcttgggggccagaaatcccaaagggagtccgctgccccggccctccagggccgcctcctctgtttgctttgcagaggagggaactgctccttcgactctgcagctcaggcctgtccccgacacagcccccagggagtcttctagctacccctggcctctaggccgcctgacgctcagtgccttcctccgttccggggcctggtacccgtgccgggcagccttacaccagccatgcccgcggcaccacatgtgtcttctcactcgcgaggtcttgtgcccagcgcccccgggaaggcgggggcgctcaccccacagcccaggccccggggttctgccccacagtcctgcgtgggccacgtaggaagcagcgtgggggctgtgtctgctgggaggtggcttggatggggaggacagcccggcaccctgacccccgcccctccccagccctgcagtcccccactgggccggggagtctctccagcttctctctctctggttattcaggagacacattttcggccttaaaactggcatggagcgcaggccctcccttgcagaaaattatcaaggaagagggagttggcagagtttctctgccccggggctggggacgcggagctccggggaaattgttaaatcagtgttctggcgccccctgttgggggaactctggaattacaggagtgggccttgggggggactgagctccatccctctcccccgccccacccccacccaaagttgcccaccctgtttttccgttgcatcgctggtcttgtgcttcccgcttcagtctgggagccaagagccagccccacctcccttcagaggacgcagtgacttttggactttccagaggtggttctgtgtttctgcccttggctcctctccgtcttgggctggggcacttggagccctctccatgtggcgcccagtgttggggggaggcaggctccagtggaggctgagtgaggcctggtcccttccccgtgccctcctcggagctgccacagaggctaagacggctgtcctgctggtgctggccctgctggatgtggtattgaagtctggggcagctgatagcaggaaggagacccccttggatgctggtctcctgggacctgaacagtctgtcagcaatggctggaaatccttcttcctctggccaccccgggggtgccgggcaacccccttagctctaagatgtggccacaaatctcttcccactcctccccgccaacctgaacagaaagttttgaccttgcaacctgtaagaaagaatccgtccgcatgactgtttacaagcgatagaaacacgtaagactctgtccccttgagctcccacccccgggccggggatgccccacctggggtgactgcactgtagctgcaaggcgtgttcttgcacgaagtgtgatcttatggccctgcgagaggtgctcatcatcatgcccattttctgctgtttctgatgggtcagctacctcacggcggggccagctctgctgtcctggcaagtgtcattgactctctaaacttgaagtccttcaggagccctgagcccaacatccatgagacaccccgagttgtgcttcatgagagttggattctctgcccactctttcagggatgtccaaggtccatgttagggggcaggcccccagctccactcactgcacaagcaccctaaatgttggaagcacaaaatggttgtgatttgagcacaatggcagggtcctgcaggcagacttgacaggcccaggcccgggaggatccccccacgttggctctgtccaaagtgagattgggggtgcctgtgtctgggacagggggctgcccttgctcagaccaggccttggctcatggcttgtcctaattctgggactcgtcatcttacttcttgcccttctgtgcccatcttaagactggaggctgagccttgtcaggcccagccacatctttacgccatgggaccaggagtaaagcgctctctaaaccccgcaccccaaatctctaaacgcctgagttcaggctgagtcctagccctagtgagcctgaagagcttggactgattcccagtctcctgggtcaagccccactttgtgctttcgaagcttatgagcgggttccctggatagaaggagtcttccatccccactgcccttgggcctcttcagcatagtcctgtgccagggccctgtcctcactatcagtcagttcagtatttgctttcacgtgagtggcggactcttctgaagcagccagaactctcaaaggcagcgcatggagttgccttgcgagatttccaaggaaggaggaaagattaacaggcggagcctggcacacccaagcctttgaggtggtcagagtgccaccttcagccccttgggaagggacagcggtgggtctgggagtggcctcaccctggattcagcctaggaatctcttcaccctcagctgtccagccctgctgcctgtctggggatgtgtggcctgggcagagggcagtttaaagcacaaaaccacatggggaaaacacaaggttgcggggactttctcatgtgcctgatgtggtggagggagacaccagcaggtggctgcagtgacgttagggaacataacacttctttgccctgctagctctcagctctggggggcatcccccgatgtggtctgggctgggagcaggcatatcccctggttgttgcctgtgcctggtctgttcaccatcgtgtttgtgtgggcagagcctgccctgcaggagcagtgactttcttcccactgtgtgtcccggacctgtggtatgtgtccctttgccatcccaaacaggcaactgcttgctgctctccttgcttggcatagcctcctggtcagtggccaatgccccacaggccttcctgggcctggccctcctctcctgactcccagatccttccctgccctcttgtgtgcaaggacagattttgcagggaaagttctgtttcttctttgatacctttgttctgtcccctgccccatccccagcactcatgatcttgaagcccctatcacactctagttcagtcctgtgaaccatgtcctgagggccttgcagggaagtaggaaatagaaactcctccacaaagagccgaggatcagagaagacccctgagatgaatcagggccctgccctgcccaccaactcttttctagcaatcatgtcctgcccaggctgcaggcttcattaggctcctgctgtcctccatgatgtgactagcacaaggtgtatatatgttttgtacctctgccgatggctgtacatagtgtatgaaagttatttaagccccatgttgtacatttctgttcctagattggatgtgtgtgttctaagaagttgtcataaataaaacctgaatgaccaaaaaaaaaaaa

SEQ ID NO: 1132 - protein, 253 aa, Homo sapien
MERRPSLAENYQGRGSWQSFSAPGLGTRSSGEIVKSVFWRPLLGELWNYRSGPWGGLSSIPLPRPTPTQSCPPCFSVASLVLCFPLQSGSQEPAPPPFRGRSDFWTFQRWFCVSALGSSPSWAGALGALSMWRPVLGGGRLQWRLSEAWSLPRALLGAATEAKTAVLLVLALLDVVLKSGAADSRKETPLDAGLLGPEQSVSNGWKSFFLWPPRGCRATPLALRCGHKSLPTPPRQPEQKVLTLQPVRKNPSA

SEQ ID NO: 1133 - DNA, 841 bp, Homo sapien
gaaccgtttactcgctgctgtgcccatctatcagcaggctccgggctgaagattgcttctcttctctcctccaaggtctagtgacggagcccgcgcgcggcgccaccatgcggcagaaggcggtatcgcttttcttgtgctacctgctgctcttcacttgcagtggggtggaggcaggtgagaatgcgggtaaggatgcaggtaagaaaaagtgctcggagagctcggacagcggctccgggttctggaaggccctgaccttcatggccgtcggaggaggactcgcagtcgccgggctgcccgcgctgggcttcaccggcgccggcatcgcggccaactcggtggctgcctcgctgatgagctggtctgcgatcctgaatgggggcggcgtgcccgccggggggctagtggccacgctgcagagcctcggggctggtggcagcagcgtcgtcataggtaatattggtgccctgatgggctacgccacccacaagtatctcgatagtgaggaggatgaggagtagccagcagctcccagaacctcttcttccttcttggcctaactcttccagttaggatctagaactttgcctttttttttttttttttttttttttgagatgggttctcactatattgtccaggctagagtgcagtggctattcacagatgcgaacatagtacactgcagcctccaactcctagcctcaagtgatcctcctgtctcaacctcccaagtaggattacaagcatgcgccgacgatgcccagaatccagaactttgtctatcactctccccaacaacctagatgtgaaaacagaataaacttcacccagaaaa

SEQ ID NO: 1134 - protein, 138 aa, Homo sapien
MRQKAVSLFLCYLLLFTCSGVEAGENAGKDAGKKKCSESSDSGSGFWKALTFMAVGGGLAVAGLPALGFTGAGIAANSVAASLMSWSAILNGGGVPAGGLVATLQSLGAGGSSVVIGNIGALMGYATHKYLDSEEDEE

SEQ ID NO: 1135 - DNA, 2058 bp, Homo sapien
gcacgaggaagccacagatctcttaagaactttctgtctccaaaccgtggctgctcgataaatcagacagaacagttaatcctcaatttaagcctgatctaacccctagaaacagatatagaacaatggaagtgacaacaagattgacatggaatgatgaaaatcatctgcgcaactgcttggaaatgtttctttgagtcttctctataagtctagtgttcatggaggtagcattgaagatatggttgaaagatgcagccgtcagggatgtactataacaatggcttacattgattacaatatgattgtagcctttatgcttggaaattatattaatttacgtgaaagttctacagagccaaatgattccctatggttttcacttcaaaagaaaaatgacaccactgaaatagaaactttactcttaaatacagcaccaaaaattattgatgagcaactggtgtgtcgtttatcgaaaacggatattttcattatatgtcgagataataaaatttatctagataaaatgataacaagaaacttgaaactaaggttttatggccaccgtcagtatttggaatgtgaagtttttcgagttgaaggaattaaggataacctagacgacataaagaggataattaaagccagagagcacagaaataggcttctagcagacatcagagactataggccctatgcagacttggtttcagaaattcgtattcttttggtgggtccagttgggtctggaaagtccagttttttcaattcagtcaagtctatttttcatggccatgtgactggccaagccgtagtggggtctgataccaccagcataaccgagcggtataggatatattctgttaaagatggaaaaaatggaaaatctctgccatttatgttgtgtgacactatggggctagatggggcagaaggagcaggactgtgcatggatgacattccccacatcttaaaaggttgtatgccagacagatatcagtttaattcccgtaaaccaattacacctgagcattctacttttatcacctctccatctctgaaggacaggattcactgtgtggcttatgtcttagacatcaactctattgacaatctctactctaaaatgttggcaaaagtgaagcaagttcacaaagaagtattaaactgtggtatagcatatgtggccttgcttactaaagtggatgattgcagtgaggttcttcaagacaactttttaaacatgagtagatctatgacttctcaaagccgggtcatgaatgtccataaaatgctaggcattcctatttccaatattttgatggttggaaattatgcttcagatttggaactggaccccatgaaggatattctcatcctctctgcactgaggcagatgctgcgggctgcagatgattttttagaagatttgcctcttgaggaaactggtgcaattgagagagcgttacagccctgcatttgagataagttgccttgattctgacatttggcccagcctgtactggtgtgccgcaatgagagtcaatctctattgacagcctgcttcagattttgcttttgttcgttttgccttctgtccttggaacagtcatatctcaagttcaaaggccaaaacctgagaagcggtgggctaagataggtcctactgcaaaccacccctccatatttccgtaccatttacaattcagtttctgtgacatctttttaaaccactggaggaaaaatgagatattctctaatttattcttctataacactctatatagagctatgtgagtactaatcacattgaataatagttataaaattattgtatagacatctgcttcttaaacagattgtgagttctttgagaaacagcgtggattttacttatctgtgtattcacagagcttagcacagtgcctggtaatgagcaagcatacttgccattacttttccttcccactctctccaacatcacattcactttaaatttttctgtatatagaaaggaaaactagcctgggcaacatgatgaaaccccatctccactgc

SEQ ID NO: 1136 - protein, 413 aa, Homo sapien
MVERCSRQGCTITMAYIDYNMIVAFMLGNYINLRESSTEPNDSLWFSLQKKNDTTEIETLLLNTAPKIIDEQLVCRLSKTDIFIICRDNKIYLDKMITRNLKLRFYGHRQYLECEVFRVEGIKDNLDDIKRIIKAREHRNRLLADIRDYRPYADLVSEIRILLVGPVGSGKSSFFNSVKSIFHGHVTGQAVVGSDTTSITERYRIYSVKDGKNGKSLPFMLCDTMGLDGAEGAGLCMDDIPHILKGCMPDRYQFNSRKPITPEHSTFITSPSLKDRIHCVAYVLDINSIDNLYSKMLAKVKQVHKEVLNCGIAYVALLTKVDDCSEVLQDNFLNMSRSMTSQSRVMNVHKMLGIPISNILMVGNYASDLELDPMKDILILSALRQMLRAADDFLEDLPLEETGAIERALQPCI

SEQ ID NO: 1137 - DNA, 4908 bp, Homo sapien
acctgcgtgcagtcggtcctccaggccacgcagcgcccgagagtaccagggagactccggcccctgtcggcgccaagcccctccgcccctcacagcgcccaggtccgcggccgggccttgattttttggcggggaccgtcatggcgtcgcagccaaattcgtctgcgaagaagaaagaggagaaggggaagaacatccaggtggtggtgagatgcagaccatttaatttggcagagcggaaagctagcgcccattcaatagtagaatgtgatcctgtacgaaaagaagttagtgtacgaactggaggattggctgacaagagctcaaggaaaacatacacttttgatatggtgtttggagcatctactaaacagattgatgtttaccgaagtgttgtttgtccaattctggatgaagttattatgggctataattgcactatctttgcgtatggccaaactggcactggaaaaacttttacaatggaaggtgaaaggtcacctaatgaagagtatacctgggaagaggatcccttggctggtataattccacgtacccttcatcaaatttttgagaaacttactgataatggtactgaattttcagtcaaagtgtctctgttggagatctataatgaagagctttttgatcttcttaatccatcatctgatgtttctgagagactacagatgtttgatgatccccgtaacaagagaggagtgataattaaaggtttagaagaaattacagtacacaacaaggatgaagtctatcaaattttagaaaagggggcagcaaaaaggacaactgcagctactctgatgaatgcatactctagtcgttcccactcagttttctctgttacaatacatatgaaagaaactacgattgatggagaagagcttgttaaaatcggaaagttgaacttggttgatcttgcaggaagtgaaaacattggccgttctggagctgttgataagagagctcgggaagctggaaatataaatcaatccctgttgactttgggaagggtcattactgcccttgtagaaagaacacctcatgttccttatcgagaatctaaactaactagaatcctccaggattctcttggagggcgtacaagaacatctataattgcaacaatttctcctgcatctctcaatcttgaggaaactctgagtacattggaatatgctcatagagcaaagaacatattgaataagcctgaagtgaatcagaaactcaccaaaaaagctcttattaaggagtatacggaggagatagaacgtttaaaacgagatcttgctgcagcccgtgagaaaaatggagtgtatatttctgaagaaaattttagagtcatgagtggaaaattaactgttcaagaagagcagattgtagaattgattgaaaaaattggtgctgttgaggaggagctgaatagggttacagagttgtttatggataataaaaatgaacttgaccagtgtaaatctgacctgcaaaataaaacacaagaacttgaaaccactcaaaaacatttgcaagaaactaaattacaacttgttaaagaagaatatatcacatcagctttggaaagtactgaggagaaacttcatgatgctgccagcaagctgcttaacacagttgaagaaactacaaaagatgtatctggtctccattccaaactggatcgtaagaaggcagttgaccaacacaatgcagaagctcaggatatttttggcaaaaacctgaatagtctgtttaataatatggaagaattaattaaggatggcagctcaaagcaaaaggccatgctagaagtacataagaccttatttggtaatctgctgtcttccagtgtctctgcattagataccattactacagtagcacttggatctctcacatctattccagaaaatgtgtctactcatgtttctcagatttttaatatgatactaaaagaacaatcattagcagcagaaagtaaaactgtactacaggaattgattaatgtactcaagactgatcttctaagttcactggaaatgattttatccccaactgtggtgtctatactgaaaatcaatagtcaactaaagcatattttcaagacttcattgacagtggccgataagatagaagatcaaaaaaaggaactagatggctttctcagtatactgtgtaacaatctacatgaactacaagaaaataccatttgttccttggttgagtcacaaaagcaatgtggaaacctaactgaagacctgaagacaataaagcagacccattcccaggaactttgcaagttaatgaatctttggacagagagattctgtgctttggaggaaaagtgtgaaaatatacagaaaccacttagtagtgtccaggaaaatatacagcagaaatctaaggatatagtcaacaaaatgacttttcacagtcaaaaattttgtgctgattctgatggcttctcacaggaactcagaaattttaaccaagaaggtacaaaattggttgaagaatctgtgaaacactctgataaactcaatggcaacctggaaaaaatatctcaagagactgaacagagatgtgaatctctgaacacaagaacagtttatttttctgaacagtgggtatcttccttaaatgaaagggaacaggaacttcacaacttattggaggttgtaagccaatgttgtgaggcttcaagttcagacatcactgagaaatcagatggacgtaaggcagctcatgagaaacagcataacatttttcttgatcagatgactattgatgaagataaattgatagcacaaaatctagaacttaatgaaaccataaaaattggtttgactaagcttaattgctttctggaacaggatctgaaactggatatcccaacaggtacgacaccacagaggaaaagttatttatacccatcaacactggtaagaactgaaccacgtgaacatctccttgatcagctgaaaaggaaacagcctgagctgttaatgatgctaaactgttcagaaaacaacaaagaagagacaattccggatgtggatgtagaagaggcagttctggggcagtatactgaagaacctctaagtcaagagccatctgtagatgctggtgtggattgttcatcaattggcggggttccatttttccagcataaaaaatcacatggaaaagacaaagaaaacagaggcattaacacactggagaggtctaaagtggaagaaactacagagcacttggttacaaagagcagattacctctgcgagcccagatcaacctttaattcacttgggggttggcaattttatttttaaagaaaacttaaaaataaaacctgaaaccccagaacttgagccttgtgtatagattttaaaagaatatatatatcagccgggcgcggtggctcatgcctgtaatcccagcactttgggaggctgaggcgggtggattgcttgagcccaggagtttgagaccagcctggccaacgtggcaaaacctcgtctctgttaaaaattagccgggcgtggtggcacactcctgtaatcccagctactggggaggctgaggcacgagaatcacttgaacccaggaagcggggttgcagtgagccaaaggtacaccactacactccagcctgggcaacagagcaagactcggtctcaaaaacaaaatttaaaaaagatataaggcagtactgtaaattcagttgaattttgatatctacccatttttctgtcatccctatagttcactttgtattaaattgggtttcatttgggatttgcaatgtaaatacgtatttctagttttcatataaagtagttcttttataacaaatgaaaagtatttttcttgtatattattaagtaatgaatatataagaactgtactcttctcagcttgagcttaacataggtaaatatcaccaacatctgtccttagaaaggaccatctcatgttttttttcttgctatgacttgtgtattttcttgcatcctccctagacttccctatttcgctttctcctcggctcactttctccctttttatttttcaccaaaccatttgtagagctacaaaacctatcctttcttattttcagtagtcagaattttatctagaaatcttttaacacctttttagtggttatttctaaaatcactgtcaacaataaatctaaccctagttgtatccctcctttaagtatttaaaacttgttgccccaaatgtgaaagcatttaattcctttaagaggcctaactcattcaccctgacagagttcacaaaaagcccactttagagtatacattgctattatgggagaccacccagacatctgactaatggctctgtgccacactccaagacctgtgccttttagagaagctcacaatgatttaaggactgtttgaaacttccaattatgtctataatttatattcttttgtttacatgatgaaactttttgttgttgcttgtttgtatataatacaatgtgtacatgtatctttttctcgattcaaatcttaacccttaggactctggtatttttgatctggcaaccatatttctggaagttgagatgtttcagcttgaagaaccaaaacagaaggaatatgtacaaagaataaattttctgctcacgatgagtttagtgtgtaaagtttagagacatctgactttgatagctaaattaaaccaaaccctattgaagaattgaatatatgctacttcaagaaactaaattgatctcgtagaattatcttaataaaataatggctataatttctctgcaaaatcagatgtcagcataagcgatggataatacctaataaactgccctcagtaaatccatggttaataaatgtggtttctacatt

SEQ ID NO: 1138 - protein, 1056 aa, Homo sapien
MASQPNSSAKKKEEKGKNIQVVVRCRPFNLAERKASAHSIVECDPVRKEVSVRTGGLADKSSRKTYTFDMVFGASTKQIDVYRSVVCPILDEVIMGYNCTIFAYGQTGTGKTFTMEGERSPNEEYTWEEDPLAGIIPRTLHQIFEKLTDNGTEFSVKVSLLEIYNEELFDLLNPSSDVSERLQMFDDPRNKRGVIIKGLEEITVHNKDEVYQILEKGAAKRTTAATLMNAYSSRSHSVFSVTIHMKETTIDGEELVKIGKLNLVDLAGSENIGRSGAVDKRAREAGNINQSLLTLGRVITALVERTPHVPYRESKLTRILQDSLGGRTRTSIIATISPASLNLEETLSTLEYAHRAKNILNKPEVNQKLTKKALIKEYTEEIERLKRDLAAAREKNGVYISEENFRVMSGKLTVQEEQIVELIEKIGAVEEELNRVTELFMDNKNELDQCKSDLQNKTQELETTQKHLQETKLQLVKEEYITSALESTEEKLHDAASKLLNTVEETTKDVSGLHSKLDRKKAVDQHNAEAQDIFGKNLNSLFNNMEELIKDGSSKQKAMLEVHKTLFGNLLSSSVSALDTITTVALGSLTSIPENVSTHVSQIFNMILKEQSLAAESKTVLQELINVLKTDLLSSLEMILSPTVVSILKINSQLKHIFKTSLTVADKIEDQKKELDGFLSILCNNLHELQENTICSLVESQKQCGNLTEDLKTIKQTHSQELCKLMNLWTERFCALEEKCENIQKPLSSVQENIQQKSKDIVNKMTFHSQKFCADSDGFSQELRNFNQEGTKLVEESVKHSDKLNGNLEKISQETEQRCESLNTRTVYFSEQWVSSLNEREQELHNLLEVVSQCCEASSSDITEKSDGRKAAHEKQHNIFLDQMTIDEDKLIAQNLELNETIKIGLTKLNCFLEQDLKLDIPTGTTPQRKSYLYPSTLVRTEPREHLLDQLKRKQPELLMMLNCSENNKEETIPDVDVEEAVLGQYTEEPLSQEPSVDAGVDCSSIGGVPFFQHKKSHGKDKENRGINTLERSKVEETTEHLVTKSRLPLRAQINL

SEQ ID NO: 1139 - DNA, 1978 bp, Homo sapien
cggaagccgactcaacagagctatggcgggtttgactgtgagagacccagcggtggatcgttctctacgttctgtgttcgtggggaacattccttatgaagctactgaagagcagttgaaggacatcttttctgaggttggacctgttgttagtttcagattggtatacgatagagagacaggaaagccaaagggttatggcttctgtgaataccaagaccaagagacagcacttagtgccatgcggaacctgaatgggcgcgaattcagtgggagagcacttcgagtggacaatgctgccagtgaaaagaacaaagaagagctgaagagccttggcactggtgcccctgtcattgagtcaccttatggagagaccatcagtcctgaggatgcccctgagtccattagcaaagcagttgccagccttccaccagagcagatgtttgagctgatgaaacaaatgaagctctgtgtccagaatagtccccaggaggcacggaacatgttacttcagaaccctcaactggcttatgctttgctgcaagcacaggtagtgatgagaattgtggatccggaaattgccctgaaaattctgcatcgccagacaaatatcccaacgctgattgcaggcaaccctcagccagtccatggtgctgggcctggctcaggatccaatgtgtcaatgaaccagcagaatcctcaggcccctcaggcccagtctttgggtggaatgcatgtcaatggcgcacctcctctgatgcaagcttctatgcagggtggagttccagcaccagggcaaatgccagctgctgtcacaggacctggccctggttccttagctcctggaggaggaatgcaggctcaggttggaatgccaggaagtggaccagtgtccatggaacgggggcaagtgccgatgcaagaccccagagcagctatgcagcggggatccttgcctgcgaatgtcccaacccctcgaggcttgttaggagatgctccgaatgatccacggggaggcactttactttctgtaactggagaggtagagcctagaggttacttgggaccacctcatcagggtccacccatgcaccatgtccctggccatgagagccgaggaccacccccacatgaactgaggggagggccattacccgagcccagacctctaatggcagaaccaagaggacccatgctagatcagaggggtccacccttggatggcagaggtggaagggatccccgaggaatagatgcacgagggatggaggcccgagccatggaggcaagagggttagatgccagaggattagaggcccgtgcaatggaggcccgtgcgatggaagctcgtgcaatggaggcccgagcgatggaggcccgtgcaatggaagtccgagggatggaggccagaggcatggataccagaggcccagtgcctggccccagaggacctatacctagtggaatgcagggtcccagtccaattaacatgggggcggttgtcccccagggatccagacaggtcccagtcatgcagggaacaggaatgcaaggagcaagtatacagggtggaagccagcctggcggctttagtcccgggcagaaccaagtcactccacaggatcatgagaaggctgctttgattatgcaggttctacaactgactgcagaccagattgccatgttgcctcctgagcaaaggcagagtatcctgattttaaaggaacaaatacagaaatccactggagcaccttgataggttttcaaaaatacctggcaagaaatctggaaattctataattttgttgaaatattgaaaaaagatgacctgcatcctaacccttgaatgactcaaatcagtgccaggtggaggactcccatcaccttctctcagaacaaaatcacttcattttattgtcttagtttgtatattttctgtgacttgaaataaactttgaacacaattttagtacactgc

SEQ ID NO: 1140 - protein, 577 aa, Homo sapien
MAGLTVRDPAVDRSLRSVFVGNIPYEATEEQLKDIFSEVGPVVSFRLVYDRETGKPKGYGFCEYQDQETALSAMRNLNGREFSGRALRVDNAASEKNKEELKSLGTGAPVIESPYGETISPEDAPESISKAVASLPPEQMFELMKQMKLCVQNSPQEARNMLLQNPQLAYALLQAQVVMRIVDPEIALKILHRQTNIPTLIAGNPQPVHGAGPGSGSNVSMNQQNPQAPQAQSLGGMHVNGAPPLMQASMQGGVPAPGQMPAAVTGPGPGSLAPGGGMQAQVGMPGSGPVSMERGQVPMQDPRAAMQRGSLPANVPTPRGLLGDAPNDPRGGTLLSVTGEVEPRGYLGPPHQGPPMHHVPGHESRGPPPHELRGGPLPEPRPLMAEPRGPMLDQRGPPLDGRGGRDPRGIDARGMEARAMEARGLDARGLEARAMEARAMEARAMEARAMEARAMEVRGMEARGMDTRGPVPGPRGPIPSGMQGPSPINMGAVVPQGSRQVPVMQGTGMQGASIQGGSQPGGFSPGQNQVTPQDHEKAALIMQVLQLTADQIAMLPPEQRQSILILKEQIQKSTGAP

SEQ ID NO: 1141 - DNA, 3091 bp, Homo sapien
gggagacccaagcttctagagatccctcgacctcgagatccattgtgctctaaagagcggaccccagcctctgccaggttcggtccgccatcctcgtcccgtcctccgccggcccctgccccgcgcccagggatcctccagctcctttcgcccgcgccctccgttcgctccggacaccatggacaagttttggtggcacgcagcctggggactctgcctcgtgccgctgagcctggcgcagatcgatttgaatataacctgccgctttgcaggtgtattccacgtggagaaaaatggtcgctacagcatctctcggacggaggccgctgacctctgcaaggctttcaatagcaccttgcccacaatggcccagatggagaaagctctgagcatcggatttgagacctgcaggtatgggttcatagaagggcatgtggtgattccccggatccaccccaactccatctgtgcagcaaacaacacaggggtgtacatcctcacatacaacacctcccagtatgacacatattgcttcaatgcttcagctccacctgaagaagattgtacatcagtcacagacctgcccaatgcctttgatggaccaattaccataactattgttaaccgtgatggcacccgctatgtccagaaaggagaatacagaacgaatcctgaagacatctaccccagcaaccctactgatgatgacgtgagcagcggctcctccagtgaaaggagcagcacttcaggaggttacatcttttacaccttttctactgtacaccccatcccagacgaagacagtccctggatcaccgacagcacagacagaatccctgctaccactttgatgagcactagtgctacagcaactgagacagcaaccaagaggcaagaagcctgggattggttttcatggttgtttctaccatcagagtcaaagaatcatcttcacacaacaacacaaatggctggtacgtcttcaaataccatctcagcaggctgggagccaaatgaagaaaatgaagatgaaagagacagacacctcagtttttctggatcaggcattgatgatgatgaagattttatctccagcaccatttcaaccacaccacgggcctttgaccacacaaaacagaaccaggactggacccagtggaacccaagccattcaaatccggaagtgctacttcagacaaccacaaggatgactgatgtagacagaaatggcaccactgcttatgaaggaaactggaacccagaagcacaccctcccctcattcaccatgagcatcatgaggaagaagagaccccacattctacaagcacaatccaggcaactcctagtagtacaacggaagaaacagctacccagaaggaacagtggtttggcaacagatggcatgagggatatcgccaaacacccagagaagactcccattcgacaacagggacagctgcagcctcagctcataccagccatccaatgcaaggaaggacaacaccaagcccagaggacagttcctggactgatttcttcaacccaatctcacaccccatgggacgaggtcatcaagcaggaagaaggatggatatggactccagtcatagtacaacgcttcagcctactgcaaatccaaacacaggtttggtggaaaatttggacaggacaggacctctttcaatgacaacgcagcagagtaattctcagagcttctctacatcacatgaaggcttggaagaagataaagaccatccaacaacttctactctgacatcaagcaataggaatgatgtcacaggtggaagaagagacccaaatcattctgaaggctcaactactttactggaaggttatacctctcattacccacacacgaaggaaagcaggaccttcatcccagtgacctcagctaagactgggtcctttggagttactgcagttactgttggagattccaactctaatgtcaatcgttccttatcaggagaccaagacacattccaccccagtggggggtcccataccactcatggatctgaatcagatggacactcacatgggagtcaagaaggtggagcaaacacaacctctggtcctataaggacaccccaaattccagaatggctgatcatcttggcatccctcttggccttggctttgattcttgcagtttgcattgcagtcaacagtcgaagaaggtgtgggcagaagaaaaagctagtgatcaacagtggcaatggagctgtggaggacagaaagccaagtggactcaacggagaggccagcaagtctcaggaaatggtgcatttggtgaacaaggagtcgtcagaaactccagaccagtttatgacagctgatgagacaaggaacctgcagaatgtggacatgaagattggggtgtaacacctacaccattatcttggaaagaaacaaccgttggaaacataaccattacagggagctgggacacttaacagatgcaatgtgctactgattgtttcattgcgaatcttttttagcataaaattttctactctttttgttttttgtgttttgttctttaaagtcaggtccaatttgtaaaaacagcattgctttgtaaattagggcccaattaataatcagcaagaatttgatcgttcagttccacttggaggccttcatcctcgggtgtgctatggatggcttctaacaaaaactacacatatgtattcctgatcgccaacctttcccccaccagctaaggacatttcccagggttaatagggcctggtccctgggaggaaatttgaatgggtccattttgcccttccatagcctaatccctgggcattgctttccactgaggttggggtgtactagttacacatcttcaacagaccccctctagaaatttttcagatgcttctgggagacaccaaagggtgaagctatttatctgtagtaaactatttatctgtgtttttgaaatattaaaccctggatcagtcctttgatcagtataattttttaaagttactttgtcagaggcacaaaagggtttaaactgattcataataaatatctgtacttcttcgatcttcaaaa

SEQ ID NO: 1142 - protein, 742 aa, Homo sapien
MDKFWWHAAWGLCLVPLSLAQIDLNITCRFAGVFHVEKNGRYSISRTEAADLCKAFNSTLPTMAQMEKALSIGFETCRYGFIEGHVVIPRIHPNSICAANNTGVYILTYNTSQYDTYCFNASAPPEEDCTSVTDLPNAFDGPITITIVNRDGTRYVQKGEYRTNPEDIYPSNPTDDDVSSGSSSERSSTSGGYIFYTFSTVHPIPDEDSPWITDSTDRIPATTLMSTSATATETATKRQEAWDWFSWLFLPSESKNHLHTTTQMAGTSSNTISAGWEPNEENEDERDRHLSFSGSGIDDDEDFISSTISTTPRAFDHTKQNQDWTQWNPSHSNPEVLLQTTTRMTDVDRNGTTAYEGNWNPEAHPPLIHHEHHEEEETPHSTSTIQATPSSTTEETATQKEQWFGNRWHEGYRQTPREDSHSTTGTAAASAHTSHPMQGRTTPSPEDSSWTDFFNPISHPMGRGHQAGRRMDMDSSHSTTLQPTANPNTGLVENLDRTGPLSMTTQQSNSQSFSTSHEGLEEDKDHPTTSTLTSSNRNDVTGGRRDPNHSEGSTTLLEGYTSHYPHTKESRTFIPVTSAKTGSFGVTAVTVGDSNSNVNRSLSGDQDTFHPSGGSHTTHGSESDGHSHGSQEGGANTTSGPIRTPQIPEWLIILASLLALALILAVCIAVNSRRRCGQKKKLVINSGNGAVEDRKPSGLNGEASKSQEMVHLVNKESSETPDQFMTADETRNLQNVDMKIGV

SEQ ID NO: 1143 - DNA, 3091 bp, Homo sapien; identical to SEQ ID NO: 1141

SEQ ID NO: 1144 - protein, 742 aa, Homo sapien; identical to SEQ ID NO: 1142

SEQ ID NO: 1145 - DNA, 7706 bp, Homo sapien
  Unsure 2113-2135: Unknown base
gaattcggcacgaggtggtggccgcgcacccggccgcggctgattcattcacttcaagtgccgtgcagaaggctcggcaggcggggcgggcgtggggccgcggctccgggttggggaccgaggagatccggctgtggaccagacgctcctctgcggggcgggcacccaagcgcgctcgccaccccctcgccatccgctagagccgggctcctggactgggactcgggcccgccgcacagttgaaaagtcgcatagtggtttttccgctcgcgtcgctgtgtgaaagttggctcgccgctctttgcacgccctccctggaggccgacccgagacgccaagctggagagaccgtgcctccccgaggccggccgccccgcgagcacagcctccgcccccgttgcactgccgggctgggcaatatgaaggagcagccctcatgtgccggcaccgggcatccgagcatggcgggaggaggcctaccagaaactggccagcgagaccctggaggagctggactggtgtctggaccagctagagaccctacagaccaggcactccgtcagtgagatggcctccaacaagtttaaaaggatgcttaatcgggagctcacccatctctctgaaatgagtcggtctggaaatcaagtgtcagagtttatatcaaacacattcttagataagcaacatgaagtggaaattccttctccaactcagaaggaaaaggagaaaaagaaaagaccaatgtctcagatcagtggagtcaagaaattgatgcacagctctagtctgactaattcaagtatcccaaggtttggagttaaaactgaacaagaagatgtccttgccaaggaactagaagatgtgaacaaatggggtcttcatgttttcagaatagcagagttgtctggtaaccggcccttgactgttatcatgcacaccatttttcaggaacgggatttattaaaaacatttaaaattccagtagatactttaattacatatcttatgactctcgaagaccattaccatgctgatgtggcctatcacaacaatatccatgctgcagatgttgtccagtctactcatgtgctattatctacacctgctttggaggctgtgtttacagatttggagattcttgcagcaatttttgccagtgcaatacatgatgtagatcatcctggtgtgtccaatcaatttctgatcaatacaaactctgaacttgccttgatgtacaatgattcctcagtcttagagaaccatcatttggctgtgggctttaaattgcttcaggaagaaaactgtgacattttccagaatttgaccaaaaaacaaagacaatctttaaggaaaatggtcattgacatcgtacttgcaacagatatgtcaaaacacatgaatctactggctgatttgaagactatggttgaaactaagaaagtgacaagctctggagttcttcttcttgataattattccgataggattcaggttcttcagaatatggtgcactgtgcagatctgagcaacccaacaaagcctctccagctgtaccgccagtggacggaccggataatggaggagttcttccgccaaggagaccgagagagggaacgtggcatggagataagccccatgtgtgacaagcacaatgcttccgtggaaaaatcacaggtgggcttcatagactatattgttcatcccctctgggagacatgggcagacctcgtccaccctgacgcccaggatattttggacactttggaggacaatcgtgaatggtaccagagcacaatccctcagagcccctctcctgcacctgatgacccagaggagggccggcagggtcaaactgagaaattccagtttgaactaactttagaggaagatggtgagtcagacacggaaaaggacagtggcagtcaagtggaagaagacactagctgcagtgactccaagactctttgtactcaagactcagagtctactgaaattccccttgatgaacaggttgaagaggaggcagtaggggaagaagaggaaagccagcctgaagcctgtgtcatagatgatcgttctcctgacacgtaacagtgcaaaaactttcatgccnnnnnnnnnnnnnnnnnnnnnnnttgtttccaaagtgcatgtcacatgccacaaccacggtcacacctcactgtcatctgccaggacgtttgttgaacaaaactgaccttgactactcagtccagcgctcaggaatatcgtaaccagttttttcacctccatgttcatccgagcaaggtggacatcttcacgaacagcgtttttaacaagatttcagcttggtagagctgacaaagcagataaaatctactccaaattattttcaagagagtgtgactcatcaggcagcccaaaagtttattggacttggggtttctattcctttttatttgtttgcaatattttcagaagaaaggcattgcacagagtgaacttaatggacgaagcaacaaatatgtcaagaacaggacatagcacgaatctgttaccagtaggaggaggatgagccacagaaattgcataattttctaatttcaagtcttcctgatacatgactgaatagtgtggttcagtgagctgcactgacctctacattttgtatgatatgtaaaacagattttttgtagagcttacttttattattaaatgtattgaggtattatatttaaaaaaaactatgttcagaacttcatctgccactggttatttttttctaaggagtaacttgcaagttttcagtacaaatctgtgctacactggataaaaatctaatttatgaattttacttgcaccttatagttcatagcaattaactgatttgtagtgattcattgttgttttatataccaatgacttccatattttaaaagagaaaaacaactttatgtgcaggaaacccttttgtaagtctttattatttacttgcatttgtttcactctttccagataagcagagtgctcttcaccaggtttttcttcatgtgcaaagtgactattgttctataatacttttatgtgtgttatatcaaatgtgtcttaagcttcatgcaaactcagtcatcagttcgtgtgtctgaagcaagtgggagatatataaatacccagtagctaaaatggtcagtcttttttagatgttttcctacttagtatctcctaataacgtttgctgtgtcactagatgttcatttcacaagtgcatgtctttctaataatccacacatttcatgctctaataatccacacatttcatgctcatttttattgtttttacagccagttatagtaagaaaaaggtttttccccttgtgctgctttataatttagcgtgtgtctgaaccttatccatgtttgctagatgaggtcttgtcaaatatatcactaccattgtcaccggtgaaaagaaacaggtagttaagttagggttaacattcatttcaaccacgaggttgtatatcatgactagcttttactcttggtttacagagaaaagttaaacagccaactaggcagtttttaagaatattaacaatatattaacaaacaccaatacaactaatcctatttggttttaatgatttcaccatgggattaagaactatatcaggaacatccctgagaaacggttttaagtgtagcaactactcttccttaatggacagccacataacatgtaggaagtcctttatcacttatcctcgatccataagcatatcttgcagaggggaactacttctttaaacacatggagggaaagaagatgatgccactggcaccagagggttagtactgtgatgcatcctaaaatatttattatattggtaaaaattctggttaaataaaaaattagagatcactcttggctgatttcagcaccaggaactgtattacagttttagagattaattcctagtgtttacctgattatagcagttggcatcatggggcatttaattctgactttatccccacgtcagccttaataaagtcttctttaccttctctatgaagactttaaagcccaaataatcatttttcacattgatattcaagaattgagatagatagaagccaaagtgggtatctgacaagtggaaaatcaaacgtttaagaagaattacaactctgaaaagcatttatatgtggaacttctcaaggagcctcctggggactggaaagtaagtcatcagccaggcaaatgactcatgctgaagagagtccccatttcagtcccctgagatctagctgatgcttagatcctttgaaataaaaattatgtctttataactctgatcttttacataaagcagaagaggaatcaactagttaattgcaaggtttctactctgtttcctctgtaaagatcagatggtaatctttcaaataagaaaaaaataaagacgtatgtttgaccaagtagtttcacaagaatatttgggaacttgtttcttttaattttatttgtccctgagtgaagtctagaaagaaaggtaaagagtctagagtttattcctctttccaaaacattctcattcctctcctccctactcttagtatttcccccacagagtgcctagaatcttaataatgaataaaataaaaagcagcaatatgtcattaacaaatccagacctgaaagggtaaagggtttataactgcactaataaagagaggctctttttttttcttccagtttgttggtttttaatggtaccgtgttgtaaagatacccactaatggacaatcaaattgcagaaaaggctcaatatccaagagacagggactaatgcactgtacaatcggcttatccttgcccttctctcttgccaaagtgtgcttcagaaatatatactgctttaaaaaagaataaaagaatatccttttacaagtggctttacatttcctaaaatgccataagaaaatgcaatatctgggtactgtatggggaaaaaaatgtccaagtttgtataaaaccagtgcatttcagcttgcaagttactgaacacaataatgctgttttaattttgttttatatcagttaaaattcacaataatgtagatagaacaaattacagacaaggaaagaaaaaacttgaatgaaatggattttacagaaagctttatgataatttttgaatgcattatttattttttgtgccatgcattttttttctcaccaaatgaccttacctgtaatacagtcttgtttgtctgtttacaaccatgtatttattgcaatgtacatactgtaatgttaattgtaaattatctgttcttattaaaacatcatcccatgatgggatggtgttgatatatttggaaactcttggtgagagaatgaatggtgtgtatacatactctgtacatttttcttttctcctgtaatatagtcttgtcaccttagagcttgtttatggaagattcaagaaaactataaaatacttaaagatatataaatttaaaaaaacatagctgcaggtctttggtcccagggctgtgccttaactttaaccaatattttcttctgttttgctgcatttgaaaggtaacagtggagctagggctgggcattttacatccaggcttttaattgattagaattctgccaataggtggattttacaaaaccacagacaacctctgaaagattctgagacccttttgagacagaagctcttaagtacttcttgccagggagcagcactgcatgtgtgatggttgtttgccatctgttgatcaggaactacttcagctacttgcatttgattatttcctttttttctttttttataactcggaaacacaactggggaaatatattctttcccagtgattataaacaatctttttcttttttttaagtccttttggcttctagagctcataggaaaatggacttgatttgaaattggagccagagtttactcgtgttggttatctattcatcagcttcctgacatgttaagagaatacattaaagagaaaatactgttttttaatcctaaaatttttcttccactaagataaaccaaatgtgcttacatatatgtaaacccatctatttaaacgcaaaggtgggttgatgtcagtttacatagcagaaagcattcactatcctctaagatttgtttctgcaaaactttcattgctttagaattttaaaatttcaccttgtacaatggccagcccctaaagcaggaaacatttataatggattatatggaaacatcctcccagtacttgcccagcccttgaatcatgtggcttttcagtgaaaggaaagattctttttctaggaaaaatgagcctattttattttattttattttattttttgacacaaactgtagattttagcagccctggcccaaaggaatttgattacttttgttttaaacagtacaaaggggacactataattacaaaaacatccttaactgatttgagttgtttttatttctttggatatattttcagagtggtaaattgtgtgtgagaattacaaatgattattcttttagtggtttcttagcctctcttacagcccacggggatagtactgtacatcaataccttcatatgaaatttttatatgcaatgaaaataaaagcatgggttgattctgcctatttatgactcaatcttttacaaataaaagattattcattttaaattatagttcaatcagcatgtctcttaggatactgaacgtggttgaaatgaaaggatagtgacatcataagttagtactgatattcataaccaaataaagccaacttgagtaattttgctacattaaaaattaccaaaattacttagatggcctataagattaacgcatggtgttttctaagcaagctttgaaaggggccttccatacttacttaattgaatattctgggatattgaaaattattcagatacttgacaattatttttggttacctactccgcaaactacaaagttttaaggactcaacaataagttaatgagacacagtgtttgctttcatggagcttacagtctggaggggacaaaggcttaaacaatactcatataattatatatgtgatcagtacaatgaaggagctcagtggggtaaataagcaggaacctgaacttgatctgttccggagggccacagaaggcttccttgaggccttgagaaagtgatttgcatctgagttctgaaggattgtaagaggtaactagggaaaaagttgacaggaagaggaaggggatccagacaagaaacatttgcaaagatcttgaggcataaatgagcttgagacatctggagaaactgaggaaaagtgagagagtaggcagggcctggagccgcagagccattgctaaccatcctgtgtgagatatcccccattctgtagctttattctcataaccctgctcaattttctttataacacttctcacagatttatatacgtgtttgtttttgttatctgtctctcccaccagaccacagctccatgagagcaaggtctttgcttaccaatatatcactagcacttaaaactatgcctggtacacagtaggttcttaatatgtgttgaatatagccatcaaattgatattggatataattcaatctgataagatattttgagatattaaagagtttttaacttgatcccat

SEQ ID NO: 1146 - protein, 696 aa, Homo sapien
  Unsure 2113-2135: Unknown amino acid
EFGTRWWPRTRPRLIHSLQVPCRRLGRRGGRGAAAPGWGPRRSGCGPDAPLRGGHPSALATPSPSASRAPGLGLGPAAQLKSRIVVFPLASLCESWLAALCTPSLEADPRRQAGETVPPRGRPPREHSLRPRCTAGLGNMKRSSPHVPAPGIRAWREEAYQKLASETLEELDWCLDQLETLQTRHSVSEMASNKFKRMLNRELTHLSEMSRSGNQVSEFISNTFLDKQHEVEIPSPTQKEKEKKKRPMSQISGVKKLMHSSSLTNSSIPRFGVKTEQEDVLAKELEDVNKWGLHVFRIAELSGNRPLTVIMHTIFQERDLLKTFKIPVDTLITYLMTLEDHYHADVAYHNNIHAADVVQSTHVLLSTPALEAVFTDLEILAAIFASAIHDVDHPGVSNQFLINTNSELALMYNDSSVLENHHLAVGFKLLQEENCDIFQNLTKKQRQSLRKMVIDIVLATDMSKHMNLLADLKTMVETKKVTSSGVLLLDNYSDRIQVLQNMVHCADLSNPTKPLQLYRQWTDRIMEEFFRQGDRERERGMEISPMCDKHNASVEKSQVGFIDYIVHPLWETWADLVHPDAQDILDTLEDNREWYQSTIPQSPSPAPDDPEEGRQGQTEKFQFELTLEEDGESDTEKDSGSQVEEDTSCSDSKTLCTQDSESTEIPLDEQVEEEAVGEEEESQPEACVIDDRSPDT

SEQ ID NO: 1147 - DNA, 1105 bp, Homo sapien
gggcgggtagtcgaccgtgtccgcgcgcctgggagacgctgcctcggcccggacgcgcccgcgcccccgcggctggagggtggtcgccactgggacactgtgaaccaggagtgagtcggagctgccgcgctgcccaggccatggactgtgaggtcaacaacggttccagcctcagggatgagtgcatcacaaacctactggtgtttggcttcctccaaagctgttctgacaacagcttccgcagagagctggacgcactgggccacgagctgccagtgctggctccccagtgggagggctacgatgagctgcagactgatggcaaccgcagcagccactcccgcttgggaagaatagaggcagattctgaaagtcaagaagacatcatccggaatattgccaggcacctcgcccaggtcggggacagcatggaccgtagcatccctccgggcctggtgaacggcctggccctgcagctcaggaacaccagccggtcggaggaggaccggaacagggacctggccactgccctggagcagctgctgcaggcctaccctagagacatggagaaggagaagaccatgctggtgctggccctgctgctggccaagaaggtggccagtcacacgccgtccttgctccgtgatgtctttcacacaacagtgaattttattaaccagaacctacgcacctacgtgaggagcttagccagaaatgggatggactgaacggacagttccagaagtgtgactggctaaagcttgatgtggtcacagctgtatagctgcttccagtgtagacggagccctggcatgtcaacagcgttcctagagaagacaggctggaagatagctgtgacttctattttaaagacaatgttaaacttataacccactttaaaatatctacattaatatacttgaatgaaaatgtccatttacacgtatttgaatggccttcatatcatccacacatgaatctgcacatctgtaaatctacacacggtgcctttatttccactgtgcaggttcccacttaaaaattaaattggaaagcaggtttcaaggaagtagaaacaaaatacaatttttttggtaaaaaaaaa

SEQ ID NO: 1148 - protein, 195 aa, Homo sapien
MDCEVNNGSSLRDECITNLLVFGFLQSCSDNSFRRELDALGHELPVLAPQWEGYDELQTDGNRSSHSRLGRIEADSESQEDIIRNIARHLAQVGDSMDRSIPPGLVNGLALQLRNTSRSEEDRNRDLATALEQLLQAYPRDMEKEKTMLVLALLLAKKVASHTPSLLRDVFHTTVNFINQNLRTYVRSLARNGMD

SEQ ID NO: 1149 - DNA, 4220 bp, Homo sapien
acgttgcccgggatgcggacaggttccgccgcctccagcgccccatcctgagccgattatctgcaattatgaaatgaagtaactcaagatgagcaagttaaaagtgataccagaaaaaagccttaccaataattctaggatcgtaggactcctggctcaactggagaagatcaatgctgagccttcagaatcagacactgcccgatatgttacatcaaaaattcttcatctggctcagagtcaagaaaaaacaaggagagaaatgacagccaaaggttctacaggaatggaaattctgctgtcaacattagagaacacaaaagatcttcaaactacacttaatatcttaagcattcttgttgagctggtgtcagctggtggaggtcgaagagtgagtttcttagtcaccaaaggtggttcacaaatattgttgcagttacttatgaatgccagcaaagaatctcccccacatgaggacttaatggtacagattcattctattcttgcaaagattggaccaaaagataaaaaatttggagtaaaggctagaattaatggggctctgaatataaccctgaatttggtcaagcagaatttgcagaatcatcgcttggttctaccttgccttcagcttttacgagtatattctgccaactctgtgaattcagtatccttagggaaaaatggagttgtggaactgatgtttaaaatcattggaccatttagtaagaagaattccagtcttataaaggttgctttagacactcttgctgcattgctaaaatcaaaaacaaatgccaggagagctgtagacagaggatatgtccaagtgcttttaacaatttatgtagattggcaccgccatgataaccggcatagaaacatgctcattcggaaaggaattttacggagtttaaaaagtgttacaaacatcaagttgggaagaaaagcatttattgatgccaatgggatgaaaattctgtataatacttcgcaattgcctgttattcctgtgactggtcctgtggctcagctctacagcttacctcctgaagtggatgacgtagtagatgaaagtgatgacaacgatgatattgatgtagaagctgaaaacgaaactgagaatgaagatgacctagatcaaaattttaagaatgatgatattgaaacagatattaacaaactaaaaccccagcaagaaccgggacgaacaatagaagatctaaaaatgtatgaacaccttttccctgagcttgttgatgattttcaggactatgatttaatctccaaagaaccaaagccttttgtatttgagggaaaagtacgtggtcctattgttgttcctacggcaggcgagggaacatctgggaattctggcaatttaagaaaagttgtaatgaaggagaacatatcttctaaaggagatgaaggtgaaaagaagtctacctttatggatctagcaaaagaagatattaaagataatgatagaacattacaacagcagccaggtgatcaaaatagaactatttcatcagtccatggtttaaacaatgatattgtaaaggccttggaccgaattacattgcagaatattccttctcaaacagccccaggttttactgcagaaatgaagaaggactgcagtcttcctcttactgtccttacctgtgctaaagcatgtccacacatggctacttgtggaaatgttctgtttgagggaagaacagttcagctagggaagctttgctgcactggagttggaactgaagatgatgaagatactgagtcaaattcatcggtagaacaagcatcggttgaagtacctgatggaccaacactccatgacccagacctctatattgagattgtgaaaaatacgaagtctgtcccagaatattcagaggtggcttatcccgattattttggtcacattccgcctccattcaaagagcctattttagaaaggccttatggtgtacaaaggacaaaaattgctcaagatattgaaaggctaatacatcagagtgatatcatagatcgtgtggtatatgacttggataacccaaattacaccattccagaagagggagatattttgaaatttaactccaaatttgagtctgggaatctgcgcaaagtaattcaaattagaaaaaatgaatatgatcttattctgaactcagacataaacagcaatcattatcatcagtggttttactttgaagtcagtggaatgcgaccaggtgttgcttacaggtttaacatcattaactgtgaaaagtccaacagtcagtttaattatggtatgcaaccactcatgtattcggttcaggaagcattaaatgccagaccatggtggattcgtatggggactgacatttgttactataaaaatcatttctcaagaagttcagttgctgcaggtgggcaaaagggaaaatcctactatacaattacatttactgtcaattttccacataaagatgatgtttgctactttgcttatcactatccatatacgtattcaactttacagatgcatcttcaaaaattggaatcagcacacaatcctcagcaaatctattttcggaaagatgtgttatgtgaaaccctgtctggaaacagctgccccttggtgactataacagcaatgccagagtctaattattatgaacatatctgccatttcagaaatcgcccttacgttttcttgtctgctcgggtacatcctggagaaactaatgcaagttgggttatgaaaggaacgttggaatatctcatgagcaataaccccactgctcagagcttacgagaatcttatatttttaaaattgtccctatgttaaatccagatggtgtcatcaatggaaatcatcgctgttctttaagtggagaggatttgaataggcagtggcaaagtccaagtccggatttacatcctacaatttaccatgctaaggggctgttgcaatacttggctgcagtgaagcgtttacccttggtttattgtgattatcatggccattcccgaaagaagaatgtatttatgtatggttgcagcatcaaagagacagtgtggcataccaatgataatgcaacttcatgtgatgttgtggaggatacgggatacaggacattgcctaagatactgagccatatcgccccagcattttgcatgagcagctgtagcttcgtagtggaaaaatctaaagaatccacagcacgtgttgtagtttggagggaaataggagtacaaagaagttataccatggagagtactttatgtggctgtgatcagggaaaatacaagggtttacagattggtacccgagaactggaagagatgggagcaaaattttgtgttggtcttttacgtttgaaaagactgacctctccattggagtataatctgccttccagcctgcttgactttgaaaatgatttaattgaatcaagctgcaaagtaactagccctaccacttatgtcttggatgaagatgaacctcgattccttgaagaagttgattacagtgcagaaagtaatgatgagttagatattgagttggctgaaaatgtaggagattatgaaccttctgctcaagaagaagtactttctgactctgaattatcaagaacatacctaccttgagcccgctgccatctcttgttaactgcaaagaataaatgaaatatcttggtttttatttcccaggaagcttgagagaaatgagtttatacagagctgactcaaaaagacaaaaagtaacttgggccagtttggtttcaagataataaatgtgttattaattaatgataaaattggcgcttgttttattttcgatattcaatgcactttatgtagcattgaatgatcaaatattggatttacctttaaaaaaaaaaaacctgagtatcattgcatgaatttttatctccctatggttatatcctgcatcaagtggataattttgaagtgtgttcagaatataaaattgaaattttagagttgttgaaaatcctgacttgttgaaaactaatatatatgtacatggatttctatagatgtgtttgtttagaagtgggtagatattgcagataagactgttcttcagaatcatgttaactattgggttgtgactgaagtagtgcagggtttgccttgaaaccattacattctacatttaccaaattaaacaaataaaaactgtattaaatgttgc

SEQ ID NO: 1150 - protein, 1186 aa, Homo sapien
MSKLKVIPEKSLTNNSRIVGLLAQLEKINAEPSESDTARYVTSKILHLAQSQEKTRREMTAKGSTGMEILLSTLENTKDLQTTLNILSILVELVSAGGGRRVSFLVTKGGSQILLQLLMNASKESPPHEDLMVQIHSILAKIGPKDKKFGVKARINGALNITLNLVKQNLQNHRLVLPCLQLLRVYSANSVNSVSLGKNGVVELMFKIIGPFSKKNSSLIKVALDTLAALLKSKTNARRAVDRGYVQVLLTIYVDWHRHDNRHRNMLIRKGILRSLKSVTNIKLGRKAFIDANGMKILYNTSQLPVIPVTGPVAQLYSLPPEVDDVVDESDDNDDIDVEAENETENEDDLDQNFKNDDIETDINKLKPQQEPGRTIEDLKMYEHLFPELVDDFQDYDLISKEPKPFVFEGKVRGPIVVPTAGEGTSGNSGNLRKVVMKENISSKGDEGEKKSTFMDLAKEDIKDNDRTLQQQPGDQNRTISSVHGLNNDIVKALDRITLQNIPSQTAPGFTAEMKKDCSLPLTVLTCAKACPHMATCGNVLFEGRTVQLGKLCCTGVGTEDDEDTESNSSVEQASVEVPDGPTLHDPDLYIEIVKNTKSVPEYSEVAYPDYFGHIPPPFKEPILERPYGVQRTKIAQDIERLIHQSDIIDRVVYDLDNPNYTIPEEGDILKFNSKFESGNLRKVIQIRKNEYDLILNSDINSNHYHQWFYFEVSGMRPGVAYRFNIINCEKSNSQFNYGMQPLMYSVQEALNARPWWIRMGTDICYYKNHFSRSSVAAGGQKGKSYYTITFTVNFPHKDDVCYFAYHYPYTYSTLQMHLQKLESAHNPQQIYFRKDVLCETLSGNSCPLVTITAMPESNYYEHICHFRNRPYVFLSARVHPGETNASWVMKGTLEYLMSNNPTAQSLRESYIFKIVPMLNPDGVINGNHRCSLSGEDLNRQWQSPSPDLHPTIYHAKGLLQYLAAVKRLPLVYCDYHGHSRKKNVFMYGCSIKETVWHTNDNATSCDVVEDTGYRTLPKILSHIAPAFCMSSCSFVVEKSKESTARVVVWREIGVQRSYTMESTLCGCDQGKYKGLQIGTRELEEMGAKFCVGLLRLKRLTSPLEYNLPSSLLDFENDLIESSCKVTSPTTYVLDEDEPRFLEEVDYSAESNDELDIELAENVGDYEPSAQEEVLSDSELSRTYLP

SEQ ID NO: 1151 - DNA, 3178 bp, Homo sapien
gatctcttggagacggcgacccaggcatctggggagccacagaagtcgtactcccttaaaccctgctttgctccccctgtggatgtaaccccttagctggcattttgcatctcaattggcttgtgatggaggcgtctttggggattcagatggatgagccaatggctttttctccccagcgtgaccggtttcaggctgaaggctctttaaaaaaaaacgagcagaattttaaacttgcaggtgttaaaaaagatattgagaagctttatgaagctgtaccacagcttagtaatgtgtttaagattgaggacaaaattggagaaggcactttcagctctgtttatttggccacagcacagttacaagtaggacctgaagagaaaattgctctaaaacacttgattccaacaagtcatcctataagaattgcagctgaacttcagtgcctaacagtggctggggggcaagataatgtcatgggagttaaatactgctttaggaagaatgatcatgtagttattgctatgccatatctggagcatgagtcgtttttggacattctgaattctctttcctttcaagaagtacgggaatatatgcttaatctgttcaaagctttgaaacgcattcatcagtttggtattgttcaccgtgatgttaagcccagcaattttttatataataggcgcctgaaaaagtatgccttggtagactttggtttggcccaaggaacccatgatacgaaaatagagcttcttaaatttgtccagtctgaagctcagcaggaaaggtgttcacaaaacaaatcccacataatcacaggaaacaagattccactgagtggcccagtacctaaggagctggatcagcagtccaccacaaaagcttctgttaaaagaccctacacaaatgcacaaattcagattaaacaaggaaaagacggaaaggagggatctgtaggcctttctgtccagcgctctgtttttggagaaagaaatttcaatatacacagctccatttcacatgagagccctgcagtgaaactcatgaagcagtcaaagactgtggatgtactgtctagaaagttagcaacaaaaaagaaggctatttctacgaaagttatgaatagtgctgtgatgaggaaaactgccagttcttgcccagctagcctgacctgtgactgctatgcaacagataaagtttgtagtatttgcctttcaaggcgtcagcaggttgcccctagggcaggtacaccaggattcagagcaccagaggtcttgacaaagtgccccaatcaaactacagcaattgacatgtggtctgcaggtgtcatatttctttctttgcttagtggacgatatccattttataaagcaagtgatgatttaactgctttggcccaaattatgacaattaggggatccagagaaactatccaagctgctaaaacttttgggaaatcaatattatgtagcaaagaagttccagcacaagacttgagaaaactctgtgagagactcaggggtatggattctagcactcccaagttaacaagtgatatacaagggcatgcttctcatcaaccagctatttcagagaagactgaccataaagcttcttgcctcgttcaaacacctccaggacaatactcagggaattcatttaaaaagggggatagtaatagctgtgagcattgttttgatgagtataataccaatttagaaggctggaatgaggtacctgatgaagcttatgacctgcttgataaacttctagatctaaatccagcttcaagaataacagcagaagaagctttgttgcatccattttttaaagatatgagcttgtgataatggatcttcatttaatgtttactgttatgaggtagaataaaaaagaatactttgtaatagccacaagttcttgtttagagaccagagcaggattaataatttattttaacattttagtgtttggtggcacattctaaaatatagattaagaatacttaaaatgcctgggatagttcttgggactaacaacatgatcttctttgagttaaacctacctaagtagattttaggtgggttcctattaggtcagatttttagcttccctaattacctttcactgacatacagaaaaaggagcagttttagttttaattaattaaaattaacagatgtgatgaggattaaatgaatcaaaagacttaatttgtagattcttttagagttatgagctaggtatagtttggggaaactcaacctggtgctggtgctcttaacaattttgtaaataaagaagataatttccttttctagaggtacatattaggccttttatgaacactaaaacaatgaggaaatgttggtcatggggcaaagtatcacttaaaattgaattcatccatttttaaaaaacacttcatgaaagcattctggtgtgaattgccatttttttcttactggcttctcaattttcttccttctctgcccctacctaaaacattctcctcggaaattacatggtgctgaccacaaagtttctggatgttttattaaatattgtacgtgtttacagttgggaatttaaaataatacatacactggttgataaagggaagctgcaggaccaaggtgaagattgatagtccaaatgcttttcttttttgagttgtatattttttcacaccatcttagatataattaggtagctgctgaaaggaaaagtgaatacagaattgacggtattattggagatttttcctctgcgtagagccatccagatctctgtatcctgttttgactaagtcttaggtgggttgggaagacagataatgaagtaggcaaagagaaaaggacccaagatagaggtttatattcagaaatggtatatatcaatgacagcatatcaaacttcctatgggaaaaagtctggtgggtggtcagctgacagatttcccatttagtagtcatagaatacagaaatagtttagggacatgtattcattttgttattttgagcattgataggtcagtatatctacctaatctgtttggtaagtataggatatataaaccattaccattgatctgtcttatgccataatcttaaaaaaaaattgaatgctcttgaatttgtatattcaataaagttatccttttataaaaaaaaa

SEQ ID NO: 1152 - protein, 574 aa, Homo sapien
MEASLGIQMDEPMAFSPQRDRFQAEGSLKKNEQNFKLAGVKKDIEKLYEAVPQLSNVFKIEDKIGEGTFSSVYLATAQLQVGPEEKIALKHLIPTSHPIRIAAELQCLTVAGGQDNVMGVKYCFRKNDHVVIAMPYLEHESFLDILNSLSFQEVREYMLNLFKALKRIHQFGIVHRDVKPSNFLYNRRLKKYALVDFGLAQGTHDTKIELLKFVQSEAQQERCSQNKSHIITGNKIPLSGPVPKELDQQSTTKASVKRPYTNAQIQIKQGKDGKEGSVGLSVQRSVFGERNFNIHSSISHESPAVKLMKQSKTVDVLSRKLATKKKAISTKVMNSAVMRKTASSCPASLTCDCYATDKVCSICLSRRQQVAPRAGTPGFRAPEVLTKCPNQTTAIDMWSAGVIFLSLLSGRYPFYKASDDLTALAQIMTIRGSRETIQAAKTFGKSILCSKEVPAQDLRKLCERLRGMDSSTPKLTSDIQGHASHQPAISEKTDHKASCLVQTPPGQYSGNSFKKGDSNSCEHCFDEYNTNLEGWNEVPDEAYDLLDKLLDLNPASRITAEEALLHPFFKDMSL

SEQ ID NO: 1153 - DNA, 2407 bp, Homo sapien
ctaaaggtcggcgaggcttctgaagacgcaattcctgcgacgcccgcggaggggccctggggggcggcgcgagcgtctggcctgtgttggctgtaggcaacgaaaggagccctcccggtctgcgccggatggccccgggcggtgactcggtccggagccctggaacgctacgcccacctggcggaaagcaccacggaaacgcatccttctgtggccactgttaggtctgccattttacacttttctgatctcctccttcccttctgtgagctatgtctcaggggtcagtgacattcagagatgtggccatagacttctcccaggaggagtggaaatggcttcagcctgctcaaagagatttgtacagatgtgtaatgttggagaactatggccatctggtctcactgggtctttccatttctaagccagatgtggtttccttattggagcaagggaaagaaccctggctggggaaaagggaagtgaaaagagatctgttttcagtttcagagtcaagtggtgagatcaaagacttttcaccaaaaaatgtcatttatgatgactcatcccagtatttgatcatggaaagaattctaagtcaaggccctgtgtattccagttttaaaggaggctggaaatgcaaggatcatactgagatgctgcaagaaaatcagggatgtattaggaaagtaacagtctctcatcaagaagccctggctcaacatatgaatatcagtactgtggagaggccctatggatgccatgaatgtggaaaaacttttggtcgacgcttttccctggtgttacaccagaggactcatactggagagaaaccatatgcatgtaaggaatgtggcaaaacctttagccagatttcaaaccttgtgaaacaccaaatgatacatactggaaagaaaccccatgagtgtaaggactgtaataaaacattcagttacctttcatttcttattgaacaccagagaacgcacactggggagaaaccttatgaatgtactgagtgtggaaaggcctttagccgtgcctccaacctcactcgacatcaaagaattcacataggaaagaaacaatatatatgtaggaaatgtggtaaagcatttagcagtggctcagaactcattcgccaccagattacacatactggagagaaaccttatgaatgcattgaatgtgggaaggcatttcgccgtttctcacaccttactcgacatcagagcatccatacaaccaaaaccccgtatgaatgtaatgaatgtaggaaagctttgcgttgtcactcattccttattaaacatcagagaattcatgctggagaaaagctctatgaatgtgatgaatgtggtaaagttttcacttggcatgcatcccttattcaacatacgaagagtcacactggagagaaaccctatgcgtgtgctgaatgtgataaagccttcagccggagcttttccctcattctacatcagagaactcatactggagagaaaccctatgtatgtaaggtatgcaacaaatccttcagctggagctcaaaccttgctaaacatcagaggacacacactcttgacaacccctatgaatatgaaaattcatttaattaccactcattccttactgaacaccagtgaatttacactgcaaagaaaaactatgaatgtatggaattttttaaaaagaagtataatgccttacttcagagaactcttggaaagaagccttatgtgaaagtgatgactgtgaagtaatatggcccacactttattcaccaccctggagaaaaaaaaacccaggaatatgtggaaaagccattaataaccactcttttatttttttgcaataacaaggtgaaatcaatattgttgagaagattcttccatctggtaatgttgagaagacttcatttggtaggagtcccttactttacgtgtgtaaattcctaccaggaaagaatacatatccaatagattggagaaagccagagattagccccgcattccgcatctgtcaaccaggacagaaagcatggacaagggatgagctttacaaagatgatgcactttggagatcagaaaattcatatttaagcaaagtgatacaaacacagtgatttgggaatgccttcatttacaatgcaatacttacattttaatactcttgtaggagaaaaagcaactgtataaatgaatgtagagtgactttctgcaatatttgcaacctatatcagagaattacactgtgggaaaactaccattgtaataagtgtagcaaaatctccttagatatctgaaaagtcatactggatggaatctgtaggaaacggttctattttgagggaagggggattcctttttgttttttaagtgaattcagaaaatgttataaactttag

SEQ ID NO: 1154 - protein, 457 aa, Homo sapien
MSQGSVTFRDVAIDFSQEEWKWLQPAQRDLYRCVMLENYGHLVSLGLSISKPDVVSLLEQGKEPWLGKREVKRDLFSVSESSGEIKDFSPKNVIYDDSSQYLIMERILSQGPVYSSFKGGWKCKDHTEMLQENQGCIRKVTVSHQEALAQHMNISTVERPYGCHECGKTFGRRFSLVLHQRTHTGEKPYACKECGKTFSQISNLVKHQMIHTGKKPHECKDCNKTFSYLSFLIEHQRTHTGEKPYECTECGKAFSRASNLTRHQRIHIGKKQYICRKCGKAFSSGSELIRHQITHTGEKPYECIECGKAFRRFSHLTRHQSIHTTKTPYECNECRKALRCHSFLIKHQRIHAGEKLYECDECGKVFTWHASLIQHTKSHTGEKPYACAECDKAFSRSFSLILHQRTHTGEKPYVCKVCNKSFSWSSNLAKHQRTHTLDNPYEYENSFNYHSFLTEHQ

SEQ ID NO: 1155 - DNA, 4133 bp, Homo sapien
ggtgcgcgccgcggcttgggggagagttgagcgcttttcccccctcttttttttttttttttcctcttcttcttaaacaaaccacaaacggatgtgagggaaggaaggtgtttcttttactcctgagcccagacacctcactctgttccgtctaagcttgttttgctgaacacttttttttaaaaaaggaaaaagaaaaggagttgcttgatgtgagagtgaaatggacgtaagattttatccacctccagcccagcccgccgctgcgcccgacgctccctgtctgggaccttctccctgcctggacccctactattgcaacaagtttgacggtgagaacatgtatatgagcatgacagagccgagccaggactatgtgccagccagccagtcctaccctggtccaagcctggaaagtgaagacttcaacattccaccaattactcctccttccctcccagaccactcgctggtgcacctgaatgaagttgagtctggttaccattctctgtgtcaccccatgaaccataatggcctgctaccatttcatccacaaaacatggacctccctgaaatcacagtctccaatatgctgggccaggatggaacactgctttctaattccatttctgtgatgccagatatacgaaacccagaaggaactcagtacagttcccatcctcagatggcagccatgagaccaaggggccagcctgcagacatcaggcagcagccaggaatgatgccacatggccagctgactaccattaaccagtcacagctaagtgctcaacttggtttgaatatgggaggaagcaatgttccccacaactcaccatctccacctggaagcaagtctgcaactccttcaccatccagttcagtgcatgaagatgaaggcgatgatacctctaagatcaatggtggagagaagcggcctgcctctgatatggggaaaaaaccaaaaactcccaaaaagaagaagaagaaggatcccaatgagccccagaagcctgtgtctgcctatgcgttattctttcgtgatactcaggccgccatcaagggccaaaatccaaacgctacctttggcgaagtctctaaaattgtggcttcaatgtgggacggtttaggagaagagcaaaaacaggtctataaaaagaaaaccgaggctgcgaagaaggagtacctgaagcaactcgcagcatacagagccagccttgtatccaagagctacagtgaacctgttgacgtgaagacatctcaacctcctcagctgatcaattcgaagccgtcggtgttccatgggcccagccaggcccactcggccctgtacctaagttcccactatcaccaacaaccgggaatgaatcctcacctaactgccatgcatcctagtctccccaggaacatagcccccaagccgaataaccaaatgccagtgactgtctctatagcaaacatggctgtgtcccctcctcctcccctccagatcagcccgcctcttcaccagcatctcaacatgcagcagcaccagccgctcaccatgcagcagccccttgggaaccagctccccatgcaggtccagtctgccttacactcacccaccatgcagcaaggatttactcttcaacccgactatcagactattatcaatcctacatctacagctgcacaagttgtcacccaggcaatggagtatgtgcgttcggggtgcagaaatcctcccccacaaccggtggactggaataacgactactgcagtagtgggggcatgcagagggacaaagcactgtaccttacttgagaatctgaacacctcttctttccactgaggaattcagggaagtgttttcaccatggattgctttgtacagtcaaggcagttctccattttattagaaaatacaagttgctaagcacttaggaccatttgagcttgtgggtcacccactctggaagaaatagtcatgcttctttattatttttttaatcctttatggacattgtttttcttcttccctgaaggaaatttggaccattcagattttatgttggttttttgctgtgaagtgctgcgctctagtaactgccttagcaactgtagatgtctcggataaaagtcctggattttccattggttttcataatgggtgtttatatgaaactactaaagactttttaaatggcttgatgtagcagtcatagcaagtttgtaaatagcatctatgttacactctcctagagtataaaatgtgaatgtttttgtagctaaattgtaattgaaactggctcattccagtttattgatttcacaataggggttaaattggcaaacattcatatttttacttcatttttaaaacaactgactgatagttctatattttcaaaatatttgaaaataaaaagtattcccaagtgattttaatttaaaaacaaattggctttgtctcattgatcagacaaaaagaaactagtattaagggaagcgcaaacacatttattttgtactgcagaaaaattgcttttttgtatcactttttgtgtaatggttagtaaatgtcatttaagtccttttatgtataaaactgccaaatgcttacctggtattttattagatgcagaaacagattggaaacagctaaattacaacttttacatatggctctgtcttattgtttcttcatactgtgtctgtatttaatctttttttatggaacctgttgcgcctatttatgaaataataaatataggtgtttgtaagtaaatttgttagtatttgaaagaggtttctttgatgttttaacttttgctggcaaaaaaaaattcacgcttggtgtgaatactttattatttagtttttacagtaacatgaataaagccaaacctgcttttcatttagcagcaaattaaagtaaccagtccttatttctgcatttctttggttgatgcaaacaaaaaactattatatttaagaactttatttcttcatacgacataacagaattgccctccaagtcacacaagctccaagactaaacaaacagacaggtcctctgtcttaaaaaggttacttcttggttctcagctggttctagtcaattctgaaccaccaccccccgccccccgcaaaaaagtaaaagtcaaaccaaacttcctcaagctgcatgcttttcacaaaatccagaaagcatttaagaattgaactaggggctggaagaagtgaaagggaagcatctaaaaatgaaaggtgagtaaccagatagcaaaagaaaagggaaagccatccaaatttgaaagctgttgatagaaattgagattcttgctgtcttttgtgcctctgcaagctactactcattccagaattcctgggtcttccaagaggattcttaaggtaccagagatttgctagggaaccaaaagtgcttgagaatctgcctgagggcttgcatagctttcacattaaaaaaagaaaaagctagcagatttactcctttttaggggatcatatcaagaaagttagtctggttggaaaccaagagaatggctgatgtctctttcttggaatatgtgaaataaatttagcagtttaactaaatacaaatatatgcattgtgtaatccactcagaattaaacagacaaaaggtatgcttgctttggaatgattttaggcattgtacaaccttgaatcacttgagcatgtaataactaataaataatgcagatccatgtgattattaaaatgactgtagctgagagctctaattttcctgtcttgaaactgtataagaactcatgtgattaagttcacagtttattgtttgtctgtttagtattttagaaatataccagcactactaattaactaatgtcttttatttattatattatgataaagtaaaaatttcacttgcattaagtctaaactgagaaggtaattactgggaggagaatgagcagctttgactttgacaggcggtttgtgcaggaaagcacagtgccgtgttgtttacagcttttctagagcagctgtgcgaccagggtagagagtgttgaaattcaataccaaatacagtaaaaacaaatgtaaataaaagaaaacacatcatcaataaaactgttattatgcgtg

SEQ ID NO: 1156 - protein, 526 aa, Homo sapien
MDVRFYPPPAQPAAAPDAPCLGPSPCLDPYYCNKFDGENMYMSMTEPSQDYVPASQSYPGPSLESEDFNIPPITPPSLPDHSLVHLNEVESGYHSLCHPMNHNGLLPFHPQNMDLPEITVSNMLGQDGTLLSNSISVMPDIRNPEGTQYSSHPQMAAMRPRGQPADIRQQPGMMPHGQLTTINQSQLSAQLGLNMGGSNVPHNSPSPPGSKSATPSPSSSVHEDEGDDTSKINGGEKRPASDMGKKPKTPKKKKKKDPNEPQKPVSAYALFFRDTQAAIKGQNPNATFGEVSKIVASMWDGLGEEQKQVYKKKTEAAKKEYLKQLAAYRASLVSKSYSEPVDVKTSQPPQLINSKPSVFHGPSQAHSALYLSSHYHQQPGMNPHLTAMHPSLPRNIAPKPNNQMPVTVSIANMAVSPPPPLQISPPLHQHLNMQQHQPLTMQQPLGNQLPMQVQSALHSPTMQQGFTLQPDYQTIINPTSTAAQVVTQAMEYVRSGCRNPPPQPVDWNNDYCSSGGMQRDKALYLT

SEQ ID NO: 1157 - DNA, 1172 bp, Homo sapien
gagacattcctcaattgcttagacatattctgagcctacagcagaggaacctccagtctcagcaccatgaatcaaactgcgattctgatttgctgccttatctttctgactctaagtggcattcaaggagtacctctctctagaaccgtacgctgtacctgcatcagcattagtaatcaacctgttaatccaaggtctttagaaaaacttgaaattattcctgcaagccaattttgtccacgtgttgagatcattgctacaatgaaaaagaagggtgagaagagatgtctgaatccagaatcgaaggccatcaagaatttactgaaagcagttagcaaggaaatgtctaaaagatctccttaaaaccagaggggagcaaaatcgatgcagtgcttccaaggatggaccacacagaggctgcctctcccatcacttccctacatggagtatatgtcaagccataattgttcttagtttgcagttacactaaaaggtgaccaatgatggtcaccaaatcagctgctactactcctgtaggaaggttaatgttcatcatcctaagctattcagtaataactctaccctggcactataatgtaagctctactgaggtgctatgttcttagtggatgttctgaccctgcttcaaatatttccctcacctttcccatcttccaagggtactaaggaatctttctgctttggggtttatcagaattctcagaatctcaaataactaaaaggtatgcaatcaaatctgctttttaaagaatgctctttacttcatggacttccactgccatcctcccaaggggcccaaattctttcagtggctacctacatacaattccaaacacatacaggaaggtagaaatatctgaaaatgtatgtgtaagtattcttatttaatgaaagactgtacaaagtataagtcttagatgtatatatttcctatattgttttcagtgtacatggaataacatgtaattaagtactatgtatcaatgagtaacaggaaaattttaaaaatacagatagatatatgctctgcatgttacataagataaatgtgctgaatggttttcaaataaaaatgaggtactctcctggaaatattaagaaagactatctaaatgttgaaagatcaaaaggttaataaagtaattataact

SEQ ID NO: 1158 - protein, 98 aa, Homo sapien
MNQTAILICCLIFLTLSGIQGVPLSRTVRCTCISISNQPVNPRSLEKLEIIPASQFCPRVEIIATMKKKGEKRCLNPESKAIKNLLKAVSKEMSKRSP

SEQ ID NO: 1159 - DNA, 2324 bp, Homo sapien
ctccctttgggcaaggacctgagacccttgtgctaagtcaagaggctcaatgggctgcagaagaactagagaaggaccaagcaaagccatgatatttccatggaaatgtcagagcacccagagggacttatggaacatcttcaagttgtgggggtggacaatgctctgttgtgatttcctggcacatcatggaaccgactgctggacttaccattattctgaaaaacccatgaactggcaaagggctagaagattctgccgagacaattacacagatttagttgccatacaaaacaaggcggaaattgagtatctggagaagactctgcctttcagtcgttcttactactggataggaatccggaagataggaggaatatggacgtgggtgggaaccaacaaatctcttactgaagaagcagagaactggggagatggtgagcccaacaacaagaagaacaaggaggactgcgtggagatctatatcaagagaaacaaagatgcaggcaaatggaacgatgacgcctgccacaaactaaaggcagccctctgttacacagcttcttgccagccctggtcatgcagtggccatggagaatgtgtagaaatcatcaataattacacctgcaactgtgatgtggggtactatgggccccagtgtcagtttgtgattcagtgtgagcctttggaggccccagagctgggtaccatggactgtactcaccctttgggaaacttcagcttcagctcacagtgtgccttcagctgctctgaaggaacaaacttaactgggattgaagaaaccacctgtggaccatttggaaactggtcatctccagaaccaacctgtcaagtgattcagtgtgagcctctatcagcaccagatttggggatcatgaactgtagccatcccctggccagcttcagctttacctctgcatgtaccttcatctgctcagaaggaactgagttaattgggaagaagaaaaccatttgtgaatcatctggaatctggtcaaatcctagtccaatatgtcaaaaattggacaaaagtttctcaatgattaaggagggtgattataaccccctcttcattccagtggcagtcatggttactgcattctctgggttggcatttatcatttggctggcaaggagattaaaaaaaggcaagaaatccaagagaagtatgaatgacccatattaaatcgcccttggtgaaagaaaattcttggaatactaaaaatcatgagatcctttaaatccttccatgaaacgttttgtgtggtggcacctcctacgtcaaacatgaagtgtgtttccttcagtgcatctgggaagatttctacctgaccaacagttccttcagcttccatttcgcccctcatttatccctcaacccccagcccacaggtgtttatacagctcagctttttgtcttttctgaggagaaacaaataagaccataaagggaaaggattcatgtggaatataaagatggctgactttgctctttcttgactcttgttttcagtttcaattcagtgctgtacttgatgacagacacttctaaatgaagtgcaaatttgatacatatgtgaatatggactcagttttcttgcagatcaaatttcacgtcgtcttctgtatactgtggaggtacactcttatagaaagttcaaaaagtctacgctctcctttctttctaactccagtgaagtaatggggtcctgctcaagttgaaagagtcctatttgcactgtagcctcgccgtctgtgaattggaccatcctatttaactggcttcagcctccccaccttcttcagccacctctctttttcagttggctgacttccacacctagcatctcatgagtgccaagcaaaaggagagaagagagaaatagcctgcgctgttttttagtttgggggttttgctgtttccttttatgagacccattcctatttcttatagtcaatgtttcttttatcacgatattattagtaagaaaacatcactgaaatgctagctgcaagtgacatctctttgatgtcatatggaagagttaaaacaggtggagaaattccttgattcacaatgaaatgctctcctttcccctgcccccagaccttttatccacttacctagattctacatattctttaaatttcatctcaggcctccctcaaccccaccacttcttttataactagtcctttactaatccaacccatgatgagctcctcttcctggcttcttactgaaaggttaccctgtaacatgcaattttgcatttgaataaagcctgctttttaagtgttaa

SEQ ID NO: 1160 - protein, 372 aa, Homo sapien [sequence omitted]

SEQ ID NO: 1161 - DNA, 2930 bp, Homo sapien
gaattccggtttcttcctaaaaaatgtctgatggccgctttctcggtcggcaccgccatgaatgccagcagttactctgcagagatgacggagcccaagtcggtgtgtgtctcggtggatgaggtggtgtccagcaacatggaggccactgagacggacctgctgaatggacatctgaaaaaagtagataataacctcacggaagcccagcgcttctcctccttgcctcggagggcagctgtgaacattgaattcagggacctttcctattcggttcctgaaggaccctggtggaggaagaaaggatacaagaccctcctgaaaggaatttccgggaagttcaatagtggtgagttggtggccattatgggtccttccggggccgggaagtccacgctgatgaacatcctggctggatacagggagacgggcatgaagggggccgtcctcatcaacggcctgccccgggacctgcgctgcttccggaaggtgtcctgctacatcatgcaggatgacatgctgctgccgcatctcactgtgcaggaggccatgatggtgtcggcacatctgaagcttcaggagaaggatgaaggcagaagggaaatggtcaaggagatactgacagcgctgggcttgctgtcttgcgccaacacgcggaccgggagcctgtcaggtggtcagcgcaagcgcctggccatcgcgctggagctggtgaacaaccctccagtcatgttcttcgatgagcccaccagcggcctggacagcgcctcctgcttccaggtggtctcgctgatgaaagggctcgctcaagggggtcgctccatcatttgcaccatccaccagcccagcgccaaactcttcgagctgttcgaccagctttacgtcctgagtcaaggacaatgtgtgtaccggggaaaagtctgcaatcttgtgccatatttgagggatttgggtctgaactgcccaacctaccacaacccagcagattttgtcatggaggttgcatccggcgagtacggtgatcagaacagtcggctggtgagagcggttcgggagggcatgtgtgactcagaccacaagagagacctcgggggtgatgccgaggtgaacccttttctttggcaccgcccctctgaagaggtaaagcagacaaaacgattaaaggggttgagaaaggactcctcgtccatggaaggctgccacagcttctctgccagctgcctcacgcagttctgcatcctcttcaagaggaccttcctcagcatcatgagggactcggtcctgacacacctgcgcatcacctcgcacattgggatcggcctcctcattggcctgctgtacttggggatcgggaacgaaaccaagaaggtcttgagcaactccggcttcctcttcttctccatgctgttcctcatgttcgcggccctcatgcctactgttctgacatttcccctggagatgggagtctttcttcgggaacacctgaactactggtacagcctgaaggcctactacctggccaagaccatggcagacgtgccctttcagatcatgttcccagtggcctactgcagcatcgtgtactggatgacgtcgcagccgtccgacgccgtgcgctttgtgctgtttgccgcgctgggcaccatgacctccctggtggcacagtccctgggcctgctgatcggagccgcctccacgtccctgcaggtggccactttcgtgggcccagtgacagccatcccggtgctcctgttctcggggttcttcgtcagcttcgacaccatccccacgtacctacagtggatgtcctacatctcctatgtcaggtatgggttcgaaggggtcatcctctccatctatggcttagaccgggaagatctgcactgtgacatcgacgagacgtgccacttccagaagtcggaggccatcctgcgggagctggacgtggaaaatgccaagctgtacctggacttcatcgtactcgggattttcttcatctccctccgcctcattgcctatttggtcctcaggtacaaaatccgggcagagaggtaaaacacctgaatgccaggaaacaggaagattagacactgtggccgagggcacgtctagaatcgaggaggcaagcctgtgcccgaccgacgacacagagactcttctgatccaacccctagaaccgcgttgggtttgtgggtgtctcgtgctcagccactctgcccagctgggttggatcttctctccattcccctttctagctttaactaggaagatgtaggcagattggtggttttttttttttttttaacatacagaattttaaataccacaactggggcagaatttaaagctgcaacacagctggtgatgagaggcttcctcagtccagtcgctccttagcaccaggcaccgtgggtcctggatggggaactgcaagcagcctctcagctgatggctgcacagtcagatgtctggtggcagagagtccgagcatggagcgattccattttatgactgttgtttttcacattttcatctttctaaggtgtgtctcttttccaatgagaagtcatttttgcaagccaaaagtcgatcaatcgcattcattttaagaaattatacctttttagtacttgctgaagaatgattcagggtaaatcacatactttgtttagagaggcgaggggtttaacccgagtcacccagctggtctcatacatagacagcacttgtgaaggattgaatgcaggttccaggtggagggaagacgtggacaccatctccactgagccatgcagacatttttaaaagctatacacaaaattgtgagaagacattggccaactctttcaaagtctttctttttccacgtgcttcttattttaagcgaaatatattgtttgtttcttcctaaaaaaaaaaaaaaaaaaaaa

SEQ ID NO: 1162 - protein, 674 aa, Homo sapien
MAAFSVGTAMNASSYSAEMTEPKSVCVSVDEVVSSNMEATETDLLNGHLKKVDNNLTEAQRFSSLPRRAAVNIEFRDLSYSVPEGPWWRKKGYKTLLKGISGKFNSGELVAIMGPSGAGKSTLMNILAGYRETGMKGAVLINGLPRDLRCFRKVSCYIMQDDMLLPHLTVQEAMMVSAHLKLQEKDEGRREMVKEILTALGLLSCANTRTGSLSGGQRKRLAIALELVNNPPVMFFDEPTSGLDSASCFQVVSLMKGLAQGGRSIICTIHQPSAKLFELFDQLYVLSQGQCVYRGKVCNLVPYLRDLGLNCPTYHNPADFVMEVASGEYGDQNSRLVRAVREGMCDSDHKRDLGGDAEVNPFLWHRPSEEVKQTKRLKGLRKDSSSMEGCHSFSASCLTQFCILFKRTFLSIMRDSVLTHLRITSHIGIGLLIGLLYLGIGNETKKVLSNSGFLFFSMLFLMFAALMPTVLTFPLEMGVFLREHLNYWYSLKAYYLAKTMADVPFQIMFPVAYCSIVYWMTSQPSDAVRFVLFAALGTMTSLVAQSLGLLIGAASTSLQVATFVGPVTAIPVLLFSGFFVSFDTIPTYLQWMSYISYVRYGFEGVILSIYGLDREDLHCDIDETCHFQKSEAILRELDVENAKLYLDFIVLGIFFISLRLIAYLVLRYKIRAER

SEQ ID NO: 1163 - DNA, 911 bp, Homo sapien
cccacgcgtccggtcagagctggagggccgggcaccgcggccatggagggtcaacgctggctgccgctggaggccaatcccgaggtcaccaaccagtttcttaaacaattaggtctacatcctaactggcaattcgttgatgtatatggaatggatcctgaactccttagcatggtaccaagaccagtctgtgcagtcttacttctctttcctattacagaaaagtatgaagtattcagaacagaagaggaagaaaaaataaaatctcagggacaagatgttacatcatcagtatatttcatgaagcaaacaatcagcaatgcctgtggaacaattggactgattcatgctattgcaaacaataaagacaagatgcactttgaatctggatcaaccttgaaaaaattcctggaggaatctgtgtcaatgagccctgaagaacgagccagatacctggagaactatgatgccatccgagttactcatgagaccagtgcccatgaaggtcagactgaggcaccaagtatagatgagaaagtagatcttcattttattgcattagttcatgtagatgggcatctctatgaattagatgggcggaagccatttccaattaaccatggtgaaactagtgatgaaactttattagaggatgccatagaagtttgcaagaagtttatggagcgcgaccctgatgaactaagatttaatgcgattgctctttctgcagcatagcttgtcaataatggaaacaccaaaaactgtattatttgcaactaaattttctctgccatacactaactcaaaaattttgatattttcattaacttgatgattaaactttatgtgagttaaaaaaaaaaaaaaaaaaaaaaaaaaaaaaaaaaaaaaaaaaaaaaaaaaaaaaaaaa

SEQ ID NO: 1164 - protein, 230 aa, Homo sapien
MEGQRWLPLEANPEVTNQFLKQLGLHPNWQFVDVYGMDPELLSMVPRPVCAVLLLFPITEKYEVFRTEEEEKIKSQGQDVTSSVYFMKQTISNACGTIGLIHAIANNKDKMHFESGSTLKKFLEESVSMSPEERARYLENYDAIRVTHETSAHEGQTEAPSIDEKVDLHFIALVHVDGHLYELDGRKPFPINHGETSDETLLEDAIEVCKKFMERDPDELRFNAIALSAA

SEQ ID NO: 1165 - DNA, 3447 bp, Homo sapien
ggccagtccgcccggcggctcgcgcacggctccgcggtcccttttgcctgtccagccggccgcctgtccctgctccctccctccgtgaggtgtccgggttcccttcgcccagctctcccacccctacccgaccccggcgcccgggctcccagagggaactgcacttcggcagagttgaatgaatgaagagagacgcggagaactcctaaggaggagattggacaggctggactccccattgcttttctaaaaatcttggaaactttgtccttcattgaattacgacactgtccacctttaatttcctcgaaaacgcctgtaactcggctgaagccatgccttgtgttcaggcgcagtatgggtcctcgcctcaaggagccagccccgcttctcagagctacagttaccactcttcgggagaatacagctccgatttcttaactccagagtttgtcaagtttagcatggacctcaccaacactgaaatcactgccaccacttctctccccagcttcagtacctttatggacaactacagcacaggctacgacgtcaagccaccttgcttgtaccaaatgcccctgtccggacagcagtcctccattaaggtagaagacattcagatgcacaactaccagcaacacagccacctgcccccccagtctgaggagatgatgccgcactccgggtcggtttactacaagccctcctcgcccccgacgcccaccaccccgggcttccaggtgcagcacagccccatgtgggacgacccgggatctctccacaacttccaccagaactacgtggccactacgcacatgatcgagcagaggaaaacgccagtctcccgcctctccctcttctcctttaagcaatcgccccctggcaccccggtgtctagttgccagatgcgcttcgacgggcccctgcacgtccccatgaacccggagcccgccggcagccaccacgtggtggacgggcagaccttcgctgtgcccaaccccattcgcaagcccgcgtccatgggcttcccgggcctgcagatcggccacgcgtctcagctgctcgacacgcaggtgccctcaccgccgtcgcggggctccccctccaacgaggggctgtgcgctgtgtgtggggacaacgcggcctgccaacactacggcgtgcgcacctgtgagggctgcaaaggcttctttaagcgcacagtgcaaaaaaatgcaaaatacgtgtgtttagcaaataaaaactgcccagtggacaagcgtcgccggaatcgctgtcagtactgccgatttcagaagtgcctggctgttgggatggtcaaagaagtggttcgcacagacagtttaaaaggccggagaggtcgtttgccctcgaaaccgaagagcccacaggagccctctcccccttcgcccccggtgagtctgatcagtgccctcgtcagggcccatgtcgactccaacccggctatgaccagcctggactattccaggttccaggcgaaccctgactatcaaatgagtggagatgacacccagcatatccagcaattctatgatctcctgactggctccatggagatcatccggggctgggcagagaagatccctggcttcgcagacctgcccaaagccgaccaagacctgctttttgaatcagctttcttagaactgtttgtccttcgattagcatacaggtccaacccagtggagggtaaactcatcttttgcaatggggtggtcttgcacaggttgcaatgcgttcgtggctttggggaatggattgattccattgttgaattctcctccaacttgcagaatatgaacatcgacatttctgccttctcctgcattgctgccctggctatggtcacagagagacacgggctcaaggaacccaagagagtggaagaactgcaaaacaagattgtaaattgtctcaaagaccacgtgactttcaacaatggggggttgaaccgccccaattatttgtccaaactgttggggaagctcccagaacttcgtaccctttgcacacaggggctacagcgcattttctacctgaaattggaagacttggtgccaccgccagcaataattgacaaacttttcctggacactttacctttctaagacctcctcccaagcacttcaaaggaactggaatgataatggaaactgtcaagagggggcaagtcacatgggcagagatagccgtgtgagcagtctcagctcaagctgccccccatttctgtaaccctcctagcccccttgatccctaaagaaaacaaacaaacaaacaaaaactgttgctatttcctaacctgcaggcagaacctgaaagggcattttggctccggggcatcctggatttagaacatggactacacacaatacagtggtataaactttttattctcagtttaaaaatcagtttgttgttcagaagaaagattgctataatgtataatgggaaatgtttggccatgcttggttgttgcagttcagacaaatgtaacacacacacacatacacacacacacacacacacagagacacatcttaaggggacccacaagtattgccctttaacaagacttcaaagttttctgctgtaaagaaagctgtaatatatagtaaaactaaatgttgcgtgggtggcatgagttgaagaaggcaaaggcttgtaaatttacccaatgcagtttggctttttaaattattttgtgcctatttatgaataaatattacaaattctaaaagataagtgtgtttgcaaaaaaaaagaaaataaatacataaaaaagggacaagcatgttgattctaggttgaaaatgttataggcacttgctacttcagtaatgtctatattatataaatagtatttcagacactatgtagtctgttagattttataaagattggtagttatctgagcttaaacattttctcaattgtaaaataggtgggcacaagtattacacatcagaaaatcctgacaaaagggacacatagtgtttgtaacaccgtccaacattccttgtttgtaagtgttgtatgtaccgttgatgttgataaaaagaaagtttatatcttgattattttgttgtctaaagctaaacaaaacttgcatgcagcagcttttgactgtttccagagtgcttataatatacataactccctggaaataactgagcactttgaattttttttatgtctaaaattgtcagttaatttattattttgtttgagtaagaattttaatattgccatattctgtagtatttttctttgtatatttctagtatggcacatgatatgagtcactgcctttttttctatggtgtatgacagttagagatgctgattttttttctgataaattctttctttgagaaagacaattttaatgtttacaacaataaaccatgtaaatgaaaaaaaaaa

SEQ ID NO: 1166 - protein, 598 aa, Homo sapien
MPCVQAQYGSSPQGASPASQSYSYHSSGEYSSDFLTPEFVKFSMDLTNTEITATTSLPSFSTFMDNYSTGYDVKPPCLYQMPLSGQQSSIKVEDIQMHNYQQHSHLPPQSEEMMPHSGSVYYKPSSPPTPTTPGFQVQHSPMWDDPGSLHNFHQNYVATTHMIEQRKTPVSRLSLFSFKQSPPGTPVSSCQMRFDGPLHVPMNPEPAGSHHVVDGQTFAVPNPIRKPASMGFPGLQIGHASQLLDTQVPSPPSRGSPSNEGLCAVCGDNAACQHYGVRTCEGCKGFFKRTVQKNAKYVCLANKNCPVDKRRRNRCQYCRFQKCLAVGMVKEVVRTDSLKGRRGRLPSKPKSPQEPSPPSPPVSLISALVRAHVDSNPAMTSLDYSRFQANPDYQMSGDDTQHIQQFYDLLTGSMEIIRGWAEKIPGFADLPKADQDLLFESAFLELFVLRLAYRSNPVEGKLIFCNGVVLHRLQCVRGFGEWIDSIVEFSSNLQNMNIDISAFSCIAALAMVTERHGLKEPKRVEELQNKIVNCLKDHVTFNNGGLNRPNYLSKLLGKLPELRTLCTQGLQRIFYLKLEDLVPPPAIIDKLFLDTLPF

SEQ ID NO: 1167 - DNA, 3269 bp, Homo sapien
ggccagtccgcccggcggctcgcgcacggctccgcggtcccttttgcctgtccagccggccgcctgtccctgctccctccctccgtgaggtgtccgggttcccttcgcccagctctcccacccctacccgaccccggcgcccgggctcccagagggaactgcacttcggcagagttgaatgaatgaagacagacgcggagaactcctaaggaggagattggacaggctggactccccattgcttttctaaaaatcttggaaactttgtccttcattgaattacgacactgtccacctttaatttcctcgaaaacgcctgtaactcggctgaagcttcagtacctttatggacaactacagcacaggctacgacgtcaagccaccttgcttgtaccaaatgcccctgtccggacagcagtcctccattaaggtagaagacattcagatgcacaactaccagcaacacagccacctgcccccccagtctgaggagatgatgccgcactccgggtcggtttactacaagccctcctcgcccccgacgcccaccaccccgggcttccaggtgcagcacagccccatgtgggacgacccgggatctctccacaacttccaccagaactacgtggccactacgcacatgatcgagcagaggaaaacgccagtctcccgcctctccctcttctcctttaagcaatcgccccctggcaccccggtgtctagttgccagatgcgcttcgacgggcccctgcacgtccccatgaacccggagcccgccggcagccaccacgtggtggacgggcagaccttcgctgtgcccaaccccattcgcaagcccgcgtccatgggcttcccgggcctgcagatcggccacgcgtctcagctgctcgacacgcaggtgccctcaccgccgtcgcggggctccccctccaacgaggggctgtgcgctgtgtgtggggacaacgcggcctgccaacactacggcgtgcgcacctgtgagggctgcaaaggcttctttaagcgcacagtgcaaaaaaatgcaaaatacgtgtgtttagcaaataaaaactgcccagtggacaagcgtcgccggaatcgctgtcagtactgccgatttcagaagtgcctggctgttgggatggtcaaagaagtggttcgcacagacagtttaaaaggccggagaggtcgtttgccctcgaaaccgaagagcccacaggagccctctcccccttcgcccccggtgagtctgatcagtgccctcgtcagggcccatgtcgactccaacccggctatgaccagcctggactattccaggttccaggcgaaccctgactatcaaatgagtggagatgacacccagcatatccagcaattctatgatctcctgactggctccatggagatcatccggggctgggcagagaagatccctggcttcgcagacctgcccaaagccgaccaagacctgctttttgaatcagctttcttagaactgtttgtccttcgattagcatacaggtccaacccagtggagggtaaactcatcttttgcaatggggtggtcttgcacaggttgcaatgcgttcgtggctttggggaatggattgattccattgttgaattctcctccaacttgcagaatatgaacatcgacatttctgccttctcctgcattgctgccctggctatggtcacagagagacacgggctcaaggaacccaagagagtggaagaactgcaaaacaagattgtaaattgtctcaaagaccacgtgactttcaacaatggggggttgaaccgccccaattatttgtccaaactgttggggaagctcccagaacttcgtaccctttgcacacaggggctacagcgcattttctacctgaaattggaagacttggtgccaccgccagcaataattgacaaacttttcctggacactttacctttctaagacctcctcccaagcacttcaaaggaactggaatgataatggaaactgtcaagagggggcaagtcacatgggcagagatagccgtgtgagcagtctcagctcaagctgccccccatttctgtaaccctcctagcccccttgatccctaaagaaaacaaacaaacaaacaaaaactgttgctatttcctaacctgcaggcagaacctgaaagggcattttggctccggggcatcctggatttagaacatggactacacacaatacagtggtataaactttttattctcagtttaaaaatcagtttgttgttcagaagaaagattgctataatgtataatgggaaatgtttggccatgcttggttgttgcagttcagacaaatgtaacacacacacacatacacacacacacacacacacagagacacatcttaaggggacccacaagtattgccctttaacaagacttcaaagttttctgctgtaaagaaagctgtaatatatagtaaaactaaatgttgcgtgggtggcatgagttgaagaaggcaaaggcttgtaaatttacccaatgcagtttggctttttaaattattttgtgcctatttatgaataaatattacaaattctaaaagataagtgtgtttgcaaaaaaaaagaaaataaatacataaaaaagggacaagcatgttgattctaggttgaaaatgttataggcacttgctacttcagtaatgtctatattatataaatagtatttcagacactatgtagtctgttagattttataaagattggtagttatctgagcttaaacattttctcaattgtaaaataggtgggcacaagtattacacatcagaaaatcctgacaaaagggacacatagtgtttgtaacaccgtccaacattccttgtttgtaagtgttgtatgtaccgttgatgttgataaaaagaaagtttatatcttgattattttgttgtctaaagctaaacaaaacttgcatgcagcagcttttgactgtttccagagtgcttataatatacataactccctggaaataactgagcactttgaattttttttatgtctaaaattgtcagttaatttattattttgtttgagtaagaattttaatattgccatattctgtagtatttttctttgtatatttctagtatggcacatgatatgagtcactgcctttttttctatggtgtatgacagttagagatgctgattttttttctgataaattctttctttgagaaagacaattttaatgtttacaacaataaaccatgtaaatgaaaaaaaaaa

SEQ ID NO: 1168 - protein, 535 aa, Homo sapien
MDNYSTGYDVKPPCLYQMPLSGQQSSIKVEDIQMHNYQQHSHLPPQSEEMMPHSGSVYYKPSSPPTPTTPGFQVQHSPMWDDPGSLHNFHQNYVATTHMIEQRKTPVSRLSLFSFKQSPPGTPVSSCQMRFDGPLHVPMNPEPAGSHHVVDGQTFAVPNPIRKPASMGFPGLQIGHASQLLDTQVPSPPSRGSPSNEGLCAVCGDNAACQHYGVRTCEGCKGFFKRTVQKNAKYVCLANKNCPVDKRRRNRCQYCRFQKCLAVGMVKEVVRTDSLKGRRGRLPSKPKSPQEPSPPSPPVSLISALVRAHVDSNPAMTSLDYSRFQANPDYQMSGDDTQHIQQFYDLLTGSMEIIRGWAEKIPGFADLPKADQDLLFESAFLELFVLRLAYRSNPVEGKLIFCNGVVLHRLQCVRGFGEWIDSIVEFSSNLQNMNIDISAFSCIAALAMVTERHGLKEPKRVEELQNKIVNCLKDHVTFNNGGLNRPNYLSKLLGKLPELRTLCTQGLQRIFYLKLEDLVPPPAIIDKLFLDTLPF

SEQ ID NO: 1169 - DNA, 1413 bp, Homo sapien
agggaataaaggctcagggaccggcagttctactctagagcccaccagcctctcagagcctccggtgactggcctgtgtctccccctggatggacatgtggacggcgctgctcatcctgcaagccttgttgctaccctccctggctgatggtgccacccctgccctgcgctttgtagccgtgggtgactggggaggggtccccaatgccccattccacacggcccgggaaatggccaatgccaaggagatcgctcggactgtgcagatcctgggtgcagacttcatcctgtctctaggggacaatttttacttcactggtgtgcaagacatcaatgacaagaggttccaggagacctttgaggacgtattctctgaccgctcccttcgcaaagtgccctggtacgtgctagccggaaaccatgaccaccttggcaatgtctctgcccagattgcatactctaagatctccaagcgctggaacttccccagccctttctaccgcctgcacttcaagatcccacagaccaatgtgtctgtggccatttttatgctggacacagtgacactatgtggcaactcagatgacttcctcagccagcagcctgagaggccccgagacgtgaagctggcccgcacacagctgtcctggctcaagaaacagctggcggcggccagggaggactacgtgctggtggctggccactaccccgtgtggtccatagccgagcacgggcctacccactgcctggtcaagcagctacggccactgctggccacatacggggtcactgcctacctgtgcggccacgatcacaatctgcagtacctgcaagatgagaatggcgtgggctacgtgctgagtggggctgggaatttcatggacccctcaaagcggcaccagcgcaaggtccccaacggctatctgcgcttccactatgggactgaagactcactgggtggctttgcctatgtggagatcagctccaaagagatgactgtcacttacatcgaggcctcgggcaagtccctctttaagaccaggctgccgaggcgagccaggccctgaactcccatgactgcccagctctgaggcccgatctccactgttgggtgggtggcctgccgggaccctgctcacaggcaggcttttcctccaacctgtggcgctgcagcagggcaggaaggggaaacacagctgatgaactgtggtgccacatgacccttgtggcacagatgcccacgtatgtgaaacacacatggacatgtgtcccagccacagtgttatgctctgtggctggctcacctttgctgagttccggggtgcaatgggggagggagggagggaaagcttcctcctaaatcaagcatctttctgttactgatgttcaataaaagaatagttgccaaggctg

SEQ ID NO: 1170 - protein, 325 aa, Homo sapien
MDMWTALLILQALLLPSLADGATPALRFVAVGDWGGVPNAPFHTAREMANAKEIARTVQILGADFILSLGDNFYFTGVQDINDKRFQETFEDVFSDRSLRKVPWYVLAGNHDHLGNVSAQIAYSKISKRWNFPSPFYRLHFKIPQTNVSVAIFMLDTVTLCGNSDDFLSQQPERPRDVKLARTQLSWLKKQLAAAREDYVLVAGHYPVWSIAEHGPTHCLVKQLRPLLATYGVTAYLCGHDHNLQYLQDENGVGYVLSGAGNFMDPSKRHQRKVPNGYLRFHYGTEDSLGGFAYVEISSKEMTVTYIEASGKSLFKTRLPRRARP

SEQ ID NO: 1171 - DNA, 1497 bp, Homo sapien
accgctggccccagggaaagccgagcggccaccgagccggcagagacccaccgagcggcggcggagggagcagcgccggggcgcacgagggcaccatggcccagacgcccgccttcgacaagcccaaagtagaactgcatgtccacctagacggatccatcaagcctgaaaccatcttatactatggcaggaggagagggatcgccctcccagctaacacagcagaggggctgctgaacgtcattggcatggacaagccgctcacccttccagacttcctggccaaatttgactactacatgcctgctatcgcgggctgccgggaggctatcaaaaggatcgcctatgagtttgtagagatgaaggccaaagagggcgtggtgtatgtggaggtgcggtacagtccgcacctgctggccaactccaaagtggagccaatcccctggaaccaggctgaaggggacctcaccccagacgaggtggtggccctagtgggccagggcctgcaggagggggagcgagacttcggggtcaaggcccggtccatcctgtgctgcatgcgccaccagcccaactggtcccccaaggtggtggagctgtgtaagaactaccagcagcagaccgtggtagccattgacctggctggagatgagaccatcccaggaagcagcctcttgcctggacatgtccaggcctaccaggaggctgtgaagagcggcattcaccgtactgtccacgccggggaggtgggctcggccgaagtagtaaaagaggctgtggacatactcaagacagagcggctgggacacggctaccacaccctggaagaccaggccctttataacaggctgcggcaggaaaacatgcacttcgagatctgcccctggtccagctacctcactggtgcctggaagccggacacggagcatgcagtcattcggctcaaaaatgaccaggctaactactcgctcaacacagatgacccgctcatcttcaagtccaccctggacactgattaccagatgaccaaacgggacatgggctttactgaagaggagtttaaaaggctgaacatcaatgcggccaaatctagtttcctcccagaagatgaaaagagggagcttctcgacctgctctataaagcctatgggatgccaccttcagcctctgcagggcagaacctctgaagacgccactcctccaagccttcaccctgtggagtcaccccaactctgtggggctgagcaacatttttacatttattccttccaagaagaccatgatctcaatagtcagttactgatgctcctgaaccctatgtgtccatttctgcacacacgtatacctcggcatggccgcgtcacttctctgattatgtgccctggcagggaccagcgcccttgcacatgggcatggttgaatctgaaaccctccttctgtggcaacttgtactgaaaatctggtgctcaataaagaagcccatggctggtggcatgc

SEQ ID NO: 1172 - protein, 363 aa, Homo sapien
MAQTPAFDKPKVELHVHLDGSIKPETILYYGRRRGIALPANTAEGLLNVIGMDKPLTLPDFLAKFDYYMPAIAGCREAIKRIAYEFVEMKAKEGVVYVEVRYSPHLLANSKVEPIPWNQAEGDLTPDEVVALVGQGLQEGERDFGVKARSILCCMRHQPNWSPKVVELCKNYQQQTVVAIDLAGDETIPGSSLLPGHVQAYQEAVKSGIHRTVHAGEVGSAEVVKEAVDILKTERLGHGYHTLEDQALYNRLRQENMHFEICPWSSYLTGAWKPDTEHAVIRLKNDQANYSLNTDDPLIFKSTLDTDYQMTKRDMGFTEEEFKRLNINAAKSSFLPEDEKRELLDLLYKAYGMPPSASAGQNL

SEQ ID NO: 1173 - DNA, 2119 bp, Homo sapien
ggcacgagtaggggtggcgggtcagtgctgctcgggggcttctccatccaggtccctggagttcctggtccctggagctccgcacttggcgcgcaacctgcgtgaggcagcgcgactctggcgactggccggccatgccttcccgggctgaggactatgaagtgttgtacaccattggcacaggctcctacggccgctgccagaagatccggaggaagagtgatggcaagatattagtttggaaagaacttgactatggctccatgacagaagctgagaaacagatgcttgtttctgaagtgaatttgcttcgtgaactgaaacatccaaacatcgttcgttactatgatcggattattgaccggaccaatacaacactgtacattgtaatggaatattgtgaaggaggggatctggctagtgtaattacaaagggaaccaaggaaaggcaatacttagatgaagagtttgttcttcgagtgatgactcagttgactctggccctgaaggaatgccacagacgaagtgatggtggtcataccgtattgcatcgggatcttaaaccagccaatgttttcctggatggcaagcaaaacgtcaagcttggagactttgggctagctagaatattaaaccatgacacgagttttgcaaaaacatttgttggcacaccttattacatgtctcctgaacaaatgaatcgcatgtcctacaatgagaaatcagatatctggtcattgggctgcttgctgtatgagttatgtgcattaatgcctccatttacagcttttagccagaaagaactcgctgggaaaatcagagaaggcaaattcaggcgaattccataccgttactctgatgaattgaatgaaattattacgaggatgttaaacttaaaggattaccatcgaccttctgttgaagaaattcttgagaaccctttaatagcagatttggttgcagacgagcaaagaagaaatcttgagagaagagggcgacaattaggagagccagaaaaatcgcaggattccagccctgtattgagtgagctgaaactgaaggaaattcagttacaggagcgagagcgagctctcaaagcaagagaagaaagattggagcagaaagaacaggagctttgtgttcgtgagagactagcagaggacaaactggctagagcagaaaatctgttgaagaactacagcttgctaaaggaacggaagttcctgtctctggcaagtaatccagaacttcttaatcttccatcctcagtaattaagaagaaagttcatttcagtggggaaagtaaagagaacatcatgaggagtgagaattctgagagtcagctcacatctaagtccaagtgcaaggacctgaagaaaaggcttcacgctgcccagctgcgggctcaagccctgtcagatattgagaaaaattaccaactgaaaagcagacagatcctgggcatgcgctagccaggtagagagacacagagctgtgtacaggatgtaatattaccaacctttaaagactgatattcaaatgctgtagtgttgaatacttggccccatgagccatgcctttctgtatagtacacatgatatttcggaattggttttactgttcttcagcaactattgtacaaaatgttcacatttaatttttctttcttcttttaagaacatattataaaaagaatactttcttggttgggcttttaatcctgtgtgtgattactagtaggaacatgagatgtgacattctaaatcttgggagaaaaaataatattaggaaaaaaatatttatgcaggaagagtagcactcactgaatagttttaaatgactgagtggtatgcttacaattgtcatgtctagatttaaattttaagtctgagattttaaatgtttttgagcttagaaaacccagttagatgcaatttggtcattaataccatgacatcttgcttataaatattccattgctctgtagttcaaatctgttagctttgtgaaaattcatcactgtgatgtttgtattctttttttttttctgtttaacagaatatgagctgtctgtcatttacctacttctttcccactaaataaaagaattcttcagtta

SEQ ID NO: 1174 - protein, 445 aa, Homo sapien
MPSRAEDYEVLYTIGTGSYGRCQKIRRKSDGKILVWKELDYGSMTEAEKQMLVSEVNLLRELKHPNIVRYYDRIIDRTNTTLYIVMEYCEGGDLASVITKGTKERQYLDEEFVLRVMTQLTLALKECHRRSDGGHTVLHRDLKPANVFLDGKQNVKLGDFGLARILNHDTSFAKTFVGTPYYMSPEQMNRMSYNEKSDIWSLGCLLYELCALMPPFTAFSQKELAGKIREGKFRRIPYRYSDELNEIITRMLNLKDYHRPSVEEILENPLIADLVADEQRRNLERRGRQLGEPEKSQDSSPVLSELKLKEIQLQERERALKAREERLEQKEQELCVRERLAEDKLARAENLLKNYSLLKERKFLSLASNPELLNLPSSVIKKKVHFSGESKENIMRSENSESQLTSKSKCKDLKKRLHAAQLRAQALSDIEKNYQLKSRQILGMR

SEQ ID NO: 1175 - DNA, 4407 bp, Homo sapien
tttcgactcgcgctccggctgctgtcacttggctctctggctggagcttgaggacgcaaggagggtttgtcactggcagactcgagactgtaggcactgccatggcccctgtgctcagtaaggactcggcggacatcgagagtatcctggctttaaatcctcgaacacaaactcatgcaactctgtgttccacttcggccaagaaattagacaagaaacattggaaaagaaatcctgataagaactgctttaattgtgagaagctggagaataattttgatgacatcaagcacacgactcttggtgagcgaggagctctccgagaagcaatgagatgcctgaaatgtgcagatgccccgtgtcagaagagctgtccaactaatcttgatattaaatcattcatcacaagtattgcaaacaagaactattatggagctgctaagatgatattttctgacaacccacttggtctgacttgtggaatggtatgtccaacctctgatctatgtgtaggtggatgcaatttatatgccactgaagagggacccattaatattggtggattgcagcaatttgctactgaggtattcaaagcaatgagtatcccacagatcagaaatccttcgctgcctcccccagaaaaaatgtctgaagcctattctgcaaagattgctctttttggtgctgggcctgcaagtataagttgtgcttcctttttggctcgattggggtactctgacatcactatatttgaaaaacaagaatatgttggtggtttaagtacttctgaaattcctcagttccggctgccgtatgatgtagtgaattttgagattgagctaatgaaggaccttggtgtaaagataatttgcggtaaaagcctttcagtgaatgaaatgactcttagcactttgaaagaaaaaggctacaaagctgctttcattggaataggtttgccagaacccaataaagatgccatcttccaaggcctgacgcaggaccaggggttttatacatccaaagactttttgccacttgtagccaaaggcagtaaagcaggaatgtgcgcctgtcactctccattgccatcgatacggggagtcgtgattgtacttggagctggagacactgccttcgactgtgcaacatctgctctacgttgtggagctcgccgagtgttcatcgtcttcagaaaaggctttgttaatataagagctgtccctgaggagatggagcttgctaaggaagaaaagtgtgaatttctgccattcctgtccccacggaaggttatagtaaaaggtgggagaattgttgctatgcagtttgttcggacagagcaagatgaaactggaaaatggaatgaagatgaagatcagatggtccatctgaaagccgatgtggtcatcagtgcctttggttcagttctgagtgatcctaaagtaaaagaagccttgagccctataaaatttaacagatggggtctcccagaagtagatccagaaactatgcaaactagtgaagcatgggtatttgcaggtggtgatgtcgttggtttggctaacactacagtggaatcggtgaatgatggaaagcaagcttcttggtacattcacaaatacgtacagtcacaatatggagcttccgtttctgccaagcctgaactacccctcttttacactcctattgatctggtggacattagtgtagaaatggccggattgaagtttataaatccttttggtcttgctagcgcaactccagccaccagcacatcaatgattcgaagagcttttgaagctggatggggttttgccctcaccaaaactttctctcttgataaggacattgtgacaaatgtttcccccagaatcatccggggaaccacctctggccccatgtatggccctggacaaagctcctttctgaatattgagctcatcagtgagaaaacggctgcatattggtgtcaaagtgtcactgaactaaaggctgacttcccagacaacattgtgattgctagcattatgtgcagttacaataaaaatgactggacggaacttgccaagaagtctgaggattctggagcagatgccctggagttaaatttatcatgtccacatggcatgggagaaagaggaatgggcctggcctgtgggcaggatccagagctggtgcggaacatctgccgctgggttaggcaagctgttcagattcctttttttgccaagctgaccccaaatgtcactgatattgtgagcatcgcaagagctgcaaaggaaggtggtgccaatggcgttacagccaccaacactgtctcaggtctgatgggattaaaatctgatggcacaccttggccagcagtggggattgcaaagcgaactacatatggaggagtgtctgggacagcaatcagacctattgctttgagagctgtgacctccattgctcgtgctctgcctggatttcccattttggctactggtggaattgactctgctgaaagtggtcttcagtttctccatagtggtgcttccgtcctccaggtatgcagtgccattcagaatcaggatttcactgtgatcgaagactactgcactggcctcaaagccctgctttatctgaaaagcattgaagaactacaagactgggatggacagagtccagctactgtgagtcaccagaaagggaaaccagttccacgtatagctgaactcatggacaagaaactgccaagttttggaccttatctggaacagcgcaagaaaatcatagcagaaaacaagattagactgaaagaacaaaatgtagctttttcaccacttaagagaagctgttttatccccaaaaggcctattcctaccatcaaggatgtaataggaaaagcactgcagtaccttggaacatttggtgaattgagcaacgtagagcaagttgtggctatgattgatgaagaaatgtgtatcaactgtggtaaatgctacatgacctgtaatgattctggctaccaggctatacagtttgatccagaaacccacctgcccaccataaccgacacttgtacaggctgtactctgtgtctcagtgtttgccctattgtcgactgcatcaaaatggtttccaggacaacaccttatgaaccaaagagaggcgtacccttatctgtgaatccggtgtgttaaggtgatttgtgaaacagttgctgtgaactttcatgtcacctacatatgctgatctcttaaaatcatgatccttgtgttcagctctttccaaattaaaacaaatatacattttctaaataaaaatatgtaatttcaaaatacatttgtaagtgtaaaaaatgtctcatgtcaatgaccattcaattagtggcataaaatagaataattcttttctgaggatagtagttaaataactgtgtggcagttaattggatgttcactgccagttgtcttatgtgaaaaattaactttttgtgtggcaattagtgtgacagtttccaaattgccctatgctgtgctccatatttgatttctaattgtaagtgaaattaagcattttgaaacaaagtactctttaacatacaagaaaatgtatccaaggaaacattttatcaataaaaattacctttaattttaatgctgtttctaagaaaatgtagttagctccataaagtacaaatgaagaaagtcaaaaattatttgctatggcaggataagaaagcctaaaattgagtttgtggactttattaagtaaaatccccttcgctgaaattgcttatttttggtgttggatagaggatagggagaatatttactaactaaataccattcactactcatgcgtgagatgggtgtacaaactcatcctcttttaatggcatttctctttaaactatgttcctaaccaaatgagatgataggatagatcctggttaccactcttttactgtgcacatatgggccccggaattctttaatagtcaccttcatgattatagcaactaatgtttgaacaaagctcaaagtatgcaatgcttcattattcaagaatgaaaaatataatgttgataatatatattaagtgtgccaaatcagtttgactactctctgttttagtgtttatgtttaaaagaaatatattttttgttattattagataatatttttgtatttctctattttcataatcagtaaatagtgtcatataaactcatttatctcctcttcatggcatcttcaatatgaatctataagtagtaaatcagaaagtaacaatctatggcttatttctatgacaaattcaagagctagaaaaataaaatgtttcattatgcacttttagaaatgcatatttgccacaaaacctgtattactgaataatatcaaataaaatatcataaagcatttt

SEQ ID NO: 1176 - protein, 1025 aa, Homo sapien
MAPVLSKDSADIESILALNPRTQTHATLCSTSAKKLDKKHWKRNPDKNCFNCEKLENNFDDIKHTTLGERGALREAMRCLKCADAPCQKSCPTNLDIKSFITSIANKNYYGAAKMIFSDNPLGLTCGMVCPTSDLCVGGCNLYATEEGPINIGGLQQFATEVFKAMSIPQIRNPSLPPPEKMSEAYSAKIALFGAGPASISCASFLARLGYSDITIFEKQEYVGGLSTSEIPQFRLPYDVVNFEIELMKDLGVKIICGKSLSVNEMTLSTLKEKGYKAAFIGIGLPEPNKDAIFQGLTQDQGFYTSKDFLPLVAKGSKAGMCACHSPLPSIRGVVIVLGAGDTAFDCATSALRCGARRVFIVFRKGFVNIRAVPEEMELAKEEKCEFLPFLSPRKVIVKGGRIVAMQFVRTEQDETGKWNEDEDQMVHLKADVVISAFGSVLSDPKVKEALSPIKFNRWGLPEVDPETMQTSEAWVFAGGDVVGLANTTVESVNDGKQASWYIHKYVQSQYGASVSAKPELPLFYTPIDLVDISVEMAGLKFINPFGLASATPATSTSMIRRAFEAGWGFALTKTFSLDKDIVTNVSPRIIRGTTSGPMYGPGQSSFLNIELISEKTAAYWCQSVTELKADFPDNIVIASIMCSYNKNDWTELAKKSEDSGADALELNLSCPHGMGERGMGLACGQDPELVRNICRWVRQAVQIPFFAKLTPNVTDIVSIARAAKEGGANGVTATNTVSGLMGLKSDGTPWPAVGIAKRTTYGGVSGTAIRPIALRAVTSIARALPGFPILATGGIDSAESGLQFLHSGASVLQVCSAIQNQDFTVIEDYCTGLKALLYLKSIEELQDWDGQSPATVSHQKGKPVPRIAELMDKKLPSFGPYLEQRKKIIAENKIRLKEQNVAFSPLKRSCFIPKRPIPTIKDVIGKALQYLGTFGELSNVEQVVAMIDEEMCINCGKCYMTCNDSGYQAIQFDPETHLPTITDTCTGCTLCLSVCPIVDCIKMVSRTTPYEPKRGVPLSVNPVC

SEQ ID NO: 1177 - DNA, 1160 bp, Homo sapien
cctccgacagcctctccacaggtaccatgaaggtctccgcggcacgcctcgctgtcatcctcattgctactgccctctgcgctcctgcatctgcctccccatattcctcggacaccacaccctgctgctttgcctacattgcccgcccactgccccgtgcccacatcaaggagtatttctacaccagtggcaagtgctccaacccagcagtcgtctttgtcacccgaaagaaccgccaagtgtgtgccaacccagagaagaaatgggttcgggagtacatcaactctttggagatgagctaggatggagagtccttgaacctgaacttacacaaatttgcctgtttctgcttgctcttgtcctagcttgggaggcttcccctcactatcctaccccacccgctccttgaagggcccagattctgaccacgacgagcagcagttacaaaaaccttccccaggctggacgtggtggctcagccttgtaatcccagcactttgggaggccaaggtgggtggatcacttgaggtcaggagttcgagacagcctggccaacatgatgaaaccccatgtgtactaaaaatacaaaaaattagccgggcgtggtagcgggcgcctgtagtcccagctactcgggaggctgaggcaggagaatggcgtgaacccgggagcggagcttgcagtgagccgagatcgcgccactgcactccagcctgggcgacagagcgagactccgtctcaaaaaaaaaaaaaaaaaaaaaaaaaatacaaaaattagccgcgtggtggcccacgcctgtaatcccagctactcgggaggctaaggcaggaaaattgtttgaacccaggaggtggaggctgcagtgagctgagattgtgccacttcactccagcctgggtgacaaagtgagactccgtcacaacaacaacaacaaaaagcttccccaactaaagcctagaagagcttctgaggcgctgctttgtcaaaaggaagtctctaggttctgagctctggctttgccttggctttgcaagggctctgtgacaaggaaggaagtcagcatgcctctagaggcaaggaagggaggaacactgcactcttaagcttccgccgtctcaacccctcacaggagcttactggcaaacatgaaaaatcgggg

SEQ ID NO: 1178 - protein, 91 aa, Homo sapien
MKVSAARLAVILIATALCAPASASPYSSDTTPCCFAYIARPLPRAHIKEYFYTSGKCSNPAVVFVTRKNRQVCANPEKKWVREYINSLEMS

SEQ ID NO: 1179 - DNA, 1097 bp, Homo sapien
tggcccctggtcctgtcctgttctccagcatggtgtgtctgaggctccctggaggctcctgcatggcagttctgacagtgacactgatggtgctgagctccccactggctttggctggggacaccagaccacgtttcttggagtactctacgtctgagtgtcatttcttcaatgggacggagcgggtgcggttcctggacagatacttctataaccaagaggagtacgtgcgcttcgacagcgacgtgggggagttccgggcggtgacggagctggggcggcctgatgaggagtactggaacagccagaaggacttcctggaagacaggcgggccgcggtggacacctactgcagacacaactacggggttggtgagagcttcacagtgcagcggcgagtccatcctaaggtgactgtgtatccttcaaagacccagcccctgcagcaccacaacctcctggtctgttctgtgagtggtttctatccaggcagcattgaagtcaggtggttccggaatggccaggaagagaagactggggtggtgtccacaggcctgatccacaatggagactggaccttccagaccctggtgatgctggaaacagttcctcggagtggagaggtttacacctgccaagtggagcacccaagcgtgacaagccctctcacagtggaatggagagcacggtctgaatctgcacagagcaagatgctgagtggagtcgggggctttgtgctgggcctgctcttccttggggccgggctgttcatctacttcaggaatcagaaaggacactctggacttcagccaagaggattcctgagctgaagtgcagatgacacattcaaagaagaactttctgccccagctttgcaggatgaaaagctttccctcctggctgttattcttccacaagagagggctttctcaggacctggttgctactggttcagcaactgcagaaaatgtcctcccttgtggcttcctcagctcctgttcttggcctgaagccccacagctttgatggcagcgcctcatcttcaacttttgtgctcccctttgcctaaaccctatggcctcctgtgcatctgtact

SEQ ID NO: 1180 - protein, 266 aa, Homo sapien [sequence omitted]

SEQ ID NO: 1181 - DNA, 983 bp, Homo sapien
ggcacgaggcctgacatggagcctgccagctccgtcagccctgactcggcccggagctgagctccccacctgccggtagcccaggagatggagcagcccagcccacgtgcccggccttccgcccctgacttcacttgataacaaactagaaactgaaacagggtcgggatgccgatgccggcttggagttagagatgagtcaccgctgagagcagctgcagtagctgagcagtggcagcagagaggcagacgtgagctgagggcgcagaggcaggcagcatctctgagggtccccaaggagcatggctgggagccgtgaggtggtggccatggactgcgagatggtggggctggggccccaccgggagagtggcctggctcgttgcagcctcgtgaacgtccacggtgctgtgctgtacgacaagttcatccggcctgagggagagatcaccgattacagaacccgggtcagcggggtcacccctcagcacatggtgggggccacaccatttgccgtggccaggctagagatcctgcagctcctgaaaggcaagctggtggtgggtcatgacctgaagcacgacttccaggcactgaaagaggacatgagcggctacacaatctacgacacgtccactgacaggctgttgtggcgtgaggccaagctggaccactgcaggcgtgtctccctgcgggtgctgagtgagcgcctcctgcacaagagcatccagaacagcctgcttggacacagctcggtggaagatgcgagggcaacgatggagctctatcaaatctcccagagaatccgagcccgccgagggctgccccgcctggctgtgtcagactgaagccccatccagcccgttccgcagggactagaggctttcggctttttgggacagcaactaccttgcttttggaaaatacatttttaatagtaaagtggctctatattttctctacgcaaaaaaaaaaaaaaaaaa

SEQ ID NO: 1182 - protein, 181 aa, Homo sapien
MAGSREVVAMDCEMVGLGPHRESGLARCSLVNVHGAVLYDKFIRPEGEITDYRTRVSGVTPQHMVGATPFAVARLEILQLLKGKLVVGHDLKHDFQALKEDMSGYTIYDTSTDRLLWREAKLDHCRRVSLRVLSERLLHKSIQNSLLGHSSVEDARATMELYQISQRIRARRGLPRLAVSD

SEQ ID NO: 1183 - DNA, 2618 bp, Homo sapien
atgaagcacctgaagcggtggtggtcggccggcggcggcctcctgcacctcaccctcctgctgagcttggcggggctccgcgtagacctagatctttacctgctgctgccgccgcccaccctgctgcaggacgagctgctgttcctgggcggcccggccagctccgcctacgcgctcagccccttctcggcctcgggagggtgggggcgcgcgggccacttgcaccccaagggccgggagctggaccctgccgcgccgcccgagggccagctgctccgggaggtgcgcgcgctcggggtccccttcgtccctcgcaccagcgtggatgcatggctggtgcacagcgtggctgccgggagcgcggacgaggcccacgggctgctcggcgccgccgccgcctcgtccaccggaggagccggcgccagcgtggacggcggcagccaggctgtgcaggggggcggcggggacccccgagcggctcggagtggccccttggacgccggggaagaggagaaggcacccgcggaaccgacggctcaggtgccggacgctggcggatgtgcgagcgaggagaatggggtactaagagaaaagcacgaagctgtggatcatagttcccagcatgaggaaaatgaagaaagggtgtcagcccagaaggagaactcacttcagcagaatgatgatgatgaaaacaaaatagcagagaaacctgactgggaggcagaaaagaccactgaatctagaaatgagagacatctgaatgggacagatacttctttctctctggaagacttattccagttgctttcatcacagcctgaaaattcactggagggcatctcattgggagatattcctcttccaggcagtatcagtgatggcatgaattcttcagcacattatcatgtaaacttcagccaggctataagtcaggatgtgaatcttcatgaggccatcttgctttgtcccaacaatacatttagaagagatccaacagcaaggacttcacagtcacaagaaccatttctgcagttaaattctcataccaccaatcctgagcaaacccttcctggaactaatttgacaggatttctttcaccggttgacaatcatatgaggaatctaacaagccaagacctactgtatgaccttgacataaatatatttgatgagataaacttaatgtcattggccacagaagacaactttgatccaatcgatgtttctcagctttttgatgaaccagattctgattctggcctttctttagattcaagtcacaataatacctctgtcatcaagtctaattcctctcactctgtgtgtgatgaaggtgctataggttattgcactgaccatgaatctagttcccatcatgacttagaaggtgctgtaggtggctactacccagaacccagtaagctttgtcacttggatcaaagtgattctgatttccatggagatcttacatttcaacacgtatttcataaccacacttaccacttacagccaactgcaccagaatctacttctgaaccttttccgtggcctgggaagtcacagaagataaggagtagataccttgaagacacagatagaaacttgagccgtgatgaacagcgtgctaaagctttgcatatccctttttctgtagatgaaattgtcggcatgcctgttgattctttcaatagcatgttaagtagatattatctgacagacctacaagtctcacttatccgtgacatcagacgaagagggaaaaataaagttgctgcgcagaactgtcgtaaacgcaaattggacataattttgaatttagaagatgatgtatgtaacttgcaagcaaagaaggaaactcttaagagagagcaagcacaatgtaacaaagctattaacataatgaaacagaaactgcatgacctttatcatgatatttttagtagattaagagatgaccaaggtaggccagtcaatcccaaccactatgctctccagtgtacccatgatggaagtatcttgatagtacccaaagaactggtggcctcaggccacaaaaaggaaacccaaaagggaaagagaaagtgagaagaaactgaagatggactctattatgtgaagtagtaatgttcagaaactgattatttggatcagaaaccattgaaactgcttcaagaattgtatctttaagtactgctacttgaataactcagttaacgctgttttgaagcttacatggacaaatgtttaggacttcaagatcacacttgtgggcaatctgggggagccacaacttttcatgaagtgcattgtatacaaaattcatagttatgtccaaagaataggttaacatgaaaacccagtaagactttccatcttggcagccatcctttttaagagtaagttggttacttcaaaaagagcaaacactggggatcaaattattttaagaggtatttcagttttaaatgcaaaatagccttattttcatttagtttgttagcactatagtgagcttttcaaacactattttaatctttatatttaacttataaattttgctttctatggaaataaattttgtatttgtattaaaaattaacttttcccttttatacaga

SEQ ID NO: 1184 - protein, 694 aa, Homo sapien
MKHLKRWWSAGGGLLHLTLLLSLAGLRVDLDLYLLLPPPTLLQDELLFLGGPASSAYALSPFSASGGWGRAGHLHPKGRELDPAAPPEGQLLREVRALGVPFVPRTSVDAWLVHSVAAGSADEAHGLLGAAAASSTGGAGASVDGGSQAVQGGGGDPRAARSGPLDAGEEEKAPAEPTAQVPDAGGCASEENGVLREKHEAVDHSSQHEENEERVSAQKENSLQQNDDDENKIAEKPDWEAEKTTESRNERHLNGTDTSFSLEDLFQLLSSQPENSLEGISLGDIPLPGSISDGMNSSAHYHVNFSQAISQDVNLHEAILLCPNNTFRRDPTARTSQSQEPFLQLNSHTTNPEQTLPGTNLTGFLSPVDNHMRNLTSQDLLYDLDINIFDEINLMSLATEDNFDPIDVSQLFDEPDSDSGLSLDSSHNNTSVIKSNSSHSVCDEGAIGYCTDHESSSHHDLEGAVGGYYPEPSKLCHLDQSDSDFHGDLTFQHVFHNHTYHLQPTAPESTSEPFPWPGKSQKIRSRYLEDTDRNLSRDEQRAKALHIPFSVDEIVGMPVDSFNSMLSRYYLTDLQVSLIRDIRRRGKNKVAAQNCRKRKLDIILNLEDDVCNLQAKKETLKREQAQCNKAINIMKQKLHDLYHDIFSRLRDDQGRPVNPNHYALQCTHDGSILIVPKELVASGHKKETQKGKRK

SEQ ID NO: 1185 - DNA, 3636 bp, Homo sapien
gcagagcaccgcgccttagccgcgaagttctagttcttgctgccggtcctaacgtcccgcagtcttcgccagccagccgtcccgcatgcgcgtttgggcggcgtggagcctgctgccatgaagtcagcgagagctaagacaccccggaaacctaccgtgaaaaaagggtcccaaacgaaccttaaagacccagttggggtatactgtagggtgcgcccactgggctttcctgatcaagagtgttgcatagaagtgatcaataatacaactgttcagcttcatactcctgagggctacagactcaaccgaaatggagactataaggagactcagtattcatttaaacaagtatttggcactcacaccacccagaaggaactctttgatgttgtggctaatcccttggtcaatgacctcattcatggcaaaaatggtcttctttttacatatggtgtgacgggaagtggaaaaactcacacaatgactggttctccaggggaaggagggctgcttcctcgttgtttggacatgatctttaacagtatagggtcatttcaagctaaacgatatgttttcaaatctaatgataggaatagtatggatatacagtgtgaggttgatgccttattagaacgtcagaaaagagaagctatgcccaatccaaagacttcttctagcaaacgacaagtagatccagagtttgcagatatgataactgtacaagaattctgcaaagcagaagaggttgatgaagatagtgtctatggtgtatttgtctcttatattgaaatatataataattacatatatgatctattggaagaggtgccgtttgatcccataaaacccaaacctccacaatctaaattgcttcgtgaagataagaaccataacatgtatgttgcaggatgtacagaagttgaagtgaaatctactgaggaggcttttgaagttttctggagaggccagaaaaagagacgtattgctaatacccatttgaatcgtgagtccagccgttcccatagcgtgttcaacattaaattagttcaggctcccttggatgcagatggagacaatgtcttacaggaaaaagaacaaatcactataagtcagttgtccttggtagatcttgctggaagtgaaagaactaaccggaccagagcagaagggaacagattacgtgaagctggtaatattaatcagtcactaatgacgctaagaacatgtatggatgtcctaagagagaaccaaatgtatggaactaacaagatggttccatatcgagattcaaagttaacccatctgttcaagaactactttgatggggaaggaaaagtgcggatgatcgtgtgtgtgaaccccaaggctgaagattatgaagaaaacttgcaagtcatgagatttgcggaagtgactcaagaagttgaagtagcaagacctgtagacaaggcaatatgtggtttaacgcctgggaggagatacagaaaccagcctcgaggtccagttggaaatgaaccattggttactgacgtggttttgcagagttttccacctttgccgtcatgcgaaattttggatatcaacgatgagcagacacttccaaggctgattgaagccttagagaaacgacataacttacgacaaatgatgattgatgagtttaacaaacaatctaatgcttttaaagctttgttacaagaatttgacaatgctgttttaagtaaagaaaaccacatgcaagggaaactaaatgaaaaggagaagatgatctcaggacagaaattggaaatagaacgactggaaaagaaaaacaaaactttagaatataagattgagattttagagaaaacaactactatctatgaggaagataaacgcaatttgcaacaggaacttgaaactcagaaccagaaacttcagcgacagttttctgacaaacgcagattagaagccaggttgcaaggcatggtgacagaaacgacaatgaagtgggagaaagaatgtgagcgtagagtggcagccaaacagctggagatgcagaataaactctgggttaaagatgaaaagctgaaacaactgaaggctattgttactgaacctaaaactgagaagccagagagaccctctcgggagcgagatcgagaaaaagttactcaaagatctgtttctccatcacctgtgcctctttctagtaactatattgctcagatttccaacggccagcaactcatgagccagccacagctacataggcgctctaactcttgcagcagcatttctgtagcttcctgtatttcggaatgggagcagaaaattcctacgtacaacacacctctcaaagtcacatctattgcaaggcgtaggcagcaggagccaggacaaagcaaaacttgtatcgtgtcagacagaaggcgagggatgtactggactgaaggcagggaggtggttcctacattcagaaatgagatagaaatagaagaggatcattgcggcaggttactctttcaacctgatcagaacgcaccaccaattcgtctccgacacagacgatcacgctctgcaggagacagatgggtagatcataagcccgcctctaacatgcaaactgaaacagtcatgcagccacatgtccctcatgccatcacagtatctgttgcaaatgaaaaggcactagctaagtgtgagaagtacatgctgacccaccaggaactagcctccgatggggagattgaaactaaactaattaagggtgatatttataaaacaaggggtggtggacaatctgttcagtttactgatattgagactttaaagcaagaatcaccaaatggtagtcgaaaacgaagatcttccacagtagcacctgcccaaccagatggtgcagagtctgaatggaccgatgtagaaacaaggtgttctgtggctgtggagatgagagcaggatcccagctgggacctggatatcagcatcacgcacaacccaagcgcaaaaagccatgaactgacagtcccagtactgaaagaacattttcatttgtgtggatgatttctcgaaagccatgccagaagcagtcttccaggtcatcttgtagaactccagctttgttgaaaatcacggacctcagctacatcatacactgacccagagcaaagctttccctatggttccaaagacaactagtattcaacaaaccttgtatagtatatgttttgccatatttaatattaatagcagaggaagactccttttttcatcactgtatgaattttttataatgtttttttaaaatatatttcatgtatacttataaactaattcacacaagtgtttgtcttagatgattaaggaagactatatctagatcatgtctgattttttattgtgacttctccagccctggtctgaatttcttaaggttttataaacaaatgctgctatttattagctgcaagaatgcactttagaactatttgacaattcagactttcaaaataaagatgtaaatgactggccaataataaccattttaggaaggtgttttgaattctgtatgtatatattcactttctgacatttagatatgccaaaagaattaaaatcaaaagcactaagaaataaaaaaaaaaaaaaaaaaa

SEQ ID NO: 1186 - protein, 960 aa, Homo sapien
MKSARAKTPRKPTVKKGSQTNLKDPVGVYCRVRPLGFPDQECCIEVINNTTVQLHTPEGYRLNRNGDYKETQYSFKQVFGTHTTQKELFDVVANPLVNDLIHGKNGLLFTYGVTGSGKTHTMTGSPGEGGLLPRCLDMIFNSIGSFQAKRYVFKSNDRNSMDIQCEVDALLERQKREAMPNPKTSSSKRQVDPEFADMITVQEFCKAEEVDEDSVYGVFVSYIEIYNNYIYDLLEEVPFDPIKPKPPQSKLLREDKNHNMYVAGCTEVEVKSTEEAFEVFWRGQKKRRIANTHLNRESSRSHSVFNIKLVQAPLDADGDNVLQEKEQITISQLSLVDLAGSERTNRTRAEGNRLREAGNINQSLMTLRTCMDVLRENQMYGTNKMVPYRDSKLTHLFKNYFDGEGKVRMIVCVNPKAEDYEENLQVMRFAEVTQEVEVARPVDKAICGLTPGRRYRNQPRGPVGNEPLVTDVVLQSFPPLPSCEILDINDEQTLPRLIEALEKRHNLRQMMIDEFNKQSNAFKALLQEFDNAVLSKENHMQGKLNEKEKMISGQKLEIERLEKKNKTLEYKIEILEKTTTIYEEDKRNLQQELETQNQKLQRQFSDKRRLEARLQGMVTETTMKWEKECERRVAAKQLEMQNKLWVKDEKLKQLKAIVTEPKTEKPERPSRERDREKVTQRSVSPSPVPLSSNYIAQISNGQQLMSQPQLHRRSNSCSSISVASCISEWEQKIPTYNTPLKVTSIARRRQQEPGQSKTCIVSDRRRGMYWTEGREVVPTFRNEIEIEEDHCGRLLFQPDQNAPPIRLRHRRSRSAGDRWVDHKPASNMQTETVMQPHVPHAITVSVANEKALAKCEKYMLTHQELASDGEIETKLIKGDIYKTRGGGQSVQFTDIETLKQESPNGSRKRRSSTVAPAQPDGAESEWTDVETRCSVAVEMRAGSQLGPGYQHHAQPKRKKP

SEQ ID NO: 1187 - DNA, 6914 bp, Homo sapien
tcattgcagctgggacagcccggagtgtggttagcagctcggcaagcgctgcccaggtcctggggtggtggcagccagcgggagcaggaaaggaagcatgttcccaggctgcccacgcctctgggtcctggtggtcttgggcaccagctgggtaggctgggggagccaagggacagaagcggcacagctaaggcagttctacgtggctgctcagggcatcagttggagctaccgacctgagcccacaaactcaagtttgaatctttctgtaacttcctttaagaaaattgtctacagagagtatgaaccatattttaagaaagaaaaaccacaatctaccatttcaggacttcttgggcctactttatatgctgaagtcggagacatcataaaagttcactttaaaaataaggcagataagcccttgagcatccatcctcaaggaattaggtacagtaaattatcagaaggtgcttcttaccttgaccacacattccctgcagagaagatggacgacgctgtggctccaggccgagaatacacctatgaatggagtatcagtgaggacagtggacccacccatgatgaccctccatgcctcacacacatctattactcccatgaaaatctgatcgaggatttcaactctgggctgattgggcccctgcttatctgtaaaaaagggaccctaactgagggtgggacacagaagacgtttgacaagcaaatcgtgctactatttgctgtgtttgatgaaagcaagagctggagccagtcatcatccctaatgtacacagtcaatggatatgtgaatgggacaatgccagatataacagtttgtgcccatgaccacatcagctggcatctgctgggaatgagctcggggccagaattattctccattcatttcaacggccaggtcctggagcagaaccatcataaggtctcagccatcacccttgtcagtgctacatccactaccgcaaatatgactgtgggcccagagggaaagtggatcatatcttctctcaccccaaaacatttgcaagctgggatgcaggcttacattgacattaaaaactgcccaaagaaaaccaggaatcttaagaaaataactcgtgagcagaggcggcacatgaagaggtgggaatacttcattgctgcagaggaagtcatttgggactatgcacctgtaataccagcgaatatggacaaaaaatacaggtctcagcatttggataatttctcaaaccaaattggaaaacattataagaaagttatgtacacacagtacgaagatgagtccttcaccaaacatacagtgaatcccaatatgaaagaagatgggattttgggtcctattatcagagcccaggtcagagacacactcaaaatcgtgttcaaaaatatggccagccgcccctatagcatttaccctcatggagtgaccttctcgccttatgaagatgaagtcaactcttctttcacctcaggcaggaacaacaccatgatcagagcagttcaaccaggggaaacctatacttataagtggaacatcttagagtttgatgaacccacagaaaatgatgcccagtgcttaacaagaccatactacagtgacgtggacatcatgagagacatcgcctctgggctaataggactacttctaatctgtaagagcagatccctggacaggcgaggaatacagagggcagcagacatcgaacagcaggctgtgtttgctgtgtttgatgagaacaaaagctggtaccttgaggacaacatcaacaagttttgtgaaaatcctgatgaggtgaaacgtgatgaccccaagttttatgaatcaaacatcatgagcactatcaatggctatgtgcctgagagcataactactcttggattctgctttgatgacactgtccagtggcacttctgtagtgtggggacccagaatgaaattttgaccatccacttcactgggcactcattcatctatggaaagaggcatgaggacaccttgaccctcttccccatgcgtggagaatctgtgacggtcacaatggataatgttggaacttggatgttaacttccatgaattctagtccaagaagcaaaaagctgaggctgaaattcagggatgttaaatgtatcccagatgatgatgaagactcatatgagatttttgaacctccagaatctacagtcatggctacacggaaaatgcatgatcgtttagaacctgaagatgaagagagtgatgctgactatgattaccagaacagactggctgcagcattaggaattaggtcattccgaaactcatcattgaaccaggaagaagaagagttcaatcttactgccctagctctggagaatggcactgaattcgtttcttcgaacacagatataattgttggttcaaattattcttccccaagtaatattagtaagttcactgtcaataaccttgcagaacctcagaaagccccttctcaccaacaagccaccacagctggttccccactgagacacctcattggcaagaactcagttctcaattcttccacagcagagcattccagcccatattctgaagaccctatagaggatcctctacagccagatgtcacagggatacgtctactttcacttggtgctggagaattcagaagtcaagaacatgctaagcgtaagggacccaaggtagaaagagatcaagcagcaaagcacaggttctcctggatgaaattactagcacataaagttgggagacacctaagccaagacactggttctccttccggaatgaggccctgggaggaccttcctagccaagacactggttctccttccagaatgaggccctgggaggaccctcctagtgatctgttactcttaaaacaaagtaactcatctaagattttggttgggagatggcatttggcttctgagaaaggtagctatgaaataatccaagatactgatgaagacacagctgttaacaattggctgatcagcccccagaatgcctcacgtgcttggggagaaagcacccctcttgccaacaagcctggaaagcagagtggccacccaaagtttcctagagttagacataaatctctacaagtaagacaggatggaggaaagagtagactgaagaaaagccagtttctcattaagacacgaaaaaagaaaaaagagaagcacacacaccatgctcctttatctccgaggacctttcaccctctaagaagtgaagcctacaacacattttcagaaagaagacttaagcattcgttggtgcttcataaatccaatgaaacatctcttcccacagacctcaatcagacattgccctctatggattttggctggatagcctcacttcctgaccataatcagaattcctcaaatgacactggtcaggcaagctgtcctccaggtctttatcagacagtgcccccagaggaacactatcaaacattccccattcaagaccctgatcaaatgcactctacttcagaccccagtcacagatcctcttctccagagctcagtgaaatgcttgagtatgaccgaagtcacaagtccttccccacagatataagtcaaatgtccccttcctcagaacatgaagtctggcagacagtcatctctccagacctcagccaggtgaccctctctccagaactcagccagacaaacctctctccagacctcagccacacgactctctctccagaactcattcagagaaacctttccccagccctcggtcagatgcccatttctccagacctcagccatacaaccctttctccagacctcagccatacaaccctttctttagacctcagccagacaaacctctctccagaactcagtcagacaaacctttctccagccctcggtcagatgcccctttctccagacctcagccatacaaccatttctctagacttcagccagacaaacctctctccagaactcagccatatgactctctctccagaactcagtcagacaaacctttccccagccctcggtcagatgcccatttctccagacctcagccatacaaccctttctctagacttcagccagacaaacctctctccagaactcagtcaaacaaacctttccccagccctcggtcagatgcccctttctccagaccccagccatacaaccctttctctagacctcagccagacaaacctctctccagaactcagtcagacaaacctttccccagacctcagtgagatgcccctctttgcagatctcagtcaaattccccttaccccagacctcgaccagatgacactttctccagaccttggtgagacagatctttccccaaactttggtcagatgtccctttccccagacctcagccaggtgactctctctccagacatcagtgacaccacccttctcccggatctcagccagatatcacctcctccagaccttgatcagatattctacccttctgaatctagtcagtcattgcttcttcaagaatttaatgagtcttttccttatccagaccttggtcagatgccatctccttcatctcctactctcaatgatacttttctatcaaaggaatttaatccactggttatagtgggcctcagtaaagatggtacagattacattgagatcattccaaaggaagaggtccagagcagtgaagatgactatgctgaaattgattatgtgccctatgatgacccctacaaaactgatgttaggacaaacatcaactcctccagagatcctgacaacattgcagcatggtacctccgcagcaacaatggaaacagaagaaattattacattgctgctgaagaaatatcctgggattattcagaatttgtacaaagggaaacagatattgaagactctgatgatattccagaagataccacatataagaaagtagtttttcgaaagtacctcgacagcacttttaccaaacgtgatcctcgaggggagtatgaagagcatctcggaattcttggtcctattatcagagctgaagtggatgatgttatccaagttcgttttaaaaatttagcatccagaccgtattctctacatgcccatggactttcctatgaaaaatcatcagagggaaagacttatgaagatgactctcctgaatggtttaaggaagataatgctgttcagccaaatagcagttatacctacgtatggcatgccactgagcgatcagggccagaaagtcctggctctgcctgtcgggcttgggcctactactcagctgtgaacccagaaaaagatattcactcaggcttgataggtcccctcctaatctgccaaaaaggaatactacataaggacagcaacatgcctgtggacatgagagaatttgtcttactatttatgacctttgatgaaaagaagagctggtactatgaaaagaagtcccgaagttcttggagactcacatcctcagaaatgaaaaaatcccatgagtttcacgccattaatgggatgatctacagcttgcctggcctgaaaatgtatgagcaagagtgggtgaggttacacctgctgaacataggcggctcccaagacattcacgtggttcactttcacggccagaccttgctggaaaatggcaataaacagcaccagttaggggtctggccccttctgcctggttcatttaaaactcttgaaatgaaggcatcaaaacctggctggtggctcctaaacacagaggttggagaaaaccagagagcagggatgcaaacgccatttcttatcatggacagagactgtaggatgccaatgggactaagcactggtatcatatctgattcacagatcaaggcttcagagtttctgggttactgggagcccagattagcaagattaaacaatggtggatcttataatgcttggagtgtagaaaaacttgcagcagaatttgcctctaaaccttggatccaggtggacatgcaaaaggaagtcataatcacagggatccagacccaaggtgccaaacactacctgaagtcctgctataccacagagttctatgtagcttacagttccaaccagatcaactggcagatcttcaaagggaacagcacaaggaatgtgatgtattttaatggcaattcagatgcctctacaataaaagagaatcagtttgacccacctattgtggctagatatattaggatctctccaactcgagcctataacagacctacccttcgattggaactgcaaggttgtgaggtaaatggatgttccacacccctgggtatggaaaatggaaagatagaaaacaagcaaatcacagcttcttcgtttaagaaatcttggtggggagattactgggaacccttccgtgcccgtctgaatgcccagggacgtgtgaatgcctggcaagccaaggcaaacaacaataagcagtggctagaaattgatctactcaagatcaagaagataacggcaattataacacagggctgcaagtctctgtcctctgaaatgtatgtaaagagctataccatccactacagtgagcagggagtggaatggaaaccatacaggctgaaatcctccatggtggacaagatttttgaaggaaatactaataccaaaggacatgtgaagaactttttcaaccccccaatcatttccaggtttatccgtgtcattcctaaaacatggaatcaaagtattgcacttcgcctggaactctttggctgtgatatttactagaattgaacattcaaaaacccctggaagagactctttaagacctcaaaccatttagaatgggcaatgtattttacgctgtgttaaatgttaacagttttccactatttctctttcttttctattagtgaataaaattttatac

SEQ ID NO: 1188 - protein, 2000 aa, Homo sapien
MFPGCPRLWVLVVLGTSWVGWGSQGTEAAQLRQFYVAAQGISWSYRPEPTNSSLNLSVTSFKKIVYREYEPYFKKEKPQSTISGLLGPTLYAEVGDIIKVHFKNKADKPLSIHPQGIRYSKLSEGASYLDHTFPAEKMDDAVAPGREYTYEWSISEDSGPTHDDPPCLTHIYYSHENLIEDFNSGLIGPLLICKKGTLTEGGTQKTFDKQIVLLFAVFDESKSWSQSSSLMYTVNGYVNGTMPDITVCAHDHISWHLLGMSSGPELFSIHFNGQVLEQNHHKVSAITLVSATSTTANMTVGPEGKWIISSLTPKHLQAGMQAYIDIKNCPKKTRNLKKITREQRRHMKRWEYFIAAEEVIWDYAPVIPANMDKKYRSQHLDNFSNQIGKHYKKVMYTQYEDESFTKHTVNPNMKEDGILGPIIRAQVRDTLKIVFKNMASRPYSIYPHGVTFSPYEDEVNSSFTSGRNNTMIRAVQPGETYTYKWNILEFDEPTENDAQCLTRPYYSDVDIMRDIASGLIGLLLICKSRSLDRRGIQRAADIEQQAVFAVFDENKSWYLEDNINKFCENPDEVKRDDPKFYESNIMSTINGYVPESITTLGFCFDDTVQWHFCSVGTQNEILTIHFTGHSFIYGKRHEDTLTLFPMRGESVTVTMDNVGTWMLTSMNSSPRSKKLRLKFRDVKCIPDDDEDSYEIFEPPESTVMATRKMHDRLEPEDEESDADYDYQNRLAAALGIRSFRNSSLNQEEEEFNLTALALENGTEFVSSNTDIIVGSNYSSPSNISKFTVNNLAEPQKAPSHQQATTAGSPLRHLIGKNSVLNSSTAEHSSPYSEDPIEDPLQPDVTGIRLLSLGAGEFRSQEHAKRKGPKVERDQAAKHRFSWMKLLAHKVGRHLSQDTGSPSGMRPWEDLPSQDTGSPSRMRPWEDPPSDLLLLKQSNSSKILVGRWHLASEKGSYEIIQDTDEDTAVNNWLISPQNASRAWGESTPLANKPGKQSGHPKFPRVRHKSLQVRQDGGKSRLKKSQFLIKTRKKKKEKHTHHAPLSPRTFHPLRSEAYNTFSERRLKHSLVLHKSNETSLPTDLNQTLPSMDFGWIASLPDHNQNSSNDTGQASCPPGLYQTVPPEEHYQTFPIQDPDQMHSTSDPSHRSSSPELSEMLEYDRSHKSFPTDISQMSPSSEHEVWQTVISPDLSQVTLSPELSQTNLSPDLSHTTLSPELIQRNLSPALGQMPISPDLSHTTLSPDLSHTTLSLDLSQTNLSPELSQTNLSPALGQMPLSPDLSHTTISLDFSQTNLSPELSHMTLSPELSQTNLSPALGQMPISPDLSHTTLSLDFSQTNLSPELSQTNLSPALGQMPLSPDPSHTTLSLDLSQTNLSPELSQTNLSPDLSEMPLFADLSQIPLTPDLDQMTLSPDLGETDLSPNFGQMSLSPDLSQVTLSPDISDTTLLPDLSQISPPPDLDQIFYPSESSQSLLLQEFNESFPYPDLGQMPSPSSPTLNDTFLSKEFNPLVIVGLSKDGTDYIEIIPKEEVQSSEDDYAEIDYVPYDDPYKTDVRTNINSSRDPDNIAAWYLRSNNGNRRNYYIAAEEISWDYSEFVQRETDIEDSDDIPEDTTYKKVVFRKYLDSTFTKRDPRGEYEEHLGILGPIIRAEVDDVIQVRFKNLASRPYSLHAHGLSYEKSSEGKTYEDDSPEWFKEDNAVQPNSSYTYVWHATERSGPESPGSACRAWAYYSAVNPEKDIHSGLIGPLLICQKGILHKDSNMPVDMREFVLLFMTFDEKKSWYYEKKSRSSWRLTSSEMKKSHEFHAINGMIYSLPGLKMYEQEWVRLHLLNIGGSQDIHVVHFHGQTLLENGNKQHQLGVWPLLPGSFKTLEMKASKPGWWLLNTEVGENQRAGMQTPFLIMDRDCRMPMGLSTGIISDSQIKASEFLGYWEPRLARLNNGGSYNAWSVEKLAAEFASKPWIQVDMQKEVIITGIQTQGAKHYLKSCYTTEFYVAYSSN

SEQ ID NO: 1189 - DNA, 5747 bp, Homo sapien
cgcacaccgacttgcatgcaattatcatagcccgagtgctcctccgttgagagacttcgcccccgagaccgctgactgtgaatgacaaatcaaaagtcagggttgcagaatcagccggactttcctgctcatttgcagcagagggaggaagcagagaatgaaagattctgaaaataaaggtgcctcatctccagacatggagcccagctatgggggaggtctctttgacatggtaaaaggaggtgcagggaggctctttagtaacctaaaggacaacttgaaagacaccctcaaagacacatcttctagagtgatacaatctgtgaccagctacacaaagggagatttagacttcacttatgttacctccagaattattgtgatgtcctttcctctggacaatgttgacataggattcaggaatcaggttgatgacattcgaagctttttggattccagacatcttgaccactacacagtatacaatctgtcacctaagtcttatcgaactgccaagtttcacagccgggtctcagaatgcagttggcccattaggcaggctcccagtctgcacaacctttttgctgtgtgtcggaatatgtataactggctactgcagaatcccaaaaatgtctgtgttgtccactgcttggatggacgggcggcatcatcaattctggttggtgctatgttcattttctgtaatctctactctactcctggcccagccattcgattgctatatgcaaagcgaccaggaattggactttcaccatcccataggagatacctgggctatatgtgtgacctactggcagacaagccctaccgccctcacttcaagcctctcacaattaagtcgatcactgtcagtccaataccctttttcaacaaacagaggaatggatgtcgcccttactgtgatgtactcattggagaaaccaaaatatattcgacttgcacagattttgaacgaatgaaagaatatcgtgtccaagatggaaaaatcttcattcccttgaacatcactgtgcaaggagacgtggttgtttccatgtatcacttgaggtcaaccattgggagccggctacaggctaaggtgaccaacacacagatattccagcttcagtttcacactggattcataccactggacacaacagttttaaagttcaccaagcctgagttagatgcatgtgatgtaccagaaaaatatcctcagctatttcaggtgacactggatgtagaactacagccccatgacaaagtaatagacttaactccaccatgggaacattactgcacaaaagatgtcaatcccagcatcctcttctcttctcaccaggaacatcaagatacgctggccttaggaggacaggctccaatagatatccctccagacaaccccaggcattacggacaaagtggtttctttgcctctctctgttggcaagatcagaaatcggagaagtcattctgtgaggaagaccacgctgccctagtgaatcaggaaagtgagcaatcagatgatgaacttctgacactttccagtccgcatggcaatgccaatggtgacaagcctcatggagtcaagaagcccagcaaaaagcagcaggagccagcagcccctccaccccctgaggatgtggaccttttgggcctggaagggtctgcaatgagtaacagcttctctccgccagcggctcctcccaccaattctgaactactgagtgacctgtttgggggtggaggtgcagctggtcccacccaggctggacagtcaggagtggaagatgtgtttcatcctagtggacctgcgtctacccagtcaacaccacgccgctctgccacctccacctctgcgtctccaaccctaagagtgggagaaggtgccacctttgacccatttggagcaccttctaaaccatcaggtcaggatttgctgggttcttttctgaacacatccagtgcttccagtgacccctttctccagcccacaagaagtccttcgcccacagtacatgcttctagtacgcctgctgtgaacattcagccagatgtttctggaggttgggactggcatgctaaaccaggaggctttggaatgggaagcaagtcagctgccaccagcccaaccggatcctcgcatggtactcccacccatcaaagcaaaccccagactctggatccttttgccgaccttgggacactaggtagttcttcctttgccagcaaacccaccacaccaactggattgggtggaggattcccgcctctcagctcgccacagaaggcgtctccccagcctatgggtggcgggtggcagcagggaggtgcctacaactggcagcagccacagcctaagcctcagcccagcatgccccactcctctccccagaaccgacccaactacaacgtgagcttctcagccatgcctgggggccagaacgaacgtgggaaaggatcaagtaatttggaagggaaacaaaaagcagctgattttgaagacctactctctggtcaaggtttcaatgctcacaaagacaaaaaggggcctcggacaatagctgagatgagaaaggaggaaatggccaaggaaatggatcctgagaaattaaagattctggaatggattgaaggcaaagaaagaaatatcagagcccttctttccacgatgcataccgtactatgggctggggagaccaagtggaaaccagttggcatggcagacctggtaacaccagagcaggtgaagaaggtgtacaggaaggctgtcctggtggtgcacccagataaagctactgggcaaccctatgaacaatacgcaaagatgattttcatggagctcaatgatgcctggtctgaatttgaaaaccaaggccaaaagcccttatattaatttatgagcttttccatctctgctgcagacctgtgctaatgcttagtgtgtgtcacaattctgaggttttcgcagatgaaccaaaaactccagtaacatgttttcagtactaaaccgttaagttactcatgaattaatttctcattgataaggaatgtggatgtttggtttctccaaagttcccaccataaaagatccaaagcatgagaggaacttctagtcagatgaccttgcagaaccaccgcattccaccctgccctttggggagcctactcagcattctacctggggaaatggaaaacagaggccaccacccatgaaggcataacacccatcacattgtctgagaataggattaatgagcaaaagttatgataatagagttatatgatggtttaatggtttctagatttttcttggaaagatataatttgagcagtggctttatgcagactccaagaacaaaaccaccaggtatttttttttaagtaaaaatttactaaggcctttagcataatactgtaaatgtcttttggtcaagaggactaacaaatataaaggaacttgaaatgtggggagtgataatagtccagtgattaaactacagtccagtgattaccaccaactttctgactaagctaaaaatgaatgaaaatggtggctaaagaaaatagggactctgaagacgtcgaaatctttattcctggttaggaaggtgggccgctacccttctttccctttagaaaactgtgattaattaaataaaaagtcttactactataacaactctaaacctggtttaaatgaaacatctaattttgctgtaaggcttaatgctcttcttttgtttagccaagaaaacattcttagttggaaacaggtggtaaagtagtttggcctgttcacaacttatcaggaccaatatctagtgtggactcagtgttctctaggtttgtgagcagttgtggtaagagaatggaaggcaacactgaataggagttaagggaatggcacgatcacagtgagagagctgcactcacctgcagacccagtcagatggcttgtcagtatctgctctgaggaaccaggtcccacctccccacaaggcaaatctagacccattaaattattacagtgggcttttttgttttaaaagtggttggggatccacaggaacgacattcatacagggacatttgtgaaagcaaagcaagaatgaatgctttcccgatctcagactggctggattcagatcagtgtgttggctggttctcattttaaggggtaagcagtttgctattctgtgactttagtagatctcttttgtgtgcacatatacaatgtgcattatacatatatattaaatatatccacaaagcagatgggcaaaaagattttcatgctaatcttcaaaggttcatgctcaatattgtgaaaagcttttaaaagttgttttgaaaagacaatcattttttgtttttgttttaactttcttgtggcaagctataccggaaaagcggcatgtcaaaaatactttaggttctacatagatctctttctctcttttgttttgtttgtttgtttgttaaagttcattatttattttaccttttactgacaatgtgaaactcgaagaaaatgttctctttttaaatatacagtcataaactgttcaaggtaaccataacaaactaggtgttatttattaacgtattataaaataatgtttgatccagtatgtgcttgtcttatttaaaattggaatgtgagacatgttgctgtgacctgtttttctttctcattcacatttgtagatattgtgtgaactacagtatataatgataacaattaaaaggatattctgtggatgtcacgtattttgaaatgatagaactacattagctttgtatcatgtttggataattcatcaatgttcacagtttaaaacatcattaaacattatgtaattacaatgagaaagaatcttacttaaatttggagattttcccccacatctcttttccggatacattataattctggacccctatttatctcaaaactcttaatatatgcagaccaacaggtctttgcattccttttaaataactggttgtgacaaagcttgttgttgatcagattcactgtttcatcatatttattgtaatatattttttgttttgtaaatatgttacaacaaaatgtgattggtctaaaatatttgtaatgtatattaaaaggttcaaaaatatttgtataaatctaagttatttgggtacttgtaggaatacaatgaggagcttgaatgccaccttctgacatgatttacttttaaggaaagttatgaggagagaatacaaaaagcatgcaccaaaatgtaatctgacaggatttctggatttatacgtaatcactcctgccccaacacacacacacacacacacacacacacacacacacacacatgcacgcacacatgattttgattatgctacatgatatatgtttcaaaaagaattagcatagaaatcctggtctcctagccaaaaaaatcaaaggattttcaaaaaaacgaatctgtatgttgaggcaaaaggattgaacctggaagtctgggactttatcatagaaacaaagtctcagatattttagttctttggaaacaaatgctgtaattcaaaagcatttgacctgtcactgtactatctacatgtggaagaatgttcaagttgaatcctaatgccgtgaatgaaacacagtctgtgtagggaatgagcaaaaaagttgaattccaattgctttttggccttttggctaaaataaatgtagcatctaattttatcagttt

SEQ ID NO: 1190 - protein, 913 aa, Homo sapien
MKDSENKGASSPDMEPSYGGGLFDMVKGGAGRLFSNLKDNLKDTLKDTSSRVIQSVTSYTKGDLDFTYVTSRIIVMSFPLDNVDIGFRNQVDDIRSFLDSRHLDHYTVYNLSPKSYRTAKFHSRVSECSWPIRQAPSLHNLFAVCRNMYNWLLQNPKNVCVVHCLDGRAASSILVGAMFIFCNLYSTPGPAIRLLYAKRPGIGLSPSHRRYLGYMCDLLADKPYRPHFKPLTIKSITVSPIPFFNKQRNGCRPYCDVLIGETKIYSTCTDFERMKEYRVQDGKIFIPLNITVQGDVVVSMYHLRSTIGSRLQAKVTNTQIFQLQFHTGFIPLDTTVLKFTKPELDACDVPEKYPQLFQVTLDVELQPHDKVIDLTPPWEHYCTKDVNPSILFSSHQEHQDTLALGGQAPIDIPPDNPRHYGQSGFFASLCWQDQKSEKSFCEEDHAALVNQESEQSDDELLTLSSPHGNANGDKPHGVKKPSKKQQEPAAPPPPEDVDLLGLEGSAMSNSFSPPAAPPTNSELLSDLFGGGGAAGPTQAGQSGVEDVFHPSGPASTQSTPRRSATSTSASPTLRVGEGATFDPFGAPSKPSGQDLLGSFLNTSSASSDPFLQPTRSPSPTVHASSTPAVNIQPDVSGGWDWHAKPGGFGMGSKSAATSPTGSSHGTPTHQSKPQTLDPFADLGTLGSSSFASKPTTPTGLGGGFPPLSSPQKASPQPMGGGWQQGGAYNWQQPQPKPQPSMPHSSPQNRPNYNVSFSAMPGGQNERGKGSSNLEGKQKAADFEDLLSGQGFNAHKDKKGPRTIAEMRKEEMAKEMDPEKLKILEWIEGKERNIRALLSTMHTVLWAGETKWKPVGMADLVTPEQVKKVYRKAVLVVHPDKATGQPYEQYAKMIFMELNDAWSEFENQGQKPLY

SEQ ID NO: 1191 - DNA, 1947 bp, Homo sapien
ggcacgaggccaagagctacgcggcggcggcggagcgcaggcctcgtgccgttacggccatcacggcggccgcagtggcgtcctggagccctcctcagtgctgaagctgctgaaagatggcagaagaagtggtggtagtagccaaatttgattatgtggcccaacaagaacaagagttggacatcaagaagaatgagagattatggcttctggatgattctaagtcctggtggcgagttcgaaattccatgaataaaacaggttttgtgccttctaactatgtggaaaggaaaaacagtgctcggaaagcatctattgtgaaaaacctaaaggataccttaggcattggaaaagtgaaaagaaaacctagtgtgccagattctgcatctcctgctgatgatagttttgttgacccaggggaacgtctctatgacctcaacatgcccgcttatgtgaaatttaactacatggctgagagagaggatgaattatcattgataaaggggacaaaggtgatcgtcatggagaaatgcagtgatgggtggtggcgtggtagctacaatggacaagttggatggttcccttcaaactatgtaactgaagaaggtgacagtcctttgggtgaccatgtgggttctctgtcagagaaattagcagcagtcgtcaataacctaaatactgggcaagtgttgcatgtggtacaggctctttacccattcagctcatctaatgatgaagaacttaatttcgagaaaggagatgtaatggatgttattgaaaaacctgaaaatgacccagagtggtggaaatgcaggaagatcaatggtatggttggtctagtaccaaaaaactatgttaccgttatgcagaataatccattaacttcaggtttggaaccatcacctccacagtgtgattacattaggccttcactcactggaaagtttgctggcaatccttggtattatggcaaagtcaccaggcatcaagcagaaatggcattaaatgaaagaggacatgaaggggatttcctcattcgtgatagtgaatcttcgccaaatgatttctcagtatcactaaaagcacaagggaaaaacaagcattttaaagtccaactaaaagagactgtctactgcattgggcagcgtaaattcagcaccatggaagaacttgtagaacattacaaaaaggcaccaatttttacaagtgaacaaggagaaaaattatatcttgtcaagcatttatcatgatactgctgaccagaagtgactgctgtgtagctgtaatttgtcatgtaattgaagactgagaaaatgttgggtccagtcgtgcttgattggaaattgttgtttctaaatctatatgagaattgacaataagtatttttattataactcagcccatacatatatactatgtatgcagtgcatctgcatagaacagttccttatccttggccttctgttttattgtttttttctttgctgttttccctttgcttctaatattacagttttgtattttgtaaacaaaaatcaaataatgcatatcagaatctttatatggaagaaatcctttattgcctttcctttgtttccttgtaaaggcaccctgttctgttatggtttttcattatataaaattattatatctatatatgacatatgctaaaatttcttggagagtgttaatcttttctgtgactaaatagcaataataagtggaaaattagaaattatttccaggtattatatttgtcacaggccattgtaaataccaagtatattgtgtctgccataatttttaaaaatacattcattgtcttcagtcatacagcaagacacatgagacatagattagaaaacatgttgtacaattttaatttacaactgttggaaataaaaatcacttaatttttttccaaaaaaaaaaaaaaaaaaaaaaaaa

SEQ ID NO: 1192 - protein, 377 aa, Homo sapien
MAEEVVVVAKFDYVAQQEQELDIKKNERLWLLDDSKSWWRVRNSMNKTGFVPSNYVERKNSARKASIVKNLKDTLGIGKVKRKPSVPDSASPADDSFVDPGERLYDLNMPAYVKFNYMAEREDELSLIKGTKVIVMEKCSDGWWRGSYNGQVGWFPSNYVTEEGDSPLGDHVGSLSEKLAAVVNNLNTGQVLHVVQALYPFSSSNDEELNFEKGDVMDVIEKPENDPEWWKCRKINGMVGLVPKNYVTVMQNNPLTSGLEPSPPQCDYIRPSLTGKFAGNPWYYGKVTRHQAEMALNERGHEGDFLIRDSESSPNDFSVSLKAQGKNKHFKVQLKETVYCIGQRKFSTMEELVEHYKKAPIFTSEQGEKLYLVKHLS

SEQ ID NO: 1193 - DNA, 4208 bp, Homo sapien
tctttaagatttgtagctactaagaaagaaaggagctttttttccttgggccttcaaactgaaagaaccgcatgagcctgacggcgcatggtcttaacatcaggctgtgcaggaagaagctatctgcagatggatgccagcacacacaaggaagcagagctctggcaacattgagtcaaagcaaggacacaacatcagagggacggcagagaatccttgtgtgtagtctttggtggcagtttgaaaattgcaaggagggactttaagactacttctgatttgcaaagatggtctgtgctccgagcaggctaaagtgactggacgagacgcactgttggagaaataaaaatgacttcccattatgtgattgccatctttgccctgatgagcttctgtttagccactgcaggtccagagcctggtgcactgtgtgaactgtcacctgtcagtgcctcccatcctgtccaggccttgatggagagcttcactgttttgtcaggctgtgccagcagaggcacaactgggctgccacaggaggtgcatgtcctgaatctcgcactgcgccaggggcctggccagctacagagagaggtcacacttcacctgaatcccatctcctcagtccacatccaccacaagtctgttgtgttcctgctcaactccccacaccccctggtgtggcatctgaagacagagagacttgccactggggtctccagactgtttttggtgtctgagggttctgtggtccagttttcatcagcaaacttctccttgacagcagaaacagaagaaaggaacttcccccatggaaatgaacatctgttaaattgggcccgaaaagagtatggagcagttacttcattcaccgaactcaagatagcaagaaacatttatattaaagtgggggaagatcaagtgttccctccaaagtgcaacatagggaagaattttctctcactcaattaccttgctgagtaccttcaacccaaagcagcagaagggtgtgtgatgtccagccagccccagaatgaggaagtacacatcatcgagctaatcacccccaactctaacccctacagtgctttccaggtggatataacaattgatataagaccttctcaagaggatcttgaagtggtcaaaaatctcatcctgatcttgaagtgcaaaaagtctgtcaactgggtgatcaaatcttttgatgttaagggaagcctgaaaattattgctcctaacagtattggctttggaaaagagagtgaaagatctatgacaatgaccaaatcaataagagatgacattccttcaacccaagggaatctggtgaagtgggctttggacaatggctatagtccaataacttcatacacaatggctcctgtggcaatagtatttcatcttcggcttgaaaataatgaggagatgggagatgaggaagtccacactattcctcctgagctacggatcctgctggaccctggtgccctgcctgccctgcagaacccgcccatccggggaggggaaggccaaaatggaggccttccgtttcctttcccagatatttccaggagagtctggaatgaagagggagaagatgggctccctcggccaaaggaccctgtcattcccagcatacaactgtttcctggtctcagagagccagaagaggtgcaagggagcgtggatattgccctgtctgtcaaatgtgacaatgagaagatgatcgtggctgtagaaaaagattcttttcaggccagtggctactcggggatggacgtcaccctgttggatcctacctgcaaggccaagatgaatggcacacactttgttttggagtctcctctgaatggctgcggtactcggccccggtggtcagcccttgatggtgtggtctactataactccattgtgatacaggttccagcccttggggacagtagtggttggccagatggttatgaagatctggagtcaggtgataatggatttccgggagatatggatgaaggagatgcttccctgttcacccgacctgaaatcgtggtgtttaattgcagccttcagcaggtgaggaaccccagcagcttccaggaacagccccacggaaacatcaccttcaacatggagctatacaacactgacctctttttggtgccctcccagggcgtcttctctgtgccagagaatggacacgtttatgttgaggtatctgttactaaggctgaacaagaactgggatttgccatccaaacgtgctttatctctccatattcgaaccctgataggatgtctcattacaccattattgagaatatttgtcctaaagatgaatctgtgaaattctacagtcccaagagagtgcacttccctatcccgcaagctgacatggataagaagcgattcagctttgtcttcaagcctgtcttcaacacctcactgctctttctacagtgtgagctgacgctgtgtacgaagatggagaagcacccccagaagttgcctaagtgtgtgcctcctgacgaagcctgcacctcgctggacgcctcgataatctgggccatgatgcagaataagaagacgttcaccaagccccttgctgtgatccaccatgaagcagaatctaaagaaaaaggtccaagcatgaaggaaccaaatccaatttctccaccaattttccatggtctggacaccctaaccgtgatgggcattgcgtttgcagcctttgtgatcggagcactcctgacgggggccttgtggtacatctattctcacacaggggagacagcaggaaggcagcaagtccccacctccccgccagcctcggaaaacagcagtgctgcccacagcatcggcagcacgcagagcacgccttgctccagcagcagcacggcctagcccaacccaggcccaacccggcccaacccagcccagcccagctcagctcagctactccaagggcaggaccaatggctgagcctcgtgtccagactcagagggctggattttggttcccttgtaaagacagagtgaatttcagtataaagatcacccgttgtattcaccccacacccagggctagtataaacatgaccctgggcttctgtaccacactagaattcatgtgagaaagctaaaatggtggtcttctccaccagcccctcacaggcttgggggttttctatgtgaaacacatgccagtttttaaaatgctgctttgtccaggtgagaacatccataatttggggccctgagttttacccagactcaaggagttggtaaagggttaatagccagatagtagaaccagtgaggagatgcggccaaagattctttatatctgaaccaagatgtaaaacaagaaatgctttgaggctttctaagcgatcctcctgtctaatttgcacctttgtctggatgcactcttctgaccttgctgccacaacctgtggggtctgatgtgtcccaagatgggtgctgccctcagggactgcaccctgacaagtgttaaggcaacattccttgcttgtgccctgggccaaaaccaatgctgatgaccttatcagcttcctgtttcttcccatactgcatacaccactgcaaaatgtcttaatgcaaattttgtatttcttacaggcctacagaaattgaaaatgaccaaaatcaggaaccacagatttgtgcccattcctaatattttgttctgcaaattaatgtataatttgaggtgaaattcagttataaagtcaaggacgaatttgcacagtgatatatttctatgtgtatgcaagtacaagtatataatatgtcacctggcacattcattttctcagttgaagaagagaaaatttgaaaatgtccttatgcttttagagttgcaacttaagtatatttggtagggtgagtgtttccactcaaaatatgtcaacttaaaaaaaaataggccctttcataaaaaccaaactgtagcaagatgcaaatgcatggcaaatctgtcggtctccagttggttatctgaatagtgtcaccaattccaccaagacagtgctgagattggaaagggcactcatttggattgccttacttctcttgccttaaatatatcccatatatttaatatgtcaaaaagggcttgaggtgaatttcattaaatggaataatatgatgccactttgcagctaaaataagctcagtgatacctccttgtt

SEQ ID NO: 1194 - protein, 849 aa, Homo sapien
MTSHYVIAIFALMSFCLATAGPEPGALCELSPVSASHPVQALMESFTVLSGCASRGTTGLPQEVHVLNLALRQGPGQLQREVTLHLNPISSVHIHHKSVVFLLNSPHPLVWHLKTERLATGVSRLFLVSEGSVVQFSSANFSLTAETEERNFPHGNEHLLNWARKEYGAVTSFTELKIARNIYIKVGEDQVFPPKCNIGKNFLSLNYLAEYLQPKAAEGCVMSSQPQNEEVHIIELITPNSNPYSAFQVDITIDIRPSQEDLEVVKNLILILKCKKSVNWVIKSFDVKGSLKIIAPNSIGFGKESERSMTMTKSIRDDIPSTQGNLVKWALDNGYSPITSYTMAPVAIVFHLRLENNEEMGDEEVHTIPPELRILLDPGALPALQNPPIRGGEGQNGGLPFPFPDISRRVWNEEGEDGLPRPKDPVIPSIQLFPGLREPEEVQGSVDIALSVKCDNEKMIVAVEKDSFQASGYSGMDVTLLDPTCKAKMNGTHFVLESPLNGCGTRPRWSALDGVVYYNSIVIQVPALGDSSGWPDGYEDLESGDNGFPGDMDEGDASLFTRPEIVVFNCSLQQVRNPSSFQEQPHGNITFNMELYNTDLFLVPSQGVFSVPENGHVYVEVSVTKAEQELGFAIQTCFISPYSNPDRMSHYTIIENICPKDESVKFYSPKRVHFPIPQADMDKKRFSFVFKPVFNTSLLFLQCELTLCTKMEKHPQKLPKCVPPDEACTSLDASIIWAMMQNKKTFTKPLAVIHHEAESKEKGPSMKEPNPISPPIFHGLDTLTVMGIAFAAFVIGALLTGALWYIYSHTGETAGRQQVPTSPPASENSSAAHSIGSTQSTPCSSSSTA

SEQ ID NO: 1195 - DNA, 4255 bp, Homo sapien
cagcctcctcctgggacccttgccctgcccccctcccatgggcacggaccccccaccgcctccacccactgccgcgggggggcccgttggggcccagggctggcgggccatgtaaccagggctgctgctgggagcgcggaggggaagggagcccccagccctgctgggccggcccaggcccctccgcggctcccccttccactacccacctgcccggcaccccctccccagtggttgttaaccccgggactccccaagcccagcctctgtgtgcagcagccccaggcgggctaagtctccaagatgcccttggtggatttcttctgcgagacctgctctaagccttggctggtgggctggtgggaccagttcaaaaggatgttgaaccgtgagctcacacacctgtcagaaatgagcaggtccggaaaccaggtctcagagtacatttccacaacattcctggacaaacagaatgaagtggagatcccatcacccacgatgaaggaacgagaaaaacagcaagcgccgcgaccaagaccctcccagccgcccccgccccctgtaccacacttacagcccatgtcccaaatcacagggttgaaaaagttgatgcatagtaacagcctgaacaactctaacattccccgatttggggtgaagaccgatcaagaagagctcctggcccaagaactggagaacctgaacaagtggggcctgaacatcttttgcgtgtcggattacgctggaggccgctcactcacctgcatcatgtacatgatattccaggagcgggacctgctgaagaaattccgcatccctgtggacacgatggtgacatacatgctgacgctggaggatcactaccacgctgacgtggcctaccataacagcctgcacgcagctgacgtgctgcagtccacccacgtactgctggccacgcctgcactagatgcagtgttcacggacctggagattctcgccgccctcttcgcggctgccatccacgatgtggatcaccctggggtctccaaccagttcctcatcaacaccaattcggagctggcgctcatgtacaacgatgagtcggtgctcgagaatcaccacctggccgtgggcttcaagctgctgcaggaggacaactgcgacatcttccagaacctcagcaagcgccagcggcagagcctacgcaagatggtcatcgacatggtgctggccacggacatgtccaagcacatgaccctcctggctgacctgaagaccatggtggagaccaagaaagtgaccagctcaggggtcctcctgctagataactactccgaccgcatccaggtcctccggaacatggtgcactgtgccgacctcagcaaccccaccaagccgctggagctgtaccgccagtggacagaccgcatcatggccgagttcttccagcagggtgaccgagagcgcgagcgtggcatggaaatcagccccatgtgtgacaagcacactgcctccgtggagaagtctcaggtgggttttattgactacattgtgcacccattgtgggagacctgggcggaccttgtccacccagatgcccaggagatcttggacactttggaggacaaccgggactggtactacagcgccatccggcagagcccatctccgccacccgaggaggagtcaagggggccaggccacccacccctgcctgacaagttccagtttgagctgacgctggaggaggaagaggaggaagaaatatcaatggcccagataccgtgcacagcccaagaggcattgactgcgcagggattgtcaggagtcgaggaagctctggatgcaaccatagcctgggaggcatccccggcccaggagtcgttggaagttatggcacaggaagcatccctggaggccgagctggaggcagtgtatttgacacagcaggcacagtccacaggcagtgcacctgtggctccggatgagttctcgtcccgggaggaattcgtggttgctgtaagccacagcagcccctctgccctggctcttcaaagcccccttctccctgcttggaggaccctgtctgtttcagagcatgccccgggcctcccgggcctcccctccacggcggccgaggtggaggcccaacgagagcaccaggctgccaagagggcttgcagtgcctgcgcagggacatttggggaggacacatccgcactcccagctcctggtggcggggggtcaggtggagaccctacctgatccccagacctctgtccctgttcccctccactcctcccctcactcccctgctcccccgaccacctcctcctctgcctcaaagactcttgtcctcttgtccctcctgagaaaaaagaaaacgaaaagtggggtttttttctgttttctttttttcccctttccccctgcccccacccacggggcctttttttggaggtgggggctggggaatgaggggctgaggtcccggaaggattttatttttttgaattttaattgtaacatttttagaaaaagaacaaaaaaagaaaaaaaaaagaaagaaacacagcaactgtagatgctcctgttcctggttcccgctttccacttccaaatccctcccctcaccttcccccactgccccccaagttccaggctcagtcttccagccgcctggggagtctctacctgggcccaagcaggtgtggggcctccttctgggcttttcttctgaatttagaggatttctagaacgtggtcaggaatagccattctaggcggggctggggccagggtggggggcagtcactgtgggaggtcccagctccagcccccctctggtttgctgcctcctctcccctctaaaaaagtcttccgcttgattttgcacaatcccggcgatactcctggcgatactgactagaaagtcagggagctgggggagctgttcactttaggatacgggggtggtatggaagggagcgttcacaccgccagcctcgggcctgggatttgaggagggccctagacctcctccactctccatcccctttcccttccactttgggttcactttgaattttctccgttttttggggcagtggctctgatccactcacccccccgccccccgccccacttctagctgcttctcctcttgtttctgccttaataattcccacggccacaggcaagggggttgcagtggccgcctgcaccttggatgaggcagggccaggcgcccagaacccccatcctggccgcacccccctttccagggtcctccggaccccaccttccacactctgatcacagcccccctaccttttgccctaggaggaagcaataatggtgtataccctcattctcattcctgggcagcccttccttccaccctggcaccaaaataatttctcctccatccgtaccttgcctagcctctccctctcccccagctagtcccctgagcaatacggcagacagatgcaagaccatttttctccaagccatgggggactgtttggaaggaaagccccctctctccctcctcccctcgccctcggcctggttctgcagctggaccgacctcattcatcgcctgccccctacccaattctgagcacacggtactgtagcccccagttcctccctagccttccatccctctgtccaccccagggggaggtaaccccgcactcacactcccttgatgctgtctgtacagggttcatattttgtagcgaaagtcgtttttgtcccagccggcgatcggagtgggccttttctttctttttgttcattctttacctttttttcttttctttctttcttttttgtacatactgtaaggttggtttgtaaattattctacggaggcaaaaagggaaaataaaaacttgcccttccctggctgacccagtcgggaaggtagggaaggaggtctcccgttgggagagtctctgttcctgctgtattatacaactgtaccatagtcctgggaaaagggtggactcaccgctgttgttttatgggaagtcgtgtcatcctaggggttggggctgggcagagcctgtcccctccccccttctccaggagccagggggtgactggagagacagacccacccccaagcagggctcctctccccagggtgagcacaggacctctgtaagctgcttgtgtattgtccactttgacgatcagtcattcggtccgttgatcaataatccttcgatcttgtctccaattaaaccgaggctttcaccga

SEQ ID NO: 1196 - protein, 647 aa, Homo sapien
MPLVDFFCETCSKPWLVGWWDQFKRMLNRELTHLSEMSRSGNQVSEYISTTFLDKQNEVEIPSPTMKEREKQQAPRPRPSQPPPPPVPHLQPMSQITGLKKLMHSNSLNNSNIPRFGVKTDQEELLAQELENLNKWGLNIFCVSDYAGGRSLTCIMYMIFQERDLLKKFRIPVDTMVTYMLTLEDHYHADVAYHNSLHAADVLQSTHVLLATPALDAVFTDLEILAALFAAAIHDVDHPGVSNQFLINTNSELALMYNDESVLENHHLAVGFKLLQEDNCDIFQNLSKRQRQSLRKMVIDMVLATDMSKHMTLLADLKTMVETKKVTSSGVLLLDNYSDRIQVLRNMVHCADLSNPTKPLELYRQWTDRIMAEFFQQGDRERERGMEISPMCDKHTASVEKSQVGFIDYIVHPLWETWADLVHPDAQEILDTLEDNRDWYYSAIRQSPSPPPEEESRGPGHPPLPDKFQFELTLEEEEEEEISMAQIPCTAQEALTAQGLSGVEEALDATIAWEASPAQESLEVMAQEASLEAELEAVYLTQQAQSTGSAPVAPDEFSSREEFVVAVSHSSPSALALQSPLLPAWRTLSVSEHAPGLPGLPSTAAEVEAQREHQAAKRACSACAGTFGEDTSALPAPGGGGSGGDPT

SEQ ID NO: 1197 - DNA, 4508 bp, Homo sapien
cgggcagcgtggaccccggatgagttgcttttaggcttgctggcccgcggggctgtccaggcacgcgaggcccctcaggtacgccctctcttccctgcaggatccggccctcaaagacgagggtcacgcacgcgttacaaccccgaaacagtagcacaagatttaatttttaaaagagcgtgtttcttcggggcttgccgttcgttcgtttccagcctcaggaatttatggtcgcctttttgaatgagcaacaaaatgcttcaacaagttccagaaaacataaattttcctgctgaagaagagaaaatcttggagttttggactgaatttaattgttttcaggaatgcttaaagcaatcaaaacataaaccaaaatttaccttctatgatggtcctccttttgcaactggactgcctcactatggacatatacttgcgggtacaattaaagatatagttacaagatatgctcaccagagtgggtttcatgttgacagaagatttggatgggattgccatggcttacctgtggaatatgaaattgataagacactgggaatcagaggaccagaggatgtggccaaaatggggattacagagtataacaatcagtgccgagcaattgtgatgagatattctgctgagtggaagtctactgttagcagacttggccgatggattgactttgacaatgactataaaactctgtatccacaattcatggaatcagtctggtgggtcttcaaacaactctatgataaaggccttgtttatagaggtgtgaaagtcatgcccttctctacggcatgtaacactccactttccaacttcgagtcacaccagaattataaggatgttcaagatccttcagtatttgtaactttccctttggaagaagatgaaactgtatctttagttgcttggacaaccactccctggactctacctagtaaccttgctgtgtgtgttaatccagaaatgcaatatgtgaaaattaaagatgttgccagaggacgattactcattttaatggaagccagattgtcagccctctataaattggagagtgactatgagatccttgaaagatttcctggtgcctatcttaaaggcaagaagtacaggcccctgtttgactatttcctgaagtgtaaagagaatggcgctttcactgtgcttgttgacaactatgtgaaggaagaagaaggcacaggggttgtccaccaagctccttacttcggtgctgaggactatcgggtctgtatggactttaacattattcggaaagactcactccctgtttgccctgtggatgcttcaggctgcttcacaacggaggtgacagatttcgcaggacagtatgtgaaggatgctgacaaaagtatcatcaggactttgaaggaacaaggccgacttctggttgccaccaccttcactcacagctaccctttttgctggagatcagacactcctctaatttacaaagcagtgcccagctggtttgtgcgagtggagaacatggtggaccagctcctaaggaacaatgacctgtgctactgggtcccagagttggtacgagaaaaacgatttggaaattggctgaaagatgcacgtgactggacaatttccagaaacagatactggggcacccccatcccactgtgggtcagcgatgactttgaggaggtggtatgcattgggtcagtggcggaacttgaagaactgtcaggagcaaagatctcagatctccacagagagagtgttgaccacctgaccattccttcacgctgtgggaagggatccttgcaccgcatctctgaagtgtttgactgttggtttgagagtggcagcatgccctatgctcaggttcattacccgtttgaaaacaagagggagtttgaggatgcttttcctgcagatttcattgccgagggcatcgaccaaaccagaggatggttttataccctgctggtgctggccacggccctctttggacaaccgcctttcaagaacgtaattgtgaatgggcttgtcctggcaagtgatggccaaaaaatgagcaaacggaaaaagaattatccagatccagtttccatcatccagaagtatggtgctgatgccctcagattatatctgattaactcccctgtggtgagagcagaaaacctccgctttaaagaagagggtgtgcgggacgtccttaaggatgtactgctcccatggtacaatgcctatcgcttcttaatccagaacgttctgaggctccagaaggaggaagaaatagaatttctctacaatgagaacacggttagagaaagccccaacattacagaccggtggatcctgtccttcatgcagtctctcattggcttctttgagactgaaatggcagcttataggctttatactgtggtgcctcgcctggtcaagtttgtagatattctgaccaattggtatgttagaatgaaccgcagaagattaaagggtgaaaatgggatggaggattgtgtcatggccctagaaaccttgtttagtgttctgctttctctttgcagacttatagctccctacacaccttttctcactgaattgatgtaccagaatctaaaggtgctgattgaccctgtttctgttcaggacaaggacacactcagcattcactacctcatgctgccccgtgttcgagaagaattgattgacaagaaaacagagagtgcagtatctcagatgcagtctgtgattgaacttggaagagtgatcagagaccgaaaaactattcccataaagtatcctttgaaagaaattgtggttatccatcaagatccagaagctcttaaagatatcaagtctttggagaagtatatcattgaggaactcaatgttcgaaaagttacactgtctacagataaaaacaagtatggcattcggctaagggcagaaccagatcacatggtcctggggaagcgtctgaagggagcctttaaggcagtgatgacgtccatcaagcagttgagcagtgaggagctggagcagttccagaagactgggaccattgttgtggaaggccatgaattgcacgatgaagacatccgcctcatgtacacctttgatcaggccacaggtgggactgcgcaatttgaagcacactcagatgctcaggctttggtcctcttagatgtcactcctgaccagtcaatggtagatgaaggaatggctcgggaagtcatcaatcgcatacagaaacttcgcaaaaagtgcaatctggttccaactgatgaaatcacagtgtactataaagcaaagtctgaaggaacatatctgaatagtgttattgaaagccacacagagttcatatttaccaccataaaggctcccttgaaaccatatccagtttctccatcggataaagtccttattcaagaaaaaacacagttgaagggatctgaactggaaattacactcaccagaggatcttcccttcctggtcctgcttgtgcatatgtcaatcttaacatttgtgcaaatggcagtgaacaaggtggagtattgctcctggaaaatccaaaaggtgacaataggttggaccttttaaagctgaagagtgttgtcactagcatttttggtgtgaaaaatacagagctggctgtcttccatgatgaaacagaaatacaaaaccaaactgacttactgagtcttagtggaaaaacactttgtgtgactgcaggatcggctccctctctgatcaacagttctagtactcttctttgtcagtatatcaacctacagctcctgaatgcaaagccacaagagtgtttaatggggacagtgggcactctcctgcttgaaaacccacttgggcagaatggactcacccaccaaggtcttctgtatgaagcagccaaggtgtttggccttcggagcaggaagctaaagctgtttctgaatgagacccaaacgcaggaaattacagaagacatccccgtgaagactttgaatatgaagactgtgtatgtttctgtgttaccaacaacagcagacttctagcatgtacttatcaatgttgttcggtcagcccttccctaattacacctatcccctacacatacatgcacatagacacacacatgaacacactgaagatatttccttcaggtgtgtgtaaaatatgctgcttggattgaaattcaaatgggattgattagtcaagtaacttgagacctcacagtaatcttcacacttaaccttagacacctatgcagtcatgttgggagcaggttacaatgttacttcagcccacagtttatttctattcttgagttcttaagtacagaagatagaagtgatttaaatggcatagtatatatatcattttctggccttttaaaatttatttgagacctcttgatgaaatggacatattatatatttctgccacctggattttcctggataatttgatggaatattttaagtttcagtaaatcagaacaataaacaaactcagatat

SEQ ID NO: 1198 - protein, 1262 aa, Homo sapien
MLQQVPENINFPAEEEKILEFWTEFNCFQECLKQSKHKPKFTFYDGPPFATGLPHYGHILAGTIKDIVTRYAHQSGFHVDRRFGWDCHGLPVEYEIDKTLGIRGPEDVAKMGITEYNNQCRAIVMRYSAEWKSTVSRLGRWIDFDNDYKTLYPQFMESVWWVFKQLYDKGLVYRGVKVMPFSTACNTPLSNFESHQNYKDVQDPSVFVTFPLEEDETVSLVAWTTTPWTLPSNLAVCVNPEMQYVKIKDVARGRLLILMEARLSALYKLESDYEILERFPGAYLKGKKYRPLFDYFLKCKENGAFTVLVDNYVKEEEGTGVVHQAPYFGAEDYRVCMDFNIIRKDSLPVCPVDASGCFTTEVTDFAGQYVKDADKSIIRTLKEQGRLLVATTFTHSYPFCWRSDTPLIYKAVPSWFVRVENMVDQLLRNNDLCYWVPELVREKRFGNWLKDARDWTISRNRYWGTPIPLWVSDDFEEVVCIGSVAELEELSGAKISDLHRESVDHLTIPSRCGKGSLHRISEVFDCWFESGSMPYAQVHYPFENKREFEDAFPADFIAEGIDQTRGWFYTLLVLATALFGQPPFKNVIVNGLVLASDGQKMSKRKKNYPDPVSIIQKYGADALRLYLINSPVVRAENLRFKEEGVRDVLKDVLLPWYNAYRFLIQNVLRLQKEEEIEFLYNENTVRESPNITDRWILSFMQSLIGFFETEMAAYRLYTVVPRLVKFVDILTNWYVRMNRRRLKGENGMEDCVMALETLFSVLLSLCRLIAPYTPFLTELMYQNLKVLIDPVSVQDKDTLSIHYLMLPRVREELIDKKTESAVSQMQSVIELGRVIRDRKTIPIKYPLKEIVVIHQDPEALKDIKSLEKYIIEELNVRKVTLSTDKNKYGIRLRAEPDHMVLGKRLKGAFKAVMTSIKQLSSEELEQFQKTGTIVVEGHELHDEDIRLMYTFDQATGGTAQFEAHSDAQALVLLDVTPDQSMVDEGMAREVINRIQKLRKKCNLVPTDEITVYYKAKSEGTYLNSVIESHTEFIFTTIKAPLKPYPVSPSDKVLIQEKTQLKGSELEITLTRGSSLPGPACAYVNLNICANGSEQGGVLLLENPKGDNRLDLLKLKSVVTSIFGVKNTELAVFHDETEIQNQTDLLSLSGKTLCVTAGSAPSLINSSSTLLCQYINLQLLNAKPQECLMGTVGTLLLENPLGQNGLTHQGLLYEAAKVFGLRSRKLKLFLNETQTQEITEDIPVKTLNMKTVYVSVLPTTADF

SEQ ID NO: 1199 - DNA, 396 bp, Homo sapien
actccgccttccacgtgcacccactgcctcttcccttctcgcttgggaactctagtctcgcctcgggttgcaatggaccccaactgctcctgtgccgctggtgtctcctgcacctgcgccagctcctgcaagtgcaaagagtgcaaatgcacctcctgcaagaagagctgctgctcctgctgccctgtgggctgtgccaagtgtgcccaaggctgcatctgcaaaggggcatcggagaagtgcagctgctgcgcctgatgtcgggacagccctgctcccaagtacaaatagagtgacccgtaaaatctaggattttttgttttttgctacaatcttgacccctttgctacattcccttttttctgtgaaatatgtgaataataattaaacacttag

SEQ ID NO: 1200 - protein, 61 aa, Homo sapien
MDPNCSCAAGVSCTCASSCKCKECKCTSCKKSCCSCCPVGCAKCAQGCICKGASEKCSCCA

SEQ ID NO: 1201 - DNA, 1919 bp, Homo sapien
ctgaagaacaaatcagcctggtcaccagcttttcggaacagcagagacacagagggcagtcatgagtgaggtcaccaagaattccctggagaaaatccttccacagctgaaatgccatttcacctggaacttattcaaggaagacagtgtctcaagggatctagaagatagagtgtgtaaccagattgaatttttaaacactgagttcaaagctacaatgtacaacttgttggcctacataaaacacctagatggtaacaacgaggcagccctggaatgcttacggcaagctgaagagttaatccagcaagaacatgctgaccaagcagaaatcagaagtctagtcacttggggaaactacgcctgggtctactatcacttgggcagactctcagatgctcagatttatgtagataaggtgaaacaaacctgcaagaaattttcaaatccatacagtattgagtattctgaacttgactgtgaggaagggtggacacaactgaagtgtggaagaaatgaaagggcgaaggtgtgttttgagaaggctctggaagaaaagcccaacaacccagaattctcctctggactggcaattgcgatgtaccatctggataatcacccagagaaacagttctctactgatgttttgaagcaggccattgagctgagtcctgataaccaatacgtcaaggttctcttgggcctgaaactgcagaagatgaataaagaagctgaaggagagcagtttgttgaagaagccttggaaaagtctccttgccaaacagatgtcctccgcagtgcagccaaattttacagaagaaaaggtgacctagacaaagctattgaactgtttcaacgggtgttggaatccacaccaaacaatggctacctctatcaccagattgggtgctgctacaaggcaaaagtaagacaaatgcagaatacaggagaatctgaagctagtggaaataaagagatgattgaagcactaaagcaatatgctatggactattcgaataaagctcttgagaagggactgaatcctctgaatgcatactccgatctcgctgagttcctggagacggaatgttatcagacaccattcaataaggaagtccctgatgctgaaaagcaacaacaatcccatcagcgctactgcaaccttcagaaatataatgggaagtctgaagacactgctgtgcaacatggtttagagggtttgtccataagcaaaaaatcaactgacaaggaagagatcaaagaccaaccacagaatgtatctgaaaatctgcttccacaaaatgcaccaaattattggtatcttcaaggattaattcataagcagaatggagatctgctgcaagccaaatgttatgagaaggaactgggccgcctgctaagggatgccccttcaggcataggcagtattttcctgtcagcatctgagcttgaggatggtagtgaggaaatgggccagggcgcagtcagctccagtcccagagagctcctctctaactcagagcaactgaactgagacagaggaggaaaacagagcatcagaagcctgcagtggtggttgtgacgggtaggaggataggaagacagggggcccaacctgggattgctgagcagggaagctttgcatgttgctctaaggtacatttttaaagagttgttttttggccgggcgcagtgctcatgcctgtaatcccagaactttgggaggccgaggtgggcggatcacgaggtctggagtttgagaccatcctggctaacacagtgaaatcccgtctctactaaaaatacaaaaaattagccaggcgtggtggctggcacctgtagtcccagctacttgggaggctgaggcaggagaatggcgtgaacctggaaggaagaggttgcagagagccaagattgcg

SEQ ID NO: 1202 - protein, 490 aa, Homo sapien
MSEVTKNSLEKILPQLKCHFTWNLFKEDSVSRDLEDRVCNQIEFLNTEFKATMYNLLAYIKHLDGNNEAALECLRQAEELIQQEHADQAEIRSLVTWGNYAWVYYHLGRLSDAQIYVDKVKQTCKKFSNPYSIEYSELDCEEGWTQLKCGRNERAKVCFEKALEEKPNNPEFSSGLAIAMYHLDNHPEKQFSTDVLKQAIELSPDNQYVKVLLGLKLQKMNKEAEGEQFVEEALEKSPCQTDVLRSAAKFYRRKGDLDKAIELFQRVLESTPNNGYLYHQIGCCYKAKVRQMQNTGESEASGNKEMIEALKQYAMDYSNKALEKGLNPLNAYSDLAEFLETECYQTPFNKEVPDAEKQQQSHQRYCNLQKYNGKSEDTAVQHGLEGLSISKKSTDKEEIKDQPQNVSENLLPQNAPNYWYLQGLIHKQNGDLLQAKCYEKELGRLLRDAPSGIGSIFLSASELEDGSEEMGQGAVSSSPRELLSNSEQLN

SEQ ID NO: 1203 - DNA, 4465 bp, Homo sapien
caattgtcatacgacttgcagtgagcgtcaggagcacgtccaggaactcctcagcagcgcctccttcagctccacagccagacgccctcagacagcaaagcctacccccgcgccgcgccctgcccgccgctcggatgctcgcccgcgccctgctgctgtgcgcggtcctggcgctcagccatacagcaaatccttgctgttcccacccatgtcaaaaccgaggtgtatgtatgagtgtgggatttgaccagtataagtgcgattgtacccggacaggattctatggagaaaactgctcaacaccggaatttttgacaagaataaaattatttctgaaacccactccaaacacagtgcactacatacttacccacttcaagggattttggaacgttgtgaataacattcccttccttcgaaatgcaattatgagttatgtcttgacatccagatcacatttgattgacagtccaccaacttacaatgctgactatggctacaaaagctgggaagccttctctaacctctcctattatactagagcccttcctcctgtgcctgatgattgcccgactcccttgggtgtcaaaggtaaaaagcagcttcctgattcaaatgagattgtggaaaaattgcttctaagaagaaagttcatccctgatccccagggctcaaacatgatgtttgcattctttgcccagcacttcacgcatcagtttttcaagacagatcataagcgagggccagctttcaccaacgggctgggccatggggtggacttaaatcatatttacggtgaaactctggctagacagcgtaaactgcgccttttcaaggatggaaaaatgaaatatcagataattgatggagagatgtatcctcccacagtcaaagatactcaggcagagatgatctaccctcctcaagtccctgagcatctacggtttgctgtggggcaggaggtctttggtctggtgcctggtctgatgatgtatgccacaatctggctgcgggaacacaacagagtatgcgatgtgcttaaacaggagcatcctgaatggggtgatgagcagttgttccagacaagcaggctaatactgataggagagactattaagattgtgattgaagattatgtgcaacacttgagtggctatcacttcaaactgaaatttgacccagaactacttttcaacaaacaattccagtaccaaaatcgtattgctgctgaatttaacaccctctatcactggcatccccttctgcctgacacctttcaaattcatgaccagaaatacaactatcaacagtttatctacaacaactctatattgctggaacatggaattacccagtttgttgaatcattcaccaggcaaattgctggcagggttgctggtggtaggaatgttccacccgcagtacagaaagtatcacaggcttccattgaccagagcaggcagatgaaataccagtcttttaatgagtaccgcaaacgctttatgctgaagccctatgaatcatttgaagaacttacaggagaaaaggaaatgtctgcagagttggaagcactctatggtgacatcgatgctgtggagctgtatcctgcccttctggtagaaaagcctcggccagatgccatctttggtgaaaccatggtagaagttggagcaccattctccttgaaaggacttatgggtaatgttatatgttctcctgcctactggaagccaagcacttttggtggagaagtgggttttcaaatcatcaacactgcctcaattcagtctctcatctgcaataacgtgaagggctgtccctttacttcattcagtgttccagatccagagctcattaaaacagtcaccatcaatgcaagttcttcccgctccggactagatgatatcaatcccacagtactactaaaagaacgttcgactgaactgtagaagtctaatgatcatatttatttatttatatgaaccatgtctattaatttaattatttaataatatttatattaaactccttatgttacttaacatcttctgtaacagaagtcagtactcctgttgcggagaaaggagtcatacttgtgaagacttttatgtcactactctaaagattttgctgttgctgttaagtttggaaaacagtttttattctgttttataaaccagagagaaatgagttttgacgtctttttacttgaatttcaacttatattataagaacgaaagtaaagatgtttgaatacttaaacactatcacaagatggcaaaatgctgaaagtttttacactgtcgatgtttccaatgcatcttccatgatgcattagaagtaactaatgtttgaaattttaaagtacttttggttatttttctgtcatcaaacaaaaacaggtatcagtgcattattaaatgaatatttaaattagacattaccagtaatttcatgtctactttttaaaatcagcaatgaaacaataatttgaaatttctaaattcatagggtagaatcacctgtaaaagcttgtttgatttcttaaagttattaaacttgtacatataccaaaaagaagctgtcttggatttaaatctgtaaaatcagatgaaattttactacaattgcttgttaaaatattttataagtgatgttcctttttcaccaagagtataaacctttttagtgtgactgttaaaacttccttttaaatcaaaatgccaaatttattaaggtggtggagccactgcagtgttatctcaaaataagaatattttgttgagatattccagaatttgtttatatggctggtaacatgtaaaatctatatcagcaaaagggtctacctttaaaataagcaataacaaagaagaaaaccaaattattgttcaaatttaggtttaaacttttgaagcaaacttttttttatccttgtgcactgcaggcctggtactcagattttgctatgaggttaatgaagtaccaagctgtgcttgaataacgatatgttttctcagattttctgttgtacagtttaatttagcagtccatatcacattgcaaaagtagcaatgacctcataaaatacctcttcaaaatgcttaaattcatttcacacattaattttatctcagtcttgaagccaattcagtaggtgcattggaatcaagcctggctacctgcatgctgttccttttcttttcttcttttagccattttgctaagagacacagtcttctcatcacttcgtttctcctattttgttttactagttttaagatcagagttcactttctttggactctgcctatattttcttacctgaacttttgcaagttttcaggtaaacctcagctcaggactgctatttagctcctcttaagaagattaaaagagaaaaaaaaaggcccttttaaaaatagtatacacttattttaagtgaaaagcagagaattttatttatagctaattttagctatctgtaaccaagatggatgcaaagaggctagtgcctcagagagaactgtacggggtttgtgactggaaaaagttacgttcccattctaattaatgccctttcttatttaaaaacaaaaccaaatgatatctaagtagttctcagcaataataataatgacgataatacttcttttccacatctcattgtcactgacatttaatggtactgtatattacttaatttattgaagattattatttatgtcttattaggacactatggttataaactgtgtttaagcctacaatcattgatttttttttgttatgtcacaatcagtatattttctttggggttacctctctgaatattatgtaaacaatccaaagaaatgattgtattaagatttgtgaataaatttttagaaatctgattggcatattgagatatttaaggttgaatgtttgtccttaggataggcctatgtgctagcccacaaagaatattgtctcattagcctgaatgtgccataagactgaccttttaaaatgttttgagggatctgtggatgcttcgttaatttgttcagccacaatttattgagaaaatattctgtgtcaagcactgtgggttttaatatttttaaatcaaacgctgattacagataatagtatttatataaataattgaaaaaaattttcttttgggaagagggagaaaatgaaataaatatcattaaagataactcaggagaatcttctttacaattttacgtttagaatgtttaaggttaagaaagaaatagtcaatatgcttgtataaaacactgttcactgttttttttaaaaaaaaaacttgatttgttattaacattgatctgctgacaaaacctgggaatttgggttgtgtatgcgaatgtttcagtgcctcagacaaatgtgtatttaacttatgtaaaagataagtctggaaataaatgtctgtttatttttgtactattta

SEQ ID NO: 1204 - protein, 604 aa, Homo sapien
MLARALLLCAVLALSHTANPCCSHPCQNRGVCMSVGFDQYKCDCTRTGFYGENCSTPEFLTRIKLFLKPTPNTVHYILTHFKGFWNVVNNIPFLRNAIMSYVLTSRSHLIDSPPTYNADYGYKSWEAFSNLSYYTRALPPVPDDCPTPLGVKGKKQLPDSNEIVEKLLLRRKFIPDPQGSNMMFAFFAQHFTHQFFKTDHKRGPAFTNGLGHGVDLNHIYGETLARQRKLRLFKDGKMKYQIIDGEMYPPTVKDTQAEMIYPPQVPEHLRFAVGQEVFGLVPGLMMYATIWLREHNRVCDVLKQEHPEWGDEQLFQTSRLILIGETIKIVIEDYVQHLSGYHFKLKFDPELLFNKQFQYQNRIAAEFNTLYHWHPLLPDTFQIHDQKYNYQQFIYNNSILLEHGITQFVESFTRQIAGRVAGGRNVPPAVQKVSQASIDQSRQMKYQSFNEYRKRFMLKPYESFEELTGEKEMSAELEALYGDIDAVELYPALLVEKPRPDAIFGETMVEVGAPFSLKGLMGNVICSPAYWKPSTFGGEVGFQIINTASIQSLICNNVKGCPFTSFSVPDPELIKTVTINASSSRSGLDDINPTVLLKERSTEL

SEQ ID NO: 1205 - DNA, 2634 bp, Homo sapien
attcggctgcggtacatctcggcactctagctgcagccgggagaggccttgccgccaccgctgtcgcccaagcctccactgccgctgccacctcagcgccggcctctgcatccccagctccagctccgctctgcgccgctgctgccatcgccgctgccacctccgcagcccgggcctccgccgccgccactcaagcatccgtgagtcattttctgcccatctctggtcgcgcggtctccctggtagagtttgtaggcttgcaagatggcagaagcagattttaaaatggtctcggaacctgtcgcccatggggttgccgaagaggagatggctagctcgactagtgattctggggaagaatctgacagcagtagctctagcagcagcactagtgacagcagcagcagcagcagcactagtggcagcagcagcggcagcggcagcagcagcagcagcagcggcagcactagcagccgcagccgcttgtatagaaagaagagggtacctgagccttccagaagggcgcggcgggccccgttgggaacaaatttcgtggataggctgcctcaggcagttagaaatcgtgtgcaagcgcttagaaacattcaagatgaatgtgacaaggtagataccctgttcttaaaagcaattcatgatcttgaaagaaaatatgctgaactcaacaagcctctgtatgataggcggtttcaaatcatcaatgcagaatacgagcctacagaagaagaatgtgaatggaattcagaggatgaggagttcagcagtgatgaggaggtgcaggataacacccctagtgaaatgcctcccttagagggtgaggaagaagaaaaccctaaagaaaacccagaggtgaaagctgaagagaaggaagttcctaaagaaattcctgaggtgaaggatgaagaaaaggaagttcctaaagaaattcctgaggtaaaggctgaagaaaaagcagattctaaagactgtatggaggcaacccctgaagtaaaagaagatcctaaagaagtcccccaggtaaaggcagatgataaagaacagcctaaagcaacagaggctaaggcaagggctgcagtaagagagactcataaaagagttcctgaggaaaggcttcaggacagtgtagatcttaaaagagctaggaagggaaagcctaaaagagaagaccctaaaggcattcctgactattggctgattgttttaaagaatgttgacaagctcgggcctatgattcagaagtatgatgagcccattctgaagttcttgtcggatgttagcctgaagttctcaaaacctggccagcctgtaagttacacctttgaatttcattttctacccaacccatacttcagaaatgaggtgctggtgaagacatatataataaaggcaaaaccagatcacaatgatcccttcttttcttggggatgggaaattgaagattgcaaaggctgcaagatagactggagaagaggaaaagatgttactgtgacaactacccagagtcgcacaactgctactggagaaattgaaatccagccaagagtggttcctaatgcatcattcttcaacttctttagtcctcctgagattcctatgattgggaagctggaaccacgagaagatgctatcctggatgaggactttgaaattgggcagattttacatgataatgtcatcctgaaatcaatctattactatactggagaagtcaatggtacctactatcaatttggcaaacattatggaaacaagaaatacagaaaataagtcaatctgaaagatttttcaagaatcttaaaatctcaagaagtgaagcagattcatacagccttgaaaaaagtaaaaccctgacctgtaacctgaacactattattccttatagtcaagtttttgtggtttcttggtagtctatattttaaaaatagtcctaaaaagtgtctaagtgccagtttattctatctaggctgttgtagtataatattcttcaaaatatgtaagctgttgtcaattatctaaagcatgttagtttggtgctacacagtgttgatttttgtgatgtcctttggtcatgtttctgttagactgtagctgtgaaactgtcagaattgttaactgaaacaaatatttgcttgaaaaaaaaagttcatgaagtaccaatgcaagtgttttatttttttcttttttccagcccataagactaagggtttaaatctgcttgcactagctgtgccttcattagtttgctatagaaatccagtacttatagtaaataaaacagtgtattttgaagtttgactgcttgaaaaagattagcatacatctaatgtgaaaagaccacatttgattcaactgagaccttgtgtatgtgacatatagtggcctataaatttaatcataatgatgttattgtttaccactgaggtgttaatataacatagtatttttgaaaaagtttcttcatcttatattgtgtaattgtaaactaaagataccgtgttttctttgtattgtgttctaccttccctttcactgaaaatgatcacttcatttgatactgtttttcatgttcttgtattgcaacctaaaataaataaatattaaagtgtgttatactat

SEQ ID NO: 1206 - protein, 506 aa, Homo sapien
MAEADFKMVSEPVAHGVAEEEMASSTSDSGEESDSSSSSSSTSDSSSSSSTSGSSSGSGSSSSSSGSTSSRSRLYRKKRVPEPSRRARRAPLGTNFVDRLPQAVRNRVQALRNIQDECDKVDTLFLKAIHDLERKYAELNKPLYDRRFQIINAEYEPTEEECEWNSEDEEFSSDEEVQDNTPSEMPPLEGEEEENPKENPEVKAEEKEVPKEIPEVKDEEKEVPKEIPEVKAEEKADSKDCMEATPEVKEDPKEVPQVKADDKEQPKATEAKARAAVRETHKRVPEERLQDSVDLKRARKGKPKREDPKGIPDYWLIVLKNVDKLGPMIQKYDEPILKFLSDVSLKFSKPGQPVSYTFEFHFLPNPYFRNEVLVKTYIIKAKPDHNDPFFSWGWEIEDCKGCKIDWRRGKDVTVTTTQSRTTATGEIEIQPRVVPNASFFNFFSPPEIPMIGKLEPREDAILDEDFEIGQILHDNVILKSIYYYTGEVNGTYYQFGKHYGNKKYRK

SEQ ID NO: 1207 - DNA, 3865 bp, Homo sapien
tttttcaattttgaacattttgcaaaacgaggggttcgaggcaggtgagagcatcctgcacgtcgccggggagcccgcgggcacttggcgcgctctcctgggaccgtctgcactggaaacccgaaagtttttttttaatatatatttttatgcagatgtatttataaagatataagtaatttttttcttcccttttctccaccgccttgagagcgagtacttttggcaaaggacggaggaaaagctcagcaacattttagggggcggttgtttctttctttcttatttcttttttaaggggaaaaaatttgagtgcatcgcgatggagaaaatgtcccgaccgctccccctgaatcccacctttatcccgcctccctacggcgtgctcaggtccctgctggagaacccgctgaagctcccccttcaccacgaagacgcatttagtaaagataaagacaaagaaaagaagctggatgatgagagtaacagcccgacggtcccccagtcggcattcctggggcctaccttatgggacaaaacccttccctatgacggagatactttccagttggaatacatggacctggaggagtttttgtcagaaaatggcattccccccagcccatctcagcatgaccacagccctcaccctcctgggctgcagccagcttcctcggctgccccctcggtcatggacctcagcagccgggcctctgcaccccttcaccctggcatcccatctccgaactgtatgcagagccccatcagaccaggtcagctgttgccagcaaaccgcaatacaccaagtcccattgatcctgacaccatccaggtcccagtgggttatgagccagacccagcagatcttgccctttccagcatccctggccaggaaatgtttgaccctcgcaaacgcaagttctctgaggaagaactgaagccacagcccatgatcaagaaagctcgcaaagtcttcatccctgatgacctgaaggatgacaagtactgggcaaggcgcagaaagaacaacatggcagccaagcgctcccgcgacgcccggaggctgaaagagaaccagatcgccatccgggcctcgttcctggagaaggagaactcggccctccgccaggaggtggctgacttgaggaaggagctgggcaaatgcaagaacatacttgccaagtatgaggccaggcacgggcccctgtaggatggcatttttgcaggctggctttggaatagatggacagtttgtttcctgtctgatagcaccacacgcaaaccaacctttctgacatcagcactttaccagaggcataaacacaactgactcccattttggtgtgcatctgtgtgtgtgtgcgtgtatatgtgcttgtgctcatgtgtgtggtcagcggtatgtgcgtgtgcgtgttcctttgctcttgccattttaaggtagccctctcatcgtcttttagttccaacaaagaaaggtgccatgtctttactagactgaggagccctctcgcgggtctcccatcccctccctccttcactcctgcctcctcagctttgcttcatgttcgagcttacctactcttccaggactctctgcttggattcactaaaaagggccctggtaaaatagtggatctcagtttttaagagtacaagctcttgtttctgtttagtccgtaagttaccatgctaatgaggtgcacacaataacttagcactactccgcagctctagtcctttataagttgctttcctcttactttcagttttggtgataatcgtcttcaaattaaagtgctgtttagatttattagatcccatatttacttactgctatctactaagtttccttttaattctaccaaccccagataagtaagagtactattaatagaacacagagtgtgtttttgcactgtctgtacctaaagcaataatcctattgtacgctagagcatgctgcctgagtattactagtggacgtaggatattttccctacctaagaatttcactgtcttttaaaaaacaaaaagtaaagtaatgcatttgagcatggccagactattccctaggacaaggaagcagagggaaatgggaggtctaaggatgaggggttaatttatcagtacatgagccaaaaactgcgtcttggattagcctttgacattgatgtgttcggttttgttgttccccttccctcacaccctgcctcgcccccacttttctagttaactttttccatatccctcttgacattcaaaacagttacttaagattcagttttcccactttttggtaatatatatatttttgtgaattatactttgttgtttttaaaaagaaaatcagttgattaagttaataagttgatgttttctaaggccctttttcctagtggtgtcatttttgaatgcctcataaattaatgattctgaagcttatgtttcttattctctgtttgcttttgaacgtatgtgctcttataaagtggacttctgaaaaatgaatgtaaaagacactggtgtatctcagaaggggatggtgttgtcacaaactgtggttaatccaatcaatttaaatgtttactatagaccaaaaggagagattattaaatcgtttaatgtttatacagagtaattataggaagttcttttttgtacagtatttttcagatataaatactgacaatgtattttggaagacatatattatatatagaaaagaggagaggaaaactattccatgttttaaaattatatagcaaagatatatattcaccaatgttgtacagagaagaagtgcttgggggtttttgaagtctttaatattttaagccctatcactgacacatcagcatgttttctgctttaaattaaaattttatgacagtatcgaggcttgtgatgacgaatcctgctctaaaatacacaaggagctttcttgtttcttattaggcctcagaaagaagtcagttaacgtcacccaaaagcacaaaatggattttagtcaaatatttattggatgatacagtgttttttaggaaaagcatctgccacaaaaatgttcacttcgaaattctgagttcctggaatggcacgttgctgccagtgccccagacagttcttttctaccctgcgggcccgcacgttttatgaggttgatatcggtgctatgtgtttggtttataatttgatagatgtttgactttaaagatgattgttcttttgtttcattaagttgtaaaatgtcaagaaattctgctgttacgacaaagaaacattttacgctagattaaaatatcctttcatcaatgggattttctagtttcctgccttcagagtatctaatcctttaatgatctggtggtctcctcgtcaatccatcagcaatgcttctctcatagtgtcatagacttgggaaacccaaccagtaggatatttctacaaggtgttcattttgtcacaagctgtagataacagcaagagatgggggtgtattggaattgcaatacattgttcaggtgaataataaaatcaaaaacttttgcaatcttaagcagagataaataaaagatagcaatatgagacacaggtggacgtagagttggcctttttacaggcaaagaggcgaattgtagaattgttagatggcaatagtcattaaaaacatagaaaaatgatgtctttaagtggagaattgtggaaggattgtaacatggaccatccaaatttatggccgtatcaaatggtagctgaaaaaactatatttgagcactggtctctcttggaattagatgtttatatcaaatgagcatctcaaatgttttctgcagaaaaaaataaaaagattctaataaaaaaa

SEQ ID NO: 1208 - protein, 295 aa, Homo sapien
MEKMSRPLPLNPTFIPPPYGVLRSLLENPLKLPLHHEDAFSKDKDKEKKLDDESNSPTVPQSAFLGPTLWDKTLPYDGDTFQLEYMDLEEFLSENGIPPSPSQHDHSPHPPGLQPASSAAPSVMDLSSRASAPLHPGIPSPNCMQSPIRPGQLLPANRNTPSPIDPDTIQVPVGYEPDPADLALSSIPGQEMFDPRKRKFSEEELKPQPMIKKARKVFIPDDLKDDKYWARRRKNNMAAKRSRDARRLKENQIAIRASFLEKENSALRQEVADLRKELGKCKNILAKYEARHGPL

SEQ ID NO: 1209 - DNA, 3030 bp, Homo sapien
ctgcgaggagtcacattaactttgctctagaagacaactttacaaggatctaaaaggaacaggattaaagatgactgaatactgggttccagaaatttaaaacaatcagcttagcaaatcatatattcttctgtggagctgagaattgatgtccgctcttccccgtgatttggaactttccaatcccagagaaaagttgacaaagggactgcccaggactgagtccatatggaagaagaacttcctcttttctctggagacagtggcaagccagtacaggctactctgtcatctttgaagatgttagatgtgggaaagtggccaattttttccctttgttctgaagaagaactacagttaattcgtcaggcttgtgtctttggcagtgctggcaatgaagttttatacactacagtaaatgatgagatttttgtgcttggcacaaactgctgtggctgtttggggttaggtgacgtccagagcaccattgaacctcggagactggattctttaaatggcaaaaaaatagcctgcctcagctatgggagtggtccacatattgtccttgcaacaacagaaggagaagtctttacctggggtcataatgcttatagccagctgggcaatgggacaactaatcatggtttagtgccctgtcatatctctactaatctgtcaaacaaacaagtcattgaagttgcctgtgggtcttaccattctttggtgctaacatctgatggagaggtatttgcctggggttataataactctgggcaggtaggatctggatcaacagttaatcagccaatccctcgaagagtcactggctgcctacaaaataaagtagttgtgaccatagcatgtgggcagatgtgctgcatggcagtagtagacacgggggaggtctatgtctggggttacaacggaaacgggcagcttggactcggcaacagtggcaaccagccaaccccttgcagagtggcagctttgcaaggcatccgtgtccagagggtcgcctgtggctacgcacacacattagtattaacagatgaaggccaagtgtatgcttggggcgccaattcttatgggcagttgggcactggcaataaaagcaaccagtcctatcctactcctgtcactgtggaaaaggacaggattatcgagattgcagcctgtcactccacacacacgtctgcggccaagacgcagggtgggcacgtgtacatgtggggccagtgccggggtcagtccgtgatcctcccgcacctcacccacttctcctgcactgacgacgtgtttgcctgctttgccacgcccgccgtcacgtggcgcctcctctccgtggaacctgatgaccacctcacagtggctgagtcactgaagagggaatttgacaacccggacactgcagacctgaagtttctagttgatggaaagtacatttatgcacataaagtccttctcaagattcgatgtgagcattttcgttcgtcattggaagataacgaggatgatattgtagaaatgagtgaattttcatatcctgtttaccgggccttcctggaatacctatacacagacagcatcagcctttctcctgaggaggcagtaggactgctagacttggctacattttatagagaaaatcgtttgaaaaagctctgccaacaaactatcaagcaaggcatctgcgaggagaatgccatcgctctgctctcggctgcggtgaagtatgatgcacaggatttagaagaattctgcttcaggttttgcataaaccatctgactgtagtaacacaaacatcaggttttgcagaaatggaccatgatctcctgaagaactttatcagcaaagcaagcagagttggagcctttaaaaattgatcccatctgcaggaaagtttttgagcctttccatttcccctgcaaaagccagagatgaatcacttctctttaattaatagtatgtatgatgagctatgtttggctgagtacttgtaactgtcagaagaaggatggtggtgagtggtctttgtctgcctaaacccagagtttatgtagaaagcattgaatgttctgatcagatgtgactaaggtcaaggaaaaaaaattgaaatatcttatttaccatttcctctttttgagtcacttaaattggacacctttggtaccctggtctcagtatatgctattctggcccaaatgttccattattcagctggctgataccacatagatagcttgacaaggagtgctgtctgtccttaccacattttcagcactcagcacagtgccttgtgtataataggcactcaatttattataaatcttcagtatgtcctgagaacagctttagtcatggaatactgggagaaggaataactttcacaaaataaacttaaaacagcctgtaattattgaggttcacattcttctggtatatcattctgagaaattgtggctaatttagaacattgtttagaattgacaaaaggccctggcaattaaattgtcaaggcccaagggctaattttaattttctttttacttggagtcattcattaatttctcacatgggattatggagtatgaagtattatctttgaatgaaattcctgggctgatctgccttacataatcacataaggtcctttgcttttctttgtgttaagagggacttgcctctgtaaatgaaaatgacaatgtgcttttcttgtagttgactttcatgtcactcactataaaataggtctcttaacctggcaccagtataactataaagcactagctgagaaggaactgatacttacatttcatggacagcattaacaagaatgagataaatttgtactttttagatcaaaacaaattacctaattgcaaaagagaaactgaaatggaacatagtctcagattcttctaatgtgtatctcacaatgtcatgtaatgtaaaggaaacccttttggaattagaattcttgttctgatgctgaactatttggtaataaagtgcttatttgcagataacag

SEQ ID NO: 1210 - protein, 551 aa, Homo sapien
MEEELPLFSGDSGKPVQATLSSLKMLDVGKWPIFSLCSEEELQLIRQACVFGSAGNEVLYTTVNDEIFVLGTNCCGCLGLGDVQSTIEPRRLDSLNGKKIACLSYGSGPHIVLATTEGEVFTWGHNAYSQLGNGTTNHGLVPCHISTNLSNKQVIEVACGSYHSLVLTSDGEVFAWGYNNSGQVGSGSTVNQPIPRRVTGCLQNKVVVTIACGQMCCMAVVDTGEVYVWGYNGNGQLGLGNSGNQPTPCRVAALQGIRVQRVACGYAHTLVLTDEGQVYAWGANSYGQLGTGNKSNQSYPTPVTVEKDRIIEIAACHSTHTSAAKTQGGHVYMWGQCRGQSVILPHLTHFSCTDDVFACFATPAVTWRLLSVEPDDHLTVAESLKREFDNPDTADLKFLVDGKYIYAHKVLLKIRCEHFRSSLEDNEDDIVEMSEFSYPVYRAFLEYLYTDSISLSPEEAVGLLDLATFYRENRLKKLCQQTIKQGICEENAIALLSAAVKYDAQDLEEFCFRFCINHLTVVTQTSGFAEMDHDLLKNFISKASRVGAFKN

SEQ ID NO: 1211 - DNA, 1776 bp, Homo sapien
gggggctgtagctggtgagaggaagtcctagaggctatggacactctgctgctgggatcaccgagatgagcagcagctgctcagggctgagcagggtcctggtggccgtggctacagccctggtgtctgcctcctccccctgcccccaggcctggggccccccaggggtccagtatgggcagccaggcaggtccgtgaagctgtgttgtcctggagtgactgccggggacccagtgtcctggtttcgggatggggagccaaagctgctccagggacctgactctgggctagggcatgaactggtcctggcccaggcagacagcactgatgagggcacctacatctgccagaccctggatggtgcacttgggggcacagtgaccctgcagctgggctaccctccagcccgccctgttgtctcctgccaagcagccgactatgagaacttctcttgcacttggagtcccagccagatcagcggtttacccacccgctacctcacctcctacaggaagaagacagtcctaggagctgatagccagaggaggagtccatccacagggccctggccatgcccacaggatcccctaggggctgcccgctgtgttgtccacggggctgagttctggagccagtaccggattaatgtgactgaggtgaacccactgggtgccagcacacgcctgctggatgtgagcttgcagagcatcttgcgccctgacccaccccagggcctgcgggtagagtcagtaccaggttacccccgacgcctgcgagccagctggacataccctgcctcctggccgtgccagccccacttcctgctcaagttccgtttgcagtaccgtccggcgcagcatccagcctggtccacggtggagccagctggactggaggaggtgatcacagatgctgtggctgggctgccccatgctgtacgagtcagtgcccgggactttctagatgctggcacctggagcacctggagcccggaggcctggggaactccgagcactgggaccataccaaaggagataccagcatggggccagctacacacgcagccagaggtggagcctcaggtggacagccctgctcctccaaggccctccctccaaccacaccctcggctacttgatcacagggactctgtggagcaggtagctgtgctggcgtctttgggaatcctttctttcctgggactggtggctggggccctggcactggggctctggctgaggctgagacggggtgggaaggatggatccccaaagcctgggttcttggcctcagtgattccagtggacaggcgtccaggagctccaaacctgtagaggacccaggagggcttcggcagattccacctataattctgtcttgctggtgtggatagaaaccaggcaggacagtagatccctatggttggatctcagctggaagttctgtttggagcccatttctgtgagaccctgtatttcaaatttgcagctgaaaggtgcttgtacctctgatttcaccccagagttggagttctgctcaaggaacgtgtgtaatgtgtacatctgtgtccatgtgtgaccatgtgtctgtgaggcagggaacatgtattctctgcatgcatgtatgtaggtgcctggggagtgtgtgtgggtccttggctcttggcctttccccttgcaggggttgtgcaggtgtgaataaagagaataaggaagttcttggaaaaaaaaaaaaaaaaaaaaaaaaaaaaaaaaaaaaaaaaaaaaaaaaaaaaaa

SEQ ID NO: 1212 - protein, 422 aa, Homo sapien
MSSSCSGLSRVLVAVATALVSASSPCPQAWGPPGVQYGQPGRSVKLCCPGVTAGDPVSWFRDGEPKLLQGPDSGLGHELVLAQADSTDEGTYICQTLDGALGGTVTLQLGYPPARPVVSCQAADYENFSCTWSPSQISGLPTRYLTSYRKKTVLGADSQRRSPSTGPWPCPQDPLGAARCVVHGAEFWSQYRINVTEVNPLGASTRLLDVSLQSILRPDPPQGLRVESVPGYPRRLRASWTYPASWPCQPHFLLKFRLQYRPAQHPAWSTVEPAGLEEVITDAVAGLPHAVRVSARDFLDAGTWSTWSPEAWGTPSTGTIPKEIPAWGQLHTQPEVEPQVDSPAPPRPSLQPHPRLLDHRDSVEQVAVLASLGILSFLGLVAGALALGLWLRLRRGGKDGSPKPGFLASVIPVDRRPGAPNL

SEQ ID NO: 1213 - DNA, 1563 bp, Homo sapien
agttgcagtggaaagaaatgtgtcatctgtggtttggtttttaaaagtggaaaactagctgcacatatccttttttactgcagatttactttaaggctcatattctccaagtctattctgctttaaaaagaagacaagaaaagaagtggtttatcaaaatcacgttataatcagattttgaccaagcattttgtaagattgccaagtatgcccacggacatggaacacacaggacattacctacatcttgcctttctgatgacaacagttttttctttgtctcctggaacaaaagcaaactatacccgtctgtgggctaacagtacttcttcctgggattcagttattcaaaacaagacaggcagaaaccaaaatgaaaacattaacacaaaccctataactcctgaagtagattataaaggtaattctacaaacatgcctgaaacatctcacatcgtagctttaacttctaaatctgaacaggagctttatataccttctgtcgtcagcaacagtccttcaacagtacagagcattgaaaacacaagcaaaagtcatggtgaaattttcaaaaaggatgtctgtgcggaaaacaacaacaacatggctatgctaatttgcttaattataattgcagtgctttttcttatctgtacctttctatttctatcaactgtggttttggcaaacaaagtctcttctctcagacgatcaaaacaagtaggcaagcgtcagcctagaagcaatggcgattttctggcaagcggtctatggcccgctgaatcagacacttggaaaagaacaaaacagctcacaggacccaacctagtgatgcaatctactggagtgctcacagctacaagggaaagaaaagatgaagaaggaactgaaaaacttactaacaaacagataggttagtgaagaaaaatgcaaagtagcaatgagaaggcttatggagtaaaaatgaagtcagttggtatttaatcccaaagtgttgttctgattatctaaaatttgacatggtagaccttgcaatttagaatcaagcaggtgagacagggagaagtatgcctgcttaattatttaaactgtgtacttttgttttgacactgaatattttaaaaagcaaataataaaataactaagcatttgaggaaaattttaaggataaattgaggaaactgattaatagagatagcaagggataattaaataaatattccctatgtagcaacagtggttagatgatctttgtctgaatgtaataaaactttgaatagttttagtgtgtccttaaagccaagtatatgctttaacatcaaatggaagtcaaattcctaatgcatagatagagagagctaaactgtgtaatttaatggtatcttccttgctggatgtggcagaatccacaccagcttatcaaccaacacagctaattttagaataggtcctttatctttccatatggcacacgtaagaaagtgtttttctactattaatattaaattaaaacctttacttttgtataataaattaaaactcagaataaacctgtgaccacgt

SEQ ID NO: 1214 - protein, 232 aa, Homo sapien
MEHTGHYLHLAFLMTTVFSLSPGTKANYTRLWANSTSSWDSVIQNKTGRNQNENINTNPITPEVDYKGNSTNMPETSHIVALTSKSEQELYIPSVVSNSPSTVQSIENTSKSHGEIFKKDVCAENNNNMAMLICLIIIAVLFLICTFLFLSTVVLANKVSSLRRSKQVGKRQPRSNGDFLASGLWPAESDTWKRTKQLTGPNLVMQSTGVLTATRERKDEEGTEKLTNKQIG

SEQ ID NO: 1215 - DNA, 1056 bp, Homo sapien
gtctgcgcggagtctgagcggcgctcgtcccgtcccaaggccgacgccagcacgccgtcatggcccccgcagcggcgacggggggcagcaccctgcccagtggcttctcggtcttcaccaccttgcccgacttgctcttcatctttgagtttatcttcgggggcctggtgtggatcctggtggcctcctccctggtgccctggcccctggtccagggctgggtgatgttcgtgtctgtgttctgcttcgtggccaccaccaccttgatcatcctgtacataattggagcccacggtggagagacttcctgggtcaccttggacgcagcctaccactgcaccgctgccctcttttacctcagcgcctcagtcctggaggccctggccaccatcacgatgcaagacggcttcacctacaggcactaccatgaaaacattgctgccgtggtgttctcctacatagccactctgctctacgtggtccatgcggtgttctctttaatcagatggaagtcttcataaagccgcagtagaacttgagctgaaaacccagatggtgttaactggccgccccactttccggcataactttttagaaaacagaaatgcccttgatggtggaaaaaagaaaacaaccacccccccactgcccaaaaaaaaaagccctgccctgttgctcgtgggtgctgtgtttactctcccgtgtgccttcgcgtccgggttgggagcttgctgtgtctaacctccaactgctgtgctgtctgctagggtcacctcctgtttgtgaaaggggaccttcttgttcgggggtgggaagtggcgaccgtgacctgagaaggaaagaaagatcctctgctgacccctggagcagctctcgagaactacctgttggtattgtccacaagctctcccgagcgccccatcttgtgccatgttttaagtcttcatggatgttctgcatgtcatggggactaaaactcacccaacagatctttccagaggtccatggtggaagacgataaccctgtgaaatactttataaaatgtcttaatgttc

SEQ ID NO: 1216 - protein, 153 aa, Homo sapien
MAPAAATGGSTLPSGFSVFTTLPDLLFIFEFIFGGLVWILVASSLVPWPLVQGWVMFVSVFCFVATTTLIILYIIGAHGGETSWVTLDAAYHCTAALFYLSASVLEALATITMQDGFTYRHYHENIAAVVFSYIATLLYVVHAVFSLIRWKSS

SEQ ID NO: 1217 - DNA, 2755 bp, Homo sapien
cctacccgcgcgcaggccaagttgctgaatcaatggagccctccccaacccgggcgttccccagcgaggcttccttcccatcctcctgaccaccggggcttttcgtgagctcgtctctgatctcgcgcaagagtgacacacaggtgttcaaagacgcttctggggagtgagggaagcggtttacgagtgacttggctggagcctcaggggcgggcactggcacggaacacaccctgaggccagccctggctgcccaggcggagctgcctcttctcccgcgggttggtggacccgctcagtacggagttggggaagctctttcacttcggaggattgctcaacaaccatgctgggcatctggaccctcctacctctggttcttacgtctgttgctagattatcgtccaaaagtgttaatgcccaagtgactgacatcaactccaagggattggaattgaggaagactgttactacagttgagactcagaacttggaaggcctgcatcatgatggccaattctgccataagccctgtcctccaggtgaaaggaaagctagggactgcacagtcaatggggatgaaccagactgcgtgccctgccaagaagggaaggagtacacagacaaagcccatttttcttccaaatgcagaagatgtagattgtgtgatgaaggacatggcttagaagtggaaataaactgcacccggacccagaataccaagtgcagatgtaaaccaaactttttttgtaactctactgtatgtgaacactgtgacccttgcaccaaatgtgaacatggaatcatcaaggaatgcacactcaccagcaacaccaagtgcaaagaggaaggatccagatctaacttggggtggctttgtcttcttcttttgccaattccactaattgtttgggtgaagagaaaggaagtacagaaaacatgcagaaagcacagaaaggaaaaccaaggttctcatgaatctccaaccttaaatcctgaaacagtggcaataaatttatctgatgttgacttgagtaaatatatcaccactattgctggagtcatgacactaagtcaagttaaaggctttgttcgaaagaatggtgtcaatgaagccaaaatagatgagatcaagaatgacaatgtccaagacacagcagaacagaaagttcaactgcttcgtaattggcatcaacttcatggaaagaaagaagcgtatgacacattgattaaagatctcaaaaaagccaatctttgtactcttgcagagaaaattcagactatcatcctcaaggacattactagtgactcagaaaattcaaacttcagaaatgaaatccaaagcttggtctagagtgaaaaacaacaaattcagttctgagtatatgcaattagtgtttgaaaagattcttaatagctggctgtaaatactgcttggttttttactgggtacattttatcatttattagcgctgaagagccaacatatttgtagatttttaatatctcatgattctgcctccaaggatgtttaaaatctagttgggaaaacaaacttcatcaagagtaaatgcagtggcatgctaagtacccaaataggagtgtatgcagaggatgaaagattaagattatgctctggcatctaacatatgattctgtagtatgaatgtaatcagtgtatgttagtacaaatgtctatccacaggctaaccccactctatgaatcaatagaagaagctatgaccttttgctgaaatatcagttactgaacaggcaggccactttgcctctaaattacctctgataattctagagattttaccatatttctaaactttgtttataactctgagaagatcatatttatgtaaagtatatgtatttgagtgcagaatttaaataaggctctacctcaaagacctttgcacagtttattggtgtcatattatacaatatttcaattgtgaattcacatagaaaacattaaattataatgtttgactattatatatgtgtatgcattttactggctcaaaactacctacttctttctcaggcatcaaaagcattttgagcaggagagtattactagagctttgccacctctccatttttgccttggtgctcatcttaatggcctaatgcacccccaaacatggaaatatcaccaaaaaatacttaatagtccaccaaaaggcaagactgcccttagaaattctagcctggtttggagatactaactgctctcagagaaagtagctttgtgacatgtcatgaacccatgtttgcaatcaaagatgataaaatagattcttatttttcccccacccccgaaaatgttcaataatgtcccatgtaaaacctgctacaaatggcagcttatacatagcaatggtaaaatcatcatctggatttaggaattgctcttgtcatacccccaagtttctaagatttaagattctccttactactatcctacgtttaaatatctttgaaagtttgtattaaatgtgaattttaagaaataatatttatatttctgtaaatgtaaactgtgaagatagttataaactgaagcagatacctggaaccacctaaagaacttccatttatggaggatttttttgccccttgtgtttggaattataaaatataggtaaaagtacgtaattaaataatgtttttggtaaaaaaaaaaaaaaaaaaaaaaaaaaaaaaaaaaaaaaaaaaaaaaaaaaaaaaaaaaaaaaaaaaa

SEQ ID NO: 1218 - protein, 335 aa, Homo sapien
MLGIWTLLPLVLTSVARLSSKSVNAQVTDINSKGLELRKTVTTVETQNLEGLHHDGQFCHKPCPPGERKARDCTVNGDEPDCVPCQEGKEYTDKAHFSSKCRRCRLCDEGHGLEVEINCTRTQNTKCRCKPNFFCNSTVCEHCDPCTKCEHGIIKECTLTSNTKCKEEGSRSNLGWLCLLLLPIPLIVWVKRKEVQKTCRKHRKENQGSHESPTLNPETVAINLSDVDLSKYITTIAGVMTLSQVKGFVRKNGVNEAKIDEIKNDNVQDTAEQKVQLLRNWHQLHGKKEAYDTLIKDLKKANLCTLAEKIQTIILKDITSDSENSNFRNEIQSLV

SEQ ID NO: 1219 - DNA, 2508 bp, Homo sapien
cctacccgcgcgcaggccaagttgctgaatcaatggagccctccccaacccgggcgttccccagcgaggcttccttcccatcctcctgaccaccggggcttttcgtgagctcgtctctgatctcgcgcaagagtgacacacaggtgttcaaagacgcttctggggagtgagggaagcggtttacgagtgacttggctggagcctcaggggcgggcactggcacggaacacaccctgaggccagccctggctgcccaggcggagctgcctcttctcccgcgggttggtggacccgctcagtacggagttggggaagctctttcacttcggaggattgctcaacaaccatgctgggcatctggaccctcctacctctggttcttacgtctgttgctagattatcgtccaaaagtgttaatgcccaagtgactgacatcaactccaagggattggaattgaggaagactgttactacagttgagactcagaacttggaaggcctgcatcatgatggccaattctgccataagccctgtcctccagatgtgaacatggaatcatcaaggaatgcacactcaccagcaacaccaagtgcaaagaggaaggatccagatctaacttggggtggctttgtcttcttcttttgccaattccactaattgtttgggtgaagagaaaggaagtacagaaaacatgcagaaagcacagaaaggaaaaccaaggttctcatgaatctccaaccttaaatcctgaaacagtggcaataaatttatctgatgttgacttgagtaaatatatcaccactattgctggagtcatgacactaagtcaagttaaaggctttgttcgaaagaatggtgtcaatgaagccaaaatagatgagatcaagaatgacaatgtccaagacacagcagaacagaaagttcaactgcttcgtaattggcatcaacttcatggaaagaaagaagcgtatgacacattgattaaagatctcaaaaaagccaatctttgtactcttgcagagaaaattcagactatcatcctcaaggacattactagtgactcagaaaattcaaacttcagaaatgaaatccaaagcttggtctagagtgaaaaacaacaaattcagttctgagtatatgcaattagtgtttgaaaagattcttaatagctggctgtaaatactgcttggttttttactgggtacattttatcatttattagcgctgaagagccaacatatttgtagatttttaatatctcatgattctgcctccaaggatgtttaaaatctagttgggaaaacaaacttcatcaagagtaaatgcagtggcatgctaagtacccaaataggagtgtatgcagaggatgaaagattaagattatgctctggcatctaacatatgattctgtagtatgaatgtaatcagtgtatgttagtacaaatgtctatccacaggctaaccccactctatgaatcaatagaagaagctatgaccttttgctgaaatatcagttactgaacaggcaggccactttgcctctaaattacctctgataattctagagattttaccatatttctaaactttgtttataactctgagaagatcatatttatgtaaagtatatgtatttgagtgcagaatttaaataaggctctacctcaaagacctttgcacagtttattggtgtcatattatacaatatttcaattgtgaattcacatagaaaacattaaattataatgtttgactattatatatgtgtatgcattttactggctcaaaactacctacttctttctcaggcatcaaaagcattttgagcaggagagtattactagagctttgccacctctccatttttgccttggtgctcatcttaatggcctaatgcacccccaaacatggaaatatcaccaaaaaatacttaatagtccaccaaaaggcaagactgcccttagaaattctagcctggtttggagatactaactgctctcagagaaagtagctttgtgacatgtcatgaacccatgtttgcaatcaaagatgataaaatagattcttatttttcccccacccccgaaaatgttcaataatgtcccatgtaaaacctgctacaaatggcagcttatacatagcaatggtaaaatcatcatctggatttaggaattgctcttgtcatacccccaagtttctaagatttaagattctccttactactatcctacgtttaaatatctttgaaagtttgtattaaatgtgaattttaagaaataatatttatatttctgtaaatgtaaactgtgaagatagttataaactgaagcagatacctggaaccacctaaagaacttccatttatggaggatttttttgccccttgtgtttggaattataaaatataggtaaaagtacgtaattaaataatgtttttggtaaaaaaaaaaaaaaaaaaaaaaaaaaaaaaaaaaaaaaaaaaaaaaaaaaaaaaaaaaaaaaaaaaa

SEQ ID NO: 1220 - protein, 103 aa, Homo sapien
MLGIWTLLPLVLTSVARLSSKSVNAQVTDINSKGLELRKTVTTVETQNLEGLHHDGQFCHKPCPPDVNMESSRNAHSPATPSAKRKDPDLTWGGFVFFFCQFH

SEQ ID NO: 1221 - DNA, 3129 bp, Homo sapien
cccgcactaaagacgcttcttcccggcgggtaggaatcccgccggcgagccgaacagttccccgagcgcagcccgcggaccaccacccggccgcacgggccgcttttgtcccccgcccgccgcttctgtccgagaggccgcccgcgaggcgcatcctgaccgcgagcgtcgggtcccagagccgggcgcggctggggcccgaggctagcatctctcgggagccgcaaggcgagagctgcaaagtttaattagacacttcagaattttgatcacctaatgttgatttcagatgtaaaagtcaagagaagactctaaaaatagcaaagatgcttttgagccagaatgccttcatcttcagatcacttaatttggttctcatggtgtatatcagcctcgtgtttggtatttcatatgattcgcctgattacacagatgaatcttgcactttcaagatatcattgcgaaatttccggtccatcttatcatgggaattaaaaaaccactccattgtaccaactcactatacattgctgtatacaatcatgagtaaaccagaagatttgaaggtggttaagaactgtgcaaataccacaagatcattttgtgacctcacagatgagtggagaagcacacacgaggcctatgtcaccgtcctagaaggattcagcgggaacacaacgttgttcagttgctcacacaatttctggctggccatagacatgtcttttgaaccaccagagtttgagattgttggttttaccaaccacattaatgtgatggtgaaatttccatctattgttgaggaagaattacagtttgatttatctctcgtcattgaagaacagtcagagggaattgttaagaagcataaacccgaaataaaaggaaacatgagtggaaatttcacctatatcattgacaagttaattccaaacacgaactactgtgtatctgtttatttagagcacagtgatgagcaagcagtaataaagtctcccttaaaatgcaccctccttccacctggccaggaatcagaatcagcagaatctgccaaaataggaggaataattactgtgtttttgatagcattggtcttgacaagcaccatagtgacactgaaatggattggttatatatgcttaagaaatagcctccccaaagtcttgaggcaaggtctcgctaagggctggaatgcagtggctattcacaggtgcagtcataatgcactacagtctgaaactcctgagctcaaacagtcgtcctgcctaagcttccccagtagctgggattacaagcgtgcatccctgtgccccagtgattaagttttattatgtagaaaataaagagcaaacagtacagctgatatggactctctctctctttttttttttttttaagaattttcataactttttagcctggccatttcctaacctgccaccgttggaagccatggatatggtggaggtcatttacatcaacagaaagaagaaagtgtgggattataattatgatgatgaaagtgatagcgatactgaggcagcgcccaggacaagtggcggtggctataccatgcatggactgactgtcaggcctctgggtcaggcctctgccacctctacagaatcccagttgatagacccggagtccgaggaggagcctgacctgcctgaggttgatgtggagctccccacgatgccaaaggacagccctcagcagttggaactcttgagtgggccctgtgagaggagaaagagtccactccaggacccttttcccgaagaggactacagctccacggaggggtctgggggcagaattaccttcaatgtggacttaaactctgtgtttttgagagttcttgatgacgaggacagtgacgacttagaagcccctctgatgctatcgtctcatctggaagagatggttgacccagaggatcctgataatgtgcaatcaaaccatttgctggccagcggggaagggacacagccaacctttcccagcccctcttcagagggcctgtggtccgaagatgctccatctgatcaaagtgacacttctgagtcagatgttgaccttggggatggttatataatgagatgactccaaaactattgaatgaacttggacagacaagcacctacagggttctttgtctctgcatcctaacttgctgccttatcgtctgcaagtgttctccaagggaaggaggaggaaactgtggtgttcctttcttccaggtgacatcacctatgcacattcccagtatggggaccatagtatcattcagtgcattgtttacatattcaaagtggtgcactttgaaggaagcacatgtgcacctttcctttacactaatgcacttaggatgtttctgcatcatgtctaccagggagcagggttccccacagtttcagaggtggtccaggaccctatgatatttctcttctttcgttcttttttttttttttttgagacagagtctcgttctgtcgcccaagctggagcgcaatggtgtgatcttggctcactgcaacatccgcctcccgggttcaggtgattctcctgcctcagcctccctcgcaagtagctgggattacaggcgcctgccaccatgcctagcaaatttttgtatttttagtggagacaggattttaccatgttggccaggctggtctcgaactcctgacctcaagtgatctgccctcctcagcctcgtaaagtgctgggattacaggggtgagccgctgtgcctggctggccctgtgatatttctgtgaaataaattgggccagggtgggagcagggaaagaaaaggaaaatagtagcaagagctgcaaagcaggcaggaagggaggaggagagccaggtgagcagtggagagaaggggggccctgcacaaggaaacagggaagagccatcgaagtttcagtcggtgagccttgggcacctcacccatgtcacatcctgtctcctgcaattggaattccaccttgtccagccctccccagttaaagtggggaagacagactttaggatcacgtgtgtgactaatacagaaaggaaacatggcgtcggggagagggataaaacctgaatgccatattttaagttaaaaaaaaaaaa

SEQ ID NO: 1222 - protein, 331 aa, Homo sapien
MLLSQNAFIFRSLNLVLMVYISLVFGISYDSPDYTDESCTFKISLRNFRSILSWELKNHSIVPTHYTLLYTIMSKPEDLKVVKNCANTTRSFCDLTDEWRSTHEAYVTVLEGFSGNTTLFSCSHNFWLAIDMSFEPPEFEIVGFTNHINVMVKFPSIVEEELQFDLSLVIEEQSEGIVKKHKPEIKGNMSGNFTYIIDKLIPNTNYCVSVYLEHSDEQAVIKSPLKCTLLPPGQESESAESAKIGGIITVFLIALVLTSTIVTLKWIGYICLRNSLPKVLRQGLAKGWNAVAIHRCSHNALQSETPELKQSSCLSFPSSWDYKRASLCPSD

SEQ ID NO: 1223 - DNA, 1702 bp, Homo sapien
ggagtcgaccgctcgggcagcgcaccgccacgagagcccgggacgcgggaaagaccgaaaggaagaggaagaggcaccggtggccatggggctggaggcggcgcgcgagctggagtgcgcggcgctgggcacgctgctgcgggatccgcgggaggcggaacgcacgctgctgctggactgccgccccttcctggccttctgccggcgccacgtgcgcgccgcgcggccagtgccttggaacgcgctgctgcggcgccgcgcgcgcggccctcctgccgccgttctcgcctgcctgctgcccgaccgcgcgctgcggacgcgcctggtccgcggggagctggcgcgggccgtggtgctggacgagggcagtgcctcggtggcggagctccggcccgacagcccggctcatgtgctgctggccgcgctgctgcacgagacccgcgcggggcccactgccgtgtacttcctgcgaggaggcttcgacggcttccagggctgctgtcccgatctgtgctctgaggcccccgcccctgcgctgccgccaacaggggacaaaaccagccgctccgactccagggctcctgtctacgaccagggtggccctgtggagatcttgccctacctgttcctgggcagctgcagtcactcgtcagacctgcaggggctgcaggcctgtggcatcacagccgtcctcaacgtgtccgccagctgccccaaccactttgagggccttttccgctacaagagtatccctgtggaggacaaccagatggtggagatcagtgcctggttccaggaggccataggcttcattgactgggtgaagaacagcggaggccgggtgctggtgcactgccaggcgggtatctcgcgctctgccaccatctgtctggcatacctcatgcagagtcgccgtgtgcggctggacgaggcctttgacttcgttaagcagcgccggggggtcatctcccccaacttcagtttcatggggcagctgctgcagtttgagacccaggtgctgtgtcactgaggtggtgcccctctgcctgcctgccccactgtgctggcaggagctgactgtggactggtgggctcccctctgggccagcacagtcccctcacctccggcagggctgctacctcctcagagtttcagaagcccccacatgggggctctaggaatgccggcatgctggtctttccgacctggtgctcttctgctgggggactgaggctggccctcattcggggtcgggaaccaagggtgtgtctgctctttccctccccatcctctggcagaaatcagctagacgctataccgtggactctccctggtccaccaccatgttgaagcccttggcagcctgagagctccaaggaacaagctgtgacaaccaggagccctgtctgtgggttcgtctgcccagggcctggagcccaagccctgtgttcctggggaagctggggacttgggaagtgatgggtgtgtcatgttgcgtgtgtctgtctgtgagcctttcacacctgtgctggcgctggaaaattatttgtgctcagctgacatttaacacttcctcccccgcttcctcctagccctgtgggcaggggttggaaacttagcactttatatttatacagaacattcaggatttgtcaataaaatattgttatatttaaaaaaaaaaaaaaaaaaaaaaaaaaa

SEQ ID NO: 1224 - protein, 314 aa, Homo sapien
MGLEAARELECAALGTLLRDPREAERTLLLDCRPFLAFCRRHVRAARPVPWNALLRRRARGPPAAVLACLLPDRALRTRLVRGELARAVVLDEGSASVAELRPDSPAHVLLAALLHETRAGPTAVYFLRGGFDGFQGCCPDLCSEAPAPALPPTGDKTSRSDSRAPVYDQGGPVEILPYLFLGSCSHSSDLQGLQACGITAVLNVSASCPNHFEGLFRYKSIPVEDNQMVEISAWFQEAIGFIDWVKNSGGRVLVHCQAGISRSATICLAYLMQSRRVRLDEAFDFVKQRRGVISPNFSFMGQLLQFETQVLCH

SEQ ID NO: 1225 - DNA, 6662 bp, Homo sapien
ggcggttaagtcctgtacctaggaaagagggcgagctctggggcgctctccggtgtcatgaggagcttcaaaagagtcaactttgggactctgctaagcagccagaaggaggctgaagagttgctgcccgacttgaaggtgggggtgctgcctggctcgggatacacctggctttccaaactgagctgttttgtgtttgccttttgaagagatggataagagttcctgtccaaccctccagctggttttcccagcagccgatctgatgctgagaggagacaagcttgtgatgccatcctgagggcttgcaaccagcagctgactgctaagctagcttgccctaggcatctggggagcctgctggagctggcagagctggcctgtgatggctacttagtgtctaccccacagcgtcctcccctctacctggaacgaattctctttgtcttactgcggaatgctgctgcacaaggaagcccagaggccacactccgccttgctcagcccctccatgcctgcttggtgcagtgctctcgcgaggctgctccccaggactatgaggccgtggctcggggcagcttttctctgctttggaagggggcagaagccctgttggaacggcgagctgcatttgcagctcggctgaaggccttgagcttcctagtactcttggaggatgaaagtaccccttgtgaggttcctcactttgcttctccaacagcctgtcgagcggtagctgcccatcagctatttgatgccagtggccatggtctaaatgaagcagatgctgatttcctagatgacctgctctccaggcacgtgatcagagccttggtgggtgagagagggagctcttctgggcttctttctccccagagggccctctgcctcttggagctcaccttggaacactgccgtcgcttttgctggagccgccaccatgacaaagccatcagcgcagtggagaaggctcacagttacctaaggaacaccaatctagcccctagccttcagctatgtcagctgggggttaagctgctgcaggtcggggaggaaggacctcaggcagtggccaagcttctgatcaaggcatcagctgtcctgagcaagagtatggaggcaccatcacccccacttcgggcattgtatgagagctgccagttcttcctttcaggcctggaacgaggcaccaagaggcgctatagacttgatgccattctgagcctctttgcttttcttggagggtactgctctcttctgcagcagctgcgggatgatggtgtgtatgggggctcctccaagcaacagcagtcttttcttcagatgtactttcagggacttcacctctacactgtggtggtttatgactttgcccaaggctgtcagatagttgatttggctgacctgacccaactagtggacagttgtaaatctaccgttgtctggatgctggaggccttagagggcctgtcgggccaagagctgacggaccacatggggatgaccgcttcttacaccagtaatttggcctacagcttctatagtcacaagctctatgccgaggcctgtgccatctctgagccgctctgtcagcacctgggtttggtgaagccaggcacttatcccgaggtgcctcctgagaagttgcacaggtgcttccggctacaagtagagagtttgaagaaactgggtaaacaggcccagggctgcaagatggtgattttgtggctggcagccctgcaaccctgtagccctgaacacatggctgagccagtcactttctgggttcgggtcaagatggatgcggccagggctggagacaaggagctacagctaaagactctgcgagacagcctcagtggctgggacccggagaccctggccctcctgctgagggaggagctgcaggcctacaaggcggtgcgggccgacactggacaggaacgcttcaacatcatctgtgacctcctggagctgagccccgaggagacaccagccggggcctgggcacgagccacccacctggtagaactggctcaggtgctctgctaccacgactttacgcagcagaccaactgctctgctctggatgctatccgggaagccctgcagcttctggactctgtgaggcctgaggcccaggccagagatcagcttctggacgataaagcacaggccttgctgtggctttacatctgtactctggaagccaaaatacaggaaggtatcgagcgggatcggagagcccaggcccctggtaacttggaggaatttgaagtcaatgacctgaactatgaagataaactccaggaagatcgtttcctatacagtaacattgccttcaacctggctgcagatgctgctcagtccaaatgcctggaccaagccctggccctgtggaaggagctgcttacaaaggggcaggccccagctgtacggtgtctccagcagacagcagcctcactgcagatcctagcagccctctaccagctggtggcaaagcccatgcaggctctggaggtcctcctgctgctacggattgtctctgagagactgaaggaccactcgaaggcagctggctcctcctgccacatcacccagctcctcctgaccctcggctgtcccagctatgcccagttacacctggaagaggcagcatcgagcctgaagcatctcgatcagactactgacacatacctgctcctttccctgacctgtgatctgcttcgaagtcaactctactggactcaccagaaggtgaccaagggtgtctctctgctgctgtctgtgcttcgggatcctgccctccagaagtcctccaaggcttggtacttgctgcgtgtccaggtcctgcagctggtggcagcttaccttagcctcccgtcaaacaacctctcacactccctgtgggagcagctctgtgcccaaggctggcagacacctgagatagctctcatagactcccataagctcctccgaagcatcatcctcctgctgatgggcagtgacattctctcaactcagaaagcagctgtggagacatcgtttttggactatggtgaaaatctggtacaaaaatggcaggttctttcagaggtgctgagctgctcagagaagctggtctgccacctgggccgcctgggtagtgtgagtgaagccaaggccttttgcttggaggccctaaaacttacaacaaagctgcagataccacgccagtgtgccctgttcctggtgctgaagggcgagctggagctggcccgcaatgacattgatctctgtcagtcggacctgcagcaggttctgttcttgcttgagtcttgcacagagtttggtggggtgactcagcacctggactctgtgaagaaggtccacctgcagaaggggaagcagcaggcccaggtcccctgtcctccacagctcccagaggaggagctcttcctaagaggccctgctctagagctggtggccactgtggccaaggagcctggccccatagcaccttctacaaactcctccccagtcttgaaaaccaagccccagcccatacccaacttcctgtcccattcacccacctgtgactgctcgctctgcgccagccctgtcctcacagcagtctgtctgcgctgggtattggtcacggcaggggtgaggctggccatgggccaccaagcccagggtctggatctgctgcaggtcgtgctgaagggctgtcctgaagccgctgagcgcctcacccaagctctccaagcttccctgaatcataaaacacccccctccttggttccaagcctcttggatgagatcttggctcaagcatacacactgttggcactggagggcctgaaccagccatcaaacgagagcctgcagaaggttctacagtcagggctgaagtttgtagcagcacggataccccacctagagccctggcgagccagcctgctcttgatttgggccctcacaaaactaggtggcctcagctgctgtactacccaactttttgcaagctcctggggctggcagccaccattaataaaaagtgtccctggctcagagccctctaagactcagggccaaaaacgttctggacgagggcgccaaaagttagcctctgctcccctgagcctcaataatacctctcagaaaggtctggaaggtagaggactgccctgcacacctaaacccccagaccggatcaggcaagctggccctcatgtccccttcacggtgtttgaggaagtctgccctacagagagcaagcctgaagtaccccaggcccccagggtacaacagagagtccagacgcgcctcaaggtgaacttcagtgatgacagtgacttggaagaccctgtctcagctgaggcctggctggcagaggagcctaagagacggggcactgcttcccggggccgggggcgagcaaggaagggcctgagcctaaagacggatgccgtggttgccccaggtagtgcccctgggaaccctggcctgaatggcaggagccggagggccaagaaggtggcatcaagacattgtgaggagcggcgtccccagagggccagtgaccaggccaggcctggccctgagatcatgaggaccatccctgaggaagaactgactgacaactggagaaaaatgagctttgagatcctcaggggctctgacggggaagactcagcctcaggtgggaagactccagctccgggccctgaggcagcttctggagaatgggagctgctgaggctggattccagcaagaagaagctgcccagcccatgcccagacaaggagagtgacaaggaccttggtcctcggctccagctcccctcagcccccgtagccactggtctttctaccctggactccatctgtgactccctgagtgttgctttccggggcattagtcactgtcctcctagtgggctctatgcccacctctgccgcttcctggccttgtgcctgggccaccgggatccttatgccactgctttccttgtcaccgagtctgtctccatcacctgtcgccaccagctgctcacccacctccacagacagctcagcaaggcccagaagcaccgaggatcacttgaaatagcagaccagctgcaggggctgagccttcaggagatgcctggagatgtccccctggcccgcatccagcgcctcttttccttcagggctttggaatctggccacttcccccagcctgaaaaggagagtttccaggagcgcctggctctgatccccagtggggtgactgtgtgtgtgttggccctggccaccctccagcccggaaccgtgggcaacaccctcctgctgacccggctggaaaaggacagtcccccagtcagtgtgcagattcccactggccagaacaagcttcatctgcgttcagtcctgaatgagtttgatgccatccagaaggcacagaaagagaacagcagctgtactgacaagcgagaatggtggacagggcggctggcactggaccacaggatggaggttctcatcgcttccctagagaagtctgtgctgggctgctggaaggggctgctgctgccgtccagtgaggagcccggccctgcccaggaggcctcccgcctacaggagctgctacaggactgtggctggaaatatcctgaccgcactctgctgaaaatcatgctcagtggtgccggtgccctcacccctcaggacattcaggccctggcctacgggctgtgcccaacccagccagagcgagcccaggagctcctgaatgaggcagtaggacgtctacagggcctgacagtaccaagcaatagccaccttgtcttggtcctagacaaggacttgcagaagctgccgtgggaaagcatgcccagcctccaagcactgcctgtcacccggctgccctccttccgcttcctactcagctactccatcatcaaagagtatggggcctcgccagtgctgagtcaaggggtggatccacgaagtaccttctatgtcctgaaccctcacaataacctgtcaagcacagaggagcaatttcgagccaatttcagcagtgaagctggctggagaggagtggttggggaggtgccaagacctgaacaggtgcaggaagccctgacaaagcatgatttgtatatctatgcagggcatggggctggtgcccgcttccttgatgggcaggctgtcctgcggctgagctgtcgggcagtggccctgctgtttggctgtagcagtgcggccctggctgtgcatggaaacctggagggggctggcatcgtgctcaagtacatcatggctggttgccccttgtttctgggtaatctctgggatgtgactgaccgcgacattgaccgctacacggaagctctgctgcaaggctggcttggagcaggcccaggggccccccttctctactatgtaaaccaggcccgccaagctccccgactcaagtatcttattggggctgcacctatagcctatggcttgcctgtctctctgcggtaaccccatggagctgtcttattgatgctagaagcctcataactgttctacctccaaggttagatttaatccttaggataactcttttaaagtgattttccccagtgttttatatgaaacatttccttttgatttaacctcagtataataaagatacatcattt

SEQ ID NO: 1226 - protein, 1795 aa, Homo sapien
MEAPSPPLRALYESCQFFLSGLERGTKRRYRLDAILSLFAFLGGYCSLLQQLRDDGVYGGSSKQQQSFLQMYFQGLHLYTVVVYDFAQGCQIVDLADLTQLVDSCKSTVVWMLEALEGLSGQELTDHMGMTASYTSNLAYSFYSHKLYAEACAISEPLCQHLGLVKPGTYPEVPPEKLHRCFRLQVESLKKLGKQAQGCKMVILWLAALQPCSPEHMAEPVTFWVRVKMDAARAGDKELQLKTLRDSLSGWDPETLALLLREELQAYKAVRADTGQERFNIICDLLELSPEETPAGAWARATHLVELAQVLCYHDFTQQTNCSALDAIREALQLLDSVRPEAQARDQLLDDKAQALLWLYICTLEAKIQEGIERDRRAQAPGNLEEFEVNDLNYEDKLQEDRFLYSNIAFNLAADAAQSKCLDQALALWKELLTKGQAPAVRCLQQTAASLQILAALYQLVAKPMQALEVLLLLRIVSERLKDHSKAAGSSCHITQLLLTLGCPSYAQLHLEEAASSLKHLDQTTDTYLLLSLTCDLLRSQLYWTHQKVTKGVSLLLSVLRDPALQKSSKAWYLLRVQVLQLVAAYLSLPSNNLSHSLWEQLCAQGWQTPEIALIDSHKLLRSIILLLMGSDILSTQKAAVETSFLDYGENLVQKWQVLSEVLSCSEKLVCHLGRLGSVSEAKAFCLEALKLTTKLQIPRQCALFLVLKGELELARNDIDLCQSDLQQVLFLLESCTEFGGVTQHLDSVKKVHLQKGKQQAQVPCPPQLPEEELFLRGPALELVATVAKEPGPIAPSTNSSPVLKTKPQPIPNFLSHSPTCDCSLCASPVLTAVCLRWVLVTAGVRLAMGHQAQGLDLLQVVLKGCPEAAERLTQALQASLNHKTPPSLVPSLLDEILAQAYTLLALEGLNQPSNESLQKVLQSGLKFVAARIPHLEPWRASLLLIWALTKLGGLSCCTTQLFASSWGWQPPLIKSVPGSEPSKTQGQKRSGRGRQKLASAPLSLNNTSQKGLEGRGLPCTPKPPDRIRQAGPHVPFTVFEEVCPTESKPEVPQAPRVQQRVQTRLKVNFSDDSDLEDPVSAEAWLAEEPKRRGTASRGRGRARKGLSLKTDAVVAPGSAPGNPGLNGRSRRAKKVASRHCEERRPQRASDQARPGPEIMRTIPEEELTDNWRKMSFEILRGSDGEDSASGGKTPAPGPEAASGEWELLRLDSSKKKLPSPCPDKESDKDLGPRLQLPSAPVATGLSTLDSICDSLSVAFRGISHCPPSGLYAHLCRFLALCLGHRDPYATAFLVTESVSITCRHQLLTHLHRQLSKAQKHRGSLEIADQLQGLSLQEMPGDVPLARIQRLFSFRALESGHFPQPEKESFQERLALIPSGVTVCVLALATLQPGTVGNTLLLTRLEKDSPPVSVQIPTGQNKLHLRSVLNEFDAIQKAQKENSSCTDKREWWTGRLALDHRMEVLIASLEKSVLGCWKGLLLPSSEEPGPAQEASRLQELLQDCGWKYPDRTLLKIMLSGAGALTPQDIQALAYGLCPTQPERAQELLNEAVGRLQGLTVPSNSHLVLVLDKDLQKLPWESMPSLQALPVTRLPSFRFLLSYSIIKEYGASPVLSQGVDPRSTFYVLNPHNNLSSTEEQFRANFSSEAGWRGVVGEVPRPEQVQEALTKHDLYIYAGHGAGARFLDGQAVLRLSCRAVALLFGCSSAALAVHGNLEGAGIVLKYIMAGCPLFLGNLWDVTDRDIDRYTEALLQGWLGAGPGAPLLYYVNQARQAPRLKYLIGAAPIAYGLPVSLR

SEQ ID NO: 1227 - DNA, 2937 bp, Homo sapien; identical to SEQ ID NO: 19

SEQ ID NO: 1228 - protein, 584 aa, Homo sapien; identical to SEQ ID NO: 20

SEQ ID NO: 1229 - DNA, 2937 bp, Homo sapien; identical to SEQ ID NO: 19

SEQ ID NO: 1230 - protein, 584 aa, Homo sapien; identical to SEQ ID NO: 20

SEQ ID NO: 1231 - DNA, 3866 bp, Homo sapien
ggaattcctttttttttttttttgagatggagtttcactcttgttggccaggctggagtgcaatggcacaatctcagcttactgcaacctccgcctcccgggttcaagcgattctcctgcctcagcctctcaagtagctgggattacaggcatgtgccaccacccctggctaactaatttcttttctatttagtagagatggggtttcaccatgttggtcaggctggtcttgaactcctgacctcaggtgatccacttgccttggcctcccaaagtgctaggattacagccgtgaaactgtgcctggctgattctttttttgttgttggatttttgaaacagggtctcccttggtcgcccaggctggagtgcagtggtgcgatcttggctcactataacctccacctcctggtttcaagtgatcctcccactttagcctcctgagtagctgtgattacaggcgtgcaccaccacacccggctaatttttgtatttttattagagacagggtttcaccatgttggccaggctgttctcaaactcctggactcaagggatccgcctgcctccacttcccaaagtcccgagattacaggtgtgagtcaccatgcctgaccttataattcttaagtcattttttctggtccatttcttccttagggtcctcacaacaaatctgcattaggcggtacaataatccttaacttcatgattcacaaaaggaagatgaagtgattcatgatttagaaaggggaagtagtaagcccactgcacactcctggatgatgatcctaaatccagatacagtaaaaatggggtatgggaaggtagaatacaaaatttggtttaaattaattatctaaatatctaaaaacatttttggatacattgttgatgtgaatgtaagactgtacagacttcctagaaaacagtttgggttccatcttttcatttccccagtgcagttttctgtagaaatggaatccgaggatttaagtggcagagaattgacaattgattccataatgaacaaagtgagagacattaaaaataagtttaaaaatgaagaccttactgatgaactaagcttgaataaaatttctgctgatactacagataactcgggaactgttaaccaaattatgatgatggcaaacaacccagaggactggttgagtttgttgctcaaactagagaaaaacagtgttccgctaagtgatgctcttttaaataaattgattggtcgttacagtcaagcaattgaagcgcttcccccagataaatatggccaaaatgagagttttgctagaattcaagtgagatttgctgaattaaaagctattcaagagccagatgatgcacgtgactactttcaaatggccagagcaaactgcaagaaatttgcttttgttcatatatcttttgcacaatttgaactgtcacaaggtaatgtcaaaaaaagtaaacaacttcttcaaaaagctgtagaacgtggagcagtaccactagaaatgctggaaattgccctgcggaatttaaacctccaaaaaaagcagctgctttcagaggaggaaaagaagaatttatcagcatctacggtattaactgcccaagaatcattttccggttcacttgggcatttacagaataggaacaacagttgtgattccagaggacagactactaaagccaggtttttatatggagagaacatgccaccacaagatgcagaaataggttaccggaattcattgagacaaactaacaaaactaaacagtcatgcccatttggaagagtcccagttaaccttctaaatagcccagattgtgatgtgaagacagatgattcagttgtaccttgttttatgaaaagacaaacctctagatcagaatgccgagatttggttgtgcctggatctaaaccaagtggaaatgattcctgtgaattaagaaatttaaagtctgttcaaaatagtcatttcaaggaacctctggtgtcagatgaaaagagttctgaacttattattactgattcaataaccctgaagaataaaacggaatcaagtcttctagctaaattagaagaaactaaagagtatcaagaaccagaggttccagagagtaaccagaaacagtggcaagctaagagaaagtcagagtgtattaaccagaatcctgctgcatcttcaaatcactggcagattccggagttagcccgaaaagttaatacagagcagaaacataccacttttgagcaacctgtcttttcagtttcaaaacagtcaccaccaatatcaacatctaaatggtttgacccaaaatctatttgtaagacaccaagcagcaataccttggatgattacatgagctgttttagaactccagttgtaaagaatgactttccacctgcttgtcagttgtcaacaccttatggccaacctgcctgtttccagcagcaacagcatcaaatacttgccactccacttcaaaatttacaggttttagcatcttcttcagcaaatgaatgcatttcggttaaaggaagaatttattccatattaaagcagataggaagtggaggttcaagcaaggtatttcaggtgttaaatgaaaagaaacagatatatgctataaaatatgtgaacttagaagaagcagataaccaaactcttgatagttaccggaacgaaatagcttatttgaataaactacaacaacacagtgataagatcatccgactttatgattatgaaatcacggaccagtacatctacatggtaatggagtgtggaaatattgatcttaatagttggcttaaaaagaaaaaatccattgatccatgggaacgcaagagttactggaaaaatatgttagaggcagttcacacaatccatcaacatggcattgttcacagtgatcttaaaccagctaactttctgatagttgatggaatgctaaagctaattgattttgggattgcaaaccaaatgcaaccagatacaacaagtgttgttaaagattctcaggttggcacagttaattatatgccaccagaagcaatcaaagatatgtcttcctccagagagaatgggaaatctaagtcaaagataagccccaaaagtgatgtttggtccttaggatgtattttgtactatatgacttacgggaaaacaccatttcagcagataattaatcagatttctaaattacatgccataattgatcctaatcatgaaattgaatttcccgatattccagagaaagatcttcaagatgtgttaaagtgttgtttaaaaagggacccaaaacagaggatatccattcctgagctcctggctcatccatatgttcaaattcaaactcatccagttaaccaaatggccaagggaaccactgaagaaatgaaatatgttctgggccaacttgttggtctgaattctcctaactccattttgaaagctgctaaaactttatatgaacactatagtggtggtgaaagtcataattcttcatcctccaagacttttgaaaaaaaaaggggaaaaaaatgatttgcagttattcgtaatgtcagataggaggtataaaatatattggactgttatactcttgaatccctgtggaaatctacatttgaagacaacatcactctgaagtgttatcagcaaaaaaaattcagtgagattatctttaaaagaaaactgtaaaaatagcaaccacttatggcactgtatatattgtagacttgttttctctgttttatgctcttgtgtaatctacttgacatcattttactcttggaatagtgggtggatagcaagtatattctaaaaaactttgtaaataaagttttgtggctaaaatga

SEQ ID NO: 1232 - protein, 841 aa, Homo sapien
MNKVRDIKNKFKNEDLTDELSLNKISADTTDNSGTVNQIMMMANNPEDWLSLLLKLEKNSVPLSDALLNKLIGRYSQAIEALPPDKYGQNESFARIQVRFAELKAIQEPDDARDYFQMARANCKKFAFVHISFAQFELSQGNVKKSKQLLQKAVERGAVPLEMLEIALRNLNLQKKQLLSEEEKKNLSASTVLTAQESFSGSLGHLQNRNNSCDSRGQTTKARFLYGENMPPQDAEIGYRNSLRQTNKTKQSCPFGRVPVNLLNSPDCDVKTDDSVVPCFMKRQTSRSECRDLVVPGSKPSGNDSCELRNLKSVQNSHFKEPLVSDEKSSELIITDSITLKNKTESSLLAKLEETKEYQEPEVPESNQKQWQAKRKSECINQNPAASSNHWQIPELARKVNTEQKHTTFEQPVFSVSKQSPPISTSKWFDPKSICKTPSSNTLDDYMSCFRTPVVKNDFPPACQLSTPYGQPACFQQQQHQILATPLQNLQVLASSSANECISVKGRIYSILKQIGSGGSSKVFQVLNEKKQIYAIKYVNLEEADNQTLDSYRNEIAYLNKLQQHSDKIIRLYDYEITDQYIYMVMECGNIDLNSWLKKKKSIDPWERKSYWKNMLEAVHTIHQHGIVHSDLKPANFLIVDGMLKLIDFGIANQMQPDTTSVVKDSQVGTVNYMPPEAIKDMSSSRENGKSKSKISPKSDVWSLGCILYYMTYGKTPFQQIINQISKLHAIIDPNHEIEFPDIPEKDLQDVLKCCLKRDPKQRISIPELLAHPYVQIQTHPVNQMAKGTTEEMKYVLGQLVGLNSPNSILKAAKTLYEHYSGGESHNSSSSKTFEKKRGKK

SEQ ID NO: 1233 - DNA, 2470 bp, Homo sapien
ttggcgggcggaagcggccacaacccggcgatcgaaaagattcttaggaacgccgtaccagccgcgtctctcaggacagcaggcccctgtccttctgtcgggcgccgctcagccgtgccctccgcccctcaggttctttttctaattccaaataaacttgcaagaggactatgaaagattatgatgaacttctcaaatattatgaattacatgaaactattgggacaggtggctttgcaaaggtcaaacttgcctgccatatccttactggagagatggtagctataaaaatcatggataaaaacacactagggagtgatttgccccggatcaaaacggagattgaggccttgaagaacctgagacatcagcatatatgtcaactctaccatgtgctagagacagccaacaaaatattcatggttcttgagtactgccctggaggagagctgtttgactatataatttcccaggatcgcctgtcagaagaggagacccgggttgtcttccgtcagatagtatctgctgttgcttatgtgcacagccagggctatgctcacagggacctcaagccagaaaatttgctgtttgatgaatatcataaattaaagctgattgactttggtctctgtgcaaaacccaagggtaacaaggattaccatctacagacatgctgtgggagtctggcttatgcagcacctgagttaatacaaggcaaatcatatcttggatcagaggcagatgtttggagcatgggcatactgttatatgttcttatgtgtggatttctaccatttgatgatgataatgtaatggctttatacaagaagattatgagaggaaaatatgatgttcccaagtggctctctcccagtagcattctgcttcttcaacaaatgctgcaggtggacccaaagaaacggatttctatgaaaaatctattgaaccatccctggatcatgcaagattacaactatcctgttgagtggcaaagcaagaatccttttattcacctcgatgatgattgcgtaacagaactttctgtacatcacagaaacaacaggcaaacaatggaggatttaatttcactgtggcagtatgatcacctcacggctacctatcttctgcttctagccaagaaggctcggggaaaaccagttcgtttaaggctttcttctttctcctgtggacaagccagtgctaccccattcacagacatcaagtcaaataattggagtctggaagatgtgaccgcaagtgataaaaattatgtggcgggattaatagactatgattggtgtgaagatgatttatcaacaggtgctgctactccccgaacatcacagtttaccaagtactggacagaatcaaatggggtggaatctaaatcattaactccagccttatgcagaacacctgcaaataaattaaagaacaaagaaaatgtatatactcctaagtctgctgtaaagaatgaagagtactttatgtttcctgagccaaagactccagttaataagaaccagcataagagagaaatactcactacgccaaatcgttacactacaccctcaaaagctagaaaccagtgcctgaaagaaactccaattaaaataccagtaaattcaacaggaacagacaagttaatgacaggtgtcattagccctgagaggcggtgccgctcagtggaattggatctcaaccaagcacatatggaggagactccaaaaagaaagggagccaaagtgtttgggagccttgaaagggggttggataaggttatcactgtgctcaccaggagcaaaaggaagggttctgccagagacgggcccagaagactaaagcttcactataatgtgactacaactagattagtgaatccagatcaactgttgaatgaaataatgtctattcttccaaagaagcatgttgactttgtacaaaagggttatacactgaagtgtcaaacacagtcagattttgggaaagtgacaatgcaatttgaattagaagtgtgccagcttcaaaaacccgatgtggtgggtatcaggaggcagcggcttaagggcgatgcctgggtttacaaaagattagtggaagacatcctatctagctgcaaggtataattgatggattcttccatcctgccggatgagtgtgggtgtgatacagcctacataaagactgttatgatcgctttgattttaaagttcattggaactaccaacttgtttctaaagagctatcttaagaccaatatctctttgtttttaaacaaaagatattattttgtgtatgaatctaaatcaagcccatctgtcattatgttactgtcttttttaatcatgtggttttgtatattaataattgttgactttcttagattcacttccatatgtgaatgtaagctcttaactatgtctctttgtaatgtgtaatttctttctgaaataaaaccatttgtgaatat

SEQ ID NO: 1234 - protein, 651 aa, Homo sapien
MKDYDELLKYYELHETIGTGGFAKVKLACHILTGEMVAIKIMDKNTLGSDLPRIKTEIEALKNLRHQHICQLYHVLETANKIFMVLEYCPGGELFDYIISQDRLSEEETRVVFRQIVSAVAYVHSQGYAHRDLKPENLLFDEYHKLKLIDFGLCAKPKGNKDYHLQTCCGSLAYAAPELIQGKSYLGSEADVWSMGILLYVLMCGFLPFDDDNVMALYKKIMRGKYDVPKWLSPSSILLLQQMLQVDPKKRISMKNLLNHPWIMQDYNYPVEWQSKNPFIHLDDDCVTELSVHHRNNRQTMEDLISLWQYDHLTATYLLLLAKKARGKPVRLRLSSFSCGQASATPFTDIKSNNWSLEDVTASDKNYVAGLIDYDWCEDDLSTGAATPRTSQFTKYWTESNGVESKSLTPALCRTPANKLKNKENVYTPKSAVKNEEYFMFPEPKTPVNKNQHKREILTTPNRYTTPSKARNQCLKETPIKIPVNSTGTDKLMTGVISPERRCRSVELDLNQAHMEETPKRKGAKVFGSLERGLDKVITVLTRSKRKGSARDGPRRLKLHYNVTTTRLVNPDQLLNEIMSILPKKHVDFVQKGYTLKCQTQSDFGKVTMQFELEVCQLQKPDVVGIRRQRLKGDAWVYKRLVEDILSSCKV

SEQ ID NO: 1235 - DNA, 3242 bp, Homo sapien
gagcagccaaaaggcccgcggagtcgcgctgggccgccccggcgcagctgaaccgggggccgcgcctgccaggccgacgggtctggcccagcctggcgccaaggggttcgtgcgctgtggagacgcggagggtcgaggcggcgcggcctgagtgaaacccaatggaaaaagcatgacatttagaagtagaagacttagcttcaaatccctactccttcacttactaattttgtgatttggaaatatccgcgcaagatgttgacgttgcagacttggctagtgcaagccttgtttattttcctcaccactgaatctacaggtgaacttctagatccatgtggttatatcagtcctgaatctccagttgtacaacttcattctaatttcactgcagtttgtgtgctaaaggaaaaatgtatggattattttcatgtaaatgctaattacattgtctggaaaacaaaccattttactattcctaaggagcaatatactatcataaacagaacagcatccagtgtcacctttacagatatagcttcattaaatattcagctcacttgcaacattcttacattcggacagcttgaacagaatgtttatggaatcacaataatttcaggcttgcctccagaaaaacctaaaaatttgagttgcattgtgaacgaggggaagaaaatgaggtgtgagtgggatggtggaagggaaacacacttggagacaaacttcactttaaaatctgaatgggcaacacacaagtttgctgattgcaaagcaaaacgtgacacccccacctcatgcactgttgattattctactgtgtattttgtcaacattgaagtctgggtagaagcagagaatgcccttgggaaggttacatcagatcatatcaattttgatcctgtatataaagtgaagcccaatccgccacataatttatcagtgatcaactcagaggaactgtctagtatcttaaaattgacatggaccaacccaagtattaagagtgttataatactaaaatataacattcaatataggaccaaagatgcctcaacttggagccagattcctcctgaagacacagcatccacccgatcttcattcactgtccaagaccttaaaccttttacagaatatgtgtttaggattcgctgtatgaaggaagatggtaagggatactggagtgactggagtgaagaagcaagtgggatcacctatgaagatagaccatctaaagcaccaagtttctggtataaaatagatccatcccatactcaaggctacagaactgtacaactcgtgtggaagacattgcctccttttgaagccaatggaaaaatcttggattatgaagtgactctcacaagatggaaatcacatttacaaaattacacagttaatgccacaaaactgacagtaaatctcacaaatgatcgctatctagcaaccctaacagtaagaaatcttgttggcaaatcagatgcagctgttttaactatccctgcctgtgactttcaagctactcaccctgtaatggatcttaaagcattccccaaagataacatgctttgggtggaatggactactccaagggaatctgtaaagaaatatatacttgagtggtgtgtgttatcagataaagcaccctgtatcacagactggcaacaagaagatggtaccgtgcatcgcacctatttaagagggaacttagcagagagcaaatgctatttgataacagttactccagtatatgctgatggaccaggaagccctgaatccataaaggcataccttaaacaagctccaccttccaaaggacctactgttcggacaaaaaaagtagggaaaaacgaagctgtcttagagtgggaccaacttcctgttgatgttcagaatggatttatcagaaattatactatattttatagaaccatcattggaaatgaaactgctgtgaatgtggattcttcccacacagaatatacattgtcctctttgactagtgacacattgtacatggtacgaatggcagcatacacagatgaaggtgggaaggatggtccagaattcacttttactaccccaaagtttgctcaaggagaaattgaagccatagtcgtgcctgtttgcttagcattcctattgacaactcttctgggagtgctgttctgctttaataagcgagacctaattaaaaaacacatctggcctaatgttccagatccttcaaagagtcatattgcccagtggtcacctcacactcctccaaggcacaattttaattcaaaagatcaaatgtattcagatggcaatttcactgatgtaagtgttgtggaaatagaagcaaatgacaaaaagccttttccagaagatctgaaatcattggacctgttcaaaaaggaaaaaattaatactgaaggacacagcagtggtattggggggtcttcatgcatgtcatcttctaggccaagcatttctagcagtgatgaaaatgaatcttcacaaaacacttcgagcactgtccagtattctaccgtggtacacagtggctacagacaccaagttccgtcagtccaagtcttctcaagatccgagtctacccagcccttgttagattcagaggagcggccagaagatctacaattagtagatcatgtagatggcggtgatggtattttgcccaggcaacagtacttcaaacagaactgcagtcagcatgaatccagtccagatatttcacattttgaaaggtcaaagcaagtttcatcagtcaatgaggaagattttgttagacttaaacagcagatttcagatcatatttcacaatcctgtggatctgggcaaatgaaaatgtttcaggaagtttctgcagcagatgcttttggtccaggtactgagggacaagtagaaagatttgaaacagttggcatggaggctgcgactgatgaaggcatgcctaaaagttacttaccacagactgtacggcaaggcggctacatgcctcagtgaaggactagtagttcctgctacaacttcagcagtacctataaagtaaagctaaaatgattttatctgtgaattcagattttaaaaagtcttcactctctgaagatgatcatttgcccttaaggacaaaaatgaactgaagtttcacatgagctatttccattccagaatatctgggattctactttaagcactacataaactgactttatcctcagaaaaaaaaaaaaaaa

SEQ ID NO: 1236 - protein, 918 aa, Homo sapien
MLTLQTWLVQALFIFLTTESTGELLDPCGYISPESPVVQLHSNFTAVCVLKEKCMDYFHVNANYIVWKTNHFTIPKEQYTIINRTASSVTFTDIASLNIQLTCNILTFGQLEQNVYGITIISGLPPEKPKNLSCIVNEGKKMRCEWDGGRETHLETNFTLKSEWATHKFADCKAKRDTPTSCTVDYSTVYFVNIEVWVEAENALGKVTSDHINFDPVYKVKPNPPHNLSVINSEELSSILKLTWTNPSIKSVIILKYNIQYRTKDASTWSQIPPEDTASTRSSFTVQDLKPFTEYVFRIRCMKEDGKGYWSDWSEEASGITYEDRPSKAPSFWYKIDPSHTQGYRTVQLVWKTLPPFEANGKILDYEVTLTRWKSHLQNYTVNATKLTVNLTNDRYLATLTVRNLVGKSDAAVLTIPACDFQATHPVMDLKAFPKDNMLWVEWTTPRESVKKYILEWCVLSDKAPCITDWQQEDGTVHRTYLRGNLAESKCYLITVTPVYADGPGSPESIKAYLKQAPPSKGPTVRTKKVGKNEAVLEWDQLPVDVQNGFIRNYTIFYRTIIGNETAVNVDSSHTEYTLSSLTSDTLYMVRMAAYTDEGGKDGPEFTFTTPKFAQGEIEAIVVPVCLAFLLTTLLGVLFCFNKRDLIKKHIWPNVPDPSKSHIAQWSPHTPPRHNFNSKDQMYSDGNFTDVSVVEIEANDKKPFPEDLKSLDLFKKEKINTEGHSSGIGGSSCMSSSRPSISSSDENESSQNTSSTVQYSTVVHSGYRHQVPSVQVFSRSESTQPLLDSEERPEDLQLVDHVDGGDGILPRQQYFKQNCSQHESSPDISHFERSKQVSSVNEEDFVRLKQQISDHISQSCGSGQMKMFQEVSAADAFGPGTEGQVERFETVGMEAATDEGMPKSYLPQTVRQGGYMPQ

SEQ ID NO: 1237 - DNA, 3159 bp, Homo sapien
gagcagccaaaaggcccgcggagtcgcgctgggccgccccggcgcagctgaaccgggggccgcgcctgccaggccgacgggtctggcccagcctggcgccaaggggttcgtgcgctgtggagacgcggagggtcgaggcggcgcggcctgagtgaaacccaatggaaaaagcatgacatttagaagtagaagacttagcttcaaatccctactccttcacttactaattttgtgatttggaaatatccgcgcaagatgttgacgttgcagacttggctagtgcaagccttgtttattttcctcaccactgaatctacaggtgaacttctagatccatgtggttatatcagtcctgaatctccagttgtacaacttcattctaatttcactgcagtttgtgtgctaaaggaaaaatgtatggattattttcatgtaaatgctaattacattgtctggaaaacaaaccattttactattcctaaggagcaatatactatcataaacagaacagcatccagtgtcacctttacagatatagcttcattaaatattcagctcacttgcaacattcttacattcggacagcttgaacagaatgtttatggaatcacaataatttcaggcttgcctccagaaaaacctaaaaatttgagttgcattgtgaacgaggggaagaaaatgaggtgtgagtgggatggtggaagggaaacacacttggagacaaacttcactttaaaatctgaatgggcaacacacaagtttgctgattgcaaagcaaaacgtgacacccccacctcatgcactgttgattattctactgtgtattttgtcaacattgaagtctgggtagaagcagagaatgcccttgggaaggttacatcagatcatatcaattttgatcctgtatataaagtgaagcccaatccgccacataatttatcagtgatcaactcagaggaactgtctagtatcttaaaattgacatggaccaacccaagtattaagagtgttataatactaaaatataacattcaatataggaccaaagatgcctcaacttggagccagattcctcctgaagacacagcatccacccgatcttcattcactgtccaagaccttaaaccttttacagaatatgtgtttaggattcgctgtatgaaggaagatggtaagggatactggagtgactggagtgaagaagcaagtgggatcacctatgaagataacattgcctccttttgaagccaatggaaaaatcttggattatgaagtgactctcacaagatggaaatcacatttacaaaattacacagttaatgccacaaaactgacagtaaatctcacaaatgatcgctatctagcaaccctaacagtaagaaatcttgttggcaaatcagatgcagctgttttaactatccctgcctgtgactttcaagctactcaccctgtaatggatcttaaagcattccccaaagataacatgctttgggtggaatggactactccaagggaatctgtaaagaaatatatacttgagtggtgtgtgttatcagataaagcaccctgtatcacagactggcaacaagaagatggtaccgtgcatcgcacctatttaagagggaacttagcagagagcaaatgctatttgataacagttactccagtatatgctgatggaccaggaagccctgaatccataaaggcataccttaaacaagctccaccttccaaaggacctactgttcggacaaaaaaagtagggaaaaacgaagctgtcttagagtgggaccaacttcctgttgatgttcagaatggatttatcagaaattatactatattttatagaaccatcattggaaatgaaactgctgtgaatgtggattcttcccacacagaatatacattgtcctctttgactagtgacacattgtacatggtacgaatggcagcatacacagatgaaggtgggaaggatggtccagaattcacttttactaccccaaagtttgctcaaggagaaattgaagccatagtcgtgcctgtttgcttagcattcctattgacaactcttctgggagtgctgttctgctttaataagcgagacctaattaaaaaacacatctggcctaatgttccagatccttcaaagagtcatattgcccagtggtcacctcacactcctccaaggcacaattttaattcaaaagatcaaatgtattcagatggcaatttcactgatgtaagtgttgtggaaatagaagcaaatgacaaaaagccttttccagaagatctgaaatcattggacctgttcaaaaaggaaaaaattaatactgaaggacacagcagtggtattggggggtcttcatgcatgtcatcttctaggccaagcatttctagcagtgatgaaaatgaatcttcacaaaacacttcgagcactgtccagtattctaccgtggtacacagtggctacagacaccaagttccgtcagtccaagtcttctcaagatccgagtctacccagcccttgttagattcagaggagcggccagaagatctacaattagtagatcatgtagatggcggtgatggtattttgcccaggcaacagtacttcaaacagaactgcagtcagcatgaatccagtccagatatttcacattttgaaaggtcaaagcaagtttcatcagtcaatgaggaagattttgttagacttaaacagcagatttcagatcatatttcacaatcctgtggatctgggcaaatgaaaatgtttcaggaagtttctgcagcagatgcttttggtccaggtactgagggacaagtagaaagatttgaaacagttggcatggaggctgcgactgatgaaggcatgcctaaaagttacttaccacagactgtacggcaaggcggctacatgcctcagtgaaggactagtagttcctgctacaacttcagcagtacctataaagtaaagctaaaatgattttatctgtgaattcagattttaaaaagtcttcactctctgaagatgatcatttgcccttaaggacaaaaatgaactgaagtttcacatgagctatttccattccagaatatctgggattctactttaagcactacataaactgactttatcctcagaaaaaaaaaaaaaaa

SEQ ID NO: 1238 - protein, 329 aa, Homo sapien
MLTLQTWLVQALFIFLTTESTGELLDPCGYISPESPVVQLHSNFTAVCVLKEKCMDYFHVNANYIVWKTNHFTIPKEQYTIINRTASSVTFTDIASLNIQLTCNILTFGQLEQNVYGITIISGLPPEKPKNLSCIVNEGKKMRCEWDGGRETHLETNFTLKSEWATHKFADCKAKRDTPTSCTVDYSTVYFVNIEVWVEAENALGKVTSDHINFDPVYKVKPNPPHNLSVINSEELSSILKLTWTNPSIKSVIILKYNIQYRTKDASTWSQIPPEDTASTRSSFTVQDLKPFTEYVFRIRCMKEDGKGYWSDWSEEASGITYEDNIASF

SEQ ID NO: 1239 - DNA, 2739 bp, Homo sapien; identical to SEQ ID NO: 17

SEQ ID NO: 1240 - protein, 638 aa, Homo sapien; identical to SEQ ID NO: 18

SEQ ID NO: 1241 - DNA, 3331 bp, Homo sapien
cagagggcaccgcccaggcctcggaaggtgtcagggagaactttccgtggtttcagcgtcgtcgcctggagcggcggtttagagagccgagcctgatgggcgccaaggccggctggctgcttggagcgctgcctcgaagggactgcgtaaggaagctaatccggagaacccaggccagagcctgaaatatggcgacctgcatcggggagaagatcgaggattttaaagttggaaatctgcttggtaaaggatcatttgctggtgtctacagagctgagtccattcacagtggtttggaagttgcaatcaaaatgatagataagaaagccatgtacaaagcaggaatggtacagagagtccaaaatgaggtgaaaatacattgccaattgaaacatccttctatcttggagctttataactattttgaagatagcaattatgtgtatctggtattagaaatgtgccataatggagaaatgaacaggtatctaaagaatagagtgaaacccttctcagaaaatgaagctcgacacttcatgcaccagatcatcacagggatgttgtatcttcattctcatggtatactacaccgggacctcacactttctaacctcctactgactcgtaatatgaacatcaagattgctgattttgggctggcaactcaactgaaaatgccacatgaaaagcactatacattatgtggaactcctaactacatttcaccagaaattgccactcgaagtgcacatggccttgaatctgatgtttggtccctgggctgtatgttttatacattacttatcgggagaccacccttcgacactgacacagtcaagaacacattaaataaagtagtattggcagattatgaaatgccaacttttttgtcaatagaggccaaggaccttattcaccagttacttcgtagaaatccagcagatcgtttaagtctgtcttcagtattggaccatccttttatgtcccgaaattcttcaacaaaaagtaaagatttaggaactgtggaagactcaattgatagtgggcatgccacaatttctactgcaattacagcttcttccagtaccagtataagtggtagtttatttgacaaaagaagacttttgattggtcagccactcccaaataaaatgactgtatttccaaagaataaaagttcaactgatttttcttcttcaggagatggaaacagtttttatactcagtggggaaatcaagaaaccagtaatagtggaaggggaagagtaattcaagatgcagaagaaaggccacattctcgataccttcgtagagcttattcctctgatagatctggcacttctaatagacagtctcaagcaaaaacatatacaatggaacgatgtcactcagcagaaatgctttcagtgtccaaaagatcaggaggaggtgaaaatgaagagaggtactcacccacagacaacaatgccaacatttttaacttctttaaagaaaagacatccagtagttctggatcttttgaaagacctgataacaatcaagcactctccaatcatctttgtccaggaaaaactccttttccatttgcagacccgacacctcagactgaaaccgtacaacagtggtttgggaatctgcaaataaatgctcatttaagaaaaactactgaatatgacagcatcagcccaaaccgggacttccagggccatccagatttgcagaaggacacatcaaaaaatgcctggactgatacaaaagtcaaaaagaactctgatgcttctgataatgcacattctgtaaaacagcaaaataccatgaaatatatgactgcacttcacagtaaacctgagataatccaacaagaatgtgtttttggctcagatcctctttctgaacagagcaagactaggggtatggagccaccatggggttatcagaatcgtacattaagaagcattacatctccgttggttgctcacaggttaaaaccaatcagacagaaaaccaaaaaggctgtggtgagcatacttgattcagaggaggtgtgtgtggagcttgtaaaggagtatgcatctcaagaatatgtgaaagaagttcttcagatatctagtgatggaaatacgatcactatttattatccaaatggtggtagaggttttcctcttgctgatagaccaccctcacctactgacaacatcagtaggtacagctttgacaatttaccagaaaaatactggcgaaaatatcaatatgcttccaggtttgtacagcttctaagatctaaatctcccaaaatcacttattttacaagatatgctaaatgcattttgatggagaattctcctggtgctgattttgaggtttggttttatgatggggtaaaaatacacaaaacagaagatttcattcaggtgattgaaaagacagggaagtcttacactttaaaaagtgaaagtgaagttaatagcttgaaagaggagataaaaatgtatatggaccatgctaatgagggtcatcgtatttgtttagcactggaatccataatttcagaagaggaaaggaaaactaggagtgctccctttttcccaataatcataggaagaaaacctggtagtactagttcacctaaggccttatcacctcctccttctgtggattcaaattacccaacgagagatagagcatctttcaacagaatggtcatgcatagtgatgcttctccaacacaggcaccaatccttaatccctctatggttacaaatgaaggacttggtcttacaactacagcttctggaacagacatctcttctaatagtctaaaagattgtcttcctaaatcagcacaacttttgaaatctgtttttgtgaaaaatgttggttgggctacacagttaactagtggagctgtgtgggttcagtttaatgatgggtcccagttggttgtgcaggcaggagtgtcttctatcagttatacctcaccaaatggtcaaacaactaggtatggagaaaatgaaaaattaccagactacatcaaacagaaattacagtgtctgtcttccatccttttgatgttttctaatccgactcctaattttcattgattaaaactcctttcagacatataagtttaataaataacttttttgttgactttcaagtaaagtgattttttttaatttaacataaagtcttcagaaagcctttctatgaaagaattttaacctataatgtaaaccatgtatctgagataacaaagcagaatgaaacttgagtcacttactaaatatagtggatataaaatagaacacctgactttgctcttagaccataa

SEQ ID NO: 1242 - protein, 970 aa, Homo sapien
MATCIGEKIEDFKVGNLLGKGSFAGVYRAESIHSGLEVAIKMIDKKAMYKAGMVQRVQNEVKIHCQLKHPSILELYNYFEDSNYVYLVLEMCHNGEMNRYLKNRVKPFSENEARHFMHQIITGMLYLHSHGILHRDLTLSNLLLTRNMNIKIADFGLATQLKMPHEKHYTLCGTPNYISPEIATRSAHGLESDVWSLGCMFYTLLIGRPPFDTDTVKNTLNKVVLADYEMPTFLSIEAKDLIHQLLRRNPADRLSLSSVLDHPFMSRNSSTKSKDLGTVEDSIDSGHATISTAITASSSTSISGSLFDKRRLLIGQPLPNKMTVFPKNKSSTDFSSSGDGNSFYTQWGNQETSNSGRGRVIQDAEERPHSRYLRRAYSSDRSGTSNRQSQAKTYTMERCHSAEMLSVSKRSGGGENEERYSPTDNNANIFNFFKEKTSSSSGSFERPDNNQALSNHLCPGKTPFPFADPTPQTETVQQWFGNLQINAHLRKTTEYDSISPNRDFQGHPDLQKDTSKNAWTDTKVKKNSDASDNAHSVKQQNTMKYMTALHSKPEIIQQECVFGSDPLSEQSKTRGMEPPWGYQNRTLRSITSPLVAHRLKPIRQKTKKAVVSILDSEEVCVELVKEYASQEYVKEVLQISSDGNTITIYYPNGGRGFPLADRPPSPTDNISRYSFDNLPEKYWRKYQYASRFVQLLRSKSPKITYFTRYAKCILMENSPGADFEVWFYDGVKIHKTEDFIQVIEKTGKSYTLKSESEVNSLKEEIKMYMDHANEGHRICLALESIISEEERKTRSAPFFPIIIGRKPGSTSSPKALSPPPSVDSNYPTRDRASFNRMVMHSDASPTQAPILNPSMVTNEGLGLTTTASGTDISSNSLKDCLPKSAQLLKSVFVKNVGWATQLTSGAVWVQFNDGSQLVVQAGVSSISYTSPNGQTTRYGENEKLPDYIKQKLQCLSSILLMFSNPTPNFH

SEQ ID NO: 1243 - DNA, 1958 bp, Homo sapien
cggcacagcctcacacctgaacgctgtcctcccgcagacgagaccggcgggcactgcaaagctgggactcgtctttgaaggaaaaaaaatagcgagtaagaaatccagcaccattcttcactgacccatcccgctgcacctcttgtttcccaagtttttgaaagctggcaactctgacctcggtgtccaaaaatcgacagccactgagaccggctttgagaagccgaagatttggcagtttccagactgagcaggacaaggtgaaagcaggttggaggcgggtccaggacatctgagggctgaccctgggggctcgtgaggctgccaccgctgctgccgctacagacccagccttgcactccaaggctgcgcaccgccagccactatcatgtccactcccggggtcaattcgtccgcctccttgagccccgaccggctgaacagcccagtgaccatcccggcggtgatgttcatcttcggggtggtgggcaacctggtggccatcgtggtgctgtgcaagtcgcgcaaggagcagaaggagacgaccttctacacgctggtatgtgggctggctgtcaccgacctgttgggcactttgttggtgagcccggtgaccatcgccacgtacatgaagggccaatggcccgggggccagccgctgtgcgagtacagcaccttcattctgctcttcttcagcctgtccggcctcagcatcatctgcgccatgagtgtcgagcgctacctggccatcaaccatgcctatttctacagccactacgtggacaagcgattggcgggcctcacgctctttgcagtctatgcgtccaacgtgctcttttgcgcgctgcccaacatgggtctcggtagctcgcggctgcagtacccagacacctggtgcttcatcgactggaccaccaacgtgacggcgcacgccgcctactcctacatgtacgcgggcttcagctccttcctcattctcgccaccgtcctctgcaacgtgcttgtgtgcggcgcgctgctccgcatgcaccgccagttcatgcgccgcacctcgctgggcaccgagcagcaccacgcggccgcggccgcctcggttgcctcccggggccaccccgctgcctccccagccttgccgcgcctcagcgactttcggcgccgccggagcttccgccgcatcgcgggcgccgagatccagatggtcatcttactcattgccacctccctggtggtgctcatctgctccatcccgctcgtggtgcgagtattcgtcaaccagttatatcagccaagtttggagcgagaagtcagtaaaaatccagatttgcaggccatccgaattgcttctgtgaaccccatcctagacccctggatatatatcctcctgagaaagacagtgctcagtaaagcaatagagaagatcaaatgcctcttctgccgcattggcgggtcccgcagggagcgctccggacagcactgctcagacagtcaaaggacatcttctgccatgtcaggccactctcgctccttcatctcccgggagctgaaggagatcagcagtacatctcagaccctcctgccagacctctcactgccagacctcagtgaaaatggccttggaggcaggaatttgcttccaggtgtgcctggcatgggcctggcccaggaagacaccacctcactgaggactttgcgaatatcagagacctcagactcttcacagggtcaggactcagagagtgtcttactggtggatgaggctggtgggagcggcagggctgggcctgcccctaaggggagctccctgcaagtcacatttcccagtgaaacactgaacttatcagaaaaatgtatataataggcaaggaaagaaatacagtactgtttctggacccttataaaatcctgtgcaatagacacatacatgtcacatttagctgtgctcagaagggctatcatca

SEQ ID NO: 1244 - protein, 488 aa, Homo sapien
MSTPGVNSSASLSPDRLNSPVTIPAVMFIFGVVGNLVAIVVLCKSRKEQKETTFYTLVCGLAVTDLLGTLLVSPVTIATYMKGQWPGGQPLCEYSTFILLFFSLSGLSIICAMSVERYLAINHAYFYSHYVDKRLAGLTLFAVYASNVLFCALPNMGLGSSRLQYPDTWCFIDWTTNVTAHAAYSYMYAGFSSFLILATVLCNVLVCGALLRMHRQFMRRTSLGTEQHHAAAAASVASRGHPAASPALPRLSDFRRRRSFRRIAGAEIQMVILLIATSLVVLICSIPLVVRVFVNQLYQPSLEREVSKNPDLQAIRIASVNPILDPWIYILLRKTVLSKAIEKIKCLFCRIGGSRRERSGQHCSDSQRTSSAMSGHSRSFISRELKEISSTSQTLLPDLSLPDLSENGLGGRNLLPGVPGMGLAQEDTTSLRTLRISETSDSSQGQDSESVLLVDEAGGSGRAGPAPKGSSLQVTFPSETLNLSEKCI

SEQ ID NO: 1245 - DNA, 3427 bp, Homo sapien
tggaaaggcgagagcggagctccaagcccggcagcccgagaggaagatgaacagccccaggccagagcctctggcagagtggaccccgagccgcccccaggtagccaggagcggcctcagcggcagccgcaaactccagtagccgcccgtgctgcccgtggctggggcggagggcagccagagctggggaccaaggctccgcgccacctgcgcgcacagcctcacacctgaacgctgtcctcccgcagacgagaccggcgggcactgcaaagctgggactcgtctttgaaggaaaaaaaatagcgagtaagaaatccagcaccattcttcactgacccatcccgctgcacctcttgtttcccaagtttttgaaagctggcaactctgacctcggtgtccaaaaatcgacagccactgagaccggctttgagaagccgaagatttggcagtttccagactgagcaggacaaggtgaaagcaggttggaggcgggtccaggacatctgagggctgaccctgggggctcgtgaggctgccaccgctgctgccgctacagacccagccttgcactccaaggctgcgcaccgccagccactatcatgtccactcccggggtcaattcgtccgcctccttgagccccgaccggctgaacagcccagtgaccatcccggcggtgatgttcatcttcggggtggtgggcaacctggtggccatcgtggtgctgtgcaagtcgcgcaaggagcagaaggagacgactttctacacgctggtatgtgggctggctgtcaccgacctgttgggcactttgttggtgagcccggtgaccatcgccacgtacatgaagggccaatggcccgggggccagccgctgtgcgagtacagcaccttcattctgctcttcttcagcctgtccggcctcagcatcatctgcgccatgagtgtcgagcgctacctggccatcaaccatgcctatttctacagccactacgtggacaagcgattggcgggcctcacgctctttgcagtctatgcgtccaacgtgctcttttgcgcgctgcccaacatgggtctcggtagctcgcggctgcagtacccagacacctggtgcttcatcgactggaccaccaacgtgacggcgcacgccgcctactcctacatgtacgcgggcttcagctccttcctcattctcgccaccgtcctctgcaacgtgcttgtgtgcggcgcgctgctccgcatgcaccgccagttcatgcgccgcacctcgctgggcaccgagcagcaccacgcggccgcggccgcctcggttgcctcccggggccaccccgctgcctccccagccttgccgcgcctcagcgactttcggcgccgccggagcttccgccgcatcgcgggcgccgagatccagatggtcatcttactcattgccacctccctggtggtgctcatctgctccatcccgctcgtggtgcgagtattcgtcaaccagttatatcagccaagtttggagcgagaagtcagtaaaaatccagatttgcaggccatccgaattgcttctgtgaaccccatcctagacccctggatatatatcctcctgagaaagacagtgctcagtaaagcaatagagaagatcaaatgcctcttctgccgcattggcgggtcccgcagggagcgctccggacagcactgctcagacagtcaaaggacatcttctgccatgtcaggccactctcgctccttcatctcccgggagctgaaggagatcagcagtacatctcagaccctcctgccagacctctcactgccagacctcagtgaaaatggccttggaggcaggaatttgcttccaggtgtgcctggcatgggcctggcccaggaagacaccacctcactgaggactttgcgaatatcagagacctcagactcttcacagggtcaggactcagagagtgtcttactggtggatgaggctggtgggagcggcagggctgggcctgcccctaaggggagctccctgcaagtcacatttcccagtgaaacactgaacttatcagaaaaatgtatataataggcaaggaaagaaatacagtactgtttctggacccttataaaatcctgtgcaatagacacatacatgtcacatttagctgtgctcagaagggctatcatcatcctacaactcacattagagaacatcctggcttttgagcacttttcaaacaatcaagttgactcacgtgggtcctgaggcctgcagcacgtcggatgctaccccactatgacagaggattgtggtcacaacttgatggctgcgaagacctaccctccgtttttctactagataggaggatggtagaagtttggctgctgtcataacatccagagctttgtcgtatttggcacacagcagaggcccagatattagaaaggctctattccaataaactatgaggactgccttatggatgatttaagtgtctcactaaagcatgaaatgtgaatttttattgttgtacatacgatttaaagtatttaaagtattttcttctctgtgagaaggtttattgttaatacaaggtataataaaattatcgcaacccctctccttccagtataaccagctgaagttgcagatgttagatatttttcataaacaagttcgagtcaaagttgaaaattcatagtaagattgatatctataaaatagatataaatttttaagagaaagaatttagtattatcaaagggataaagaaaaaaatactatttaagatgtgaaaattacagtccaaaatactgttctttccaggctatgtataaaatacatagtgaaaattgtttagtgatattacatttatttatccagaaaactgtgatttcaggagaacctaacatgctggtgaatattttcaactttttccctcactaattggtacttttaaaaacataacataaattttttgaagtctttaataaataacccataattgaagtgtataatataaaaaattttaaaaatctaagcagcttattgtttctctgaaagtgtgtgtagttttactttcctaaggaattaccaagaatatcctttaaaatttaaaaggatggcaagttgcatcagaaagctttattttgagatgtaaaaagattcccaaacgtggttacattagccattcatgtatgtcagaagtgcagaattggggcacttaatggtcaccttgtaacagttttgtgtaactcccagtgatgctgtacacatatttgaagggtctttctcaaagaaatattaagcatgttttgttgctcagtgtttttgtgaattgcttggttgtaattaaattctgagcctgatattgatatggttttaagaagcagttgtaccaagtgaaattattttggagattataataaatatatacattcaatctg

SEQ ID NO: 1246 - protein, 462 aa, Homo sapien
MFIFGVVGNLVAIVVLCKSRKEQKETTFYTLVCGLAVTDLLGTLLVSPVTIATYMKGQWPGGQPLCEYSTFILLFFSLSGLSIICAMSVERYLAINHAYFYSHYVDKRLAGLTLFAVYASNVLFCALPNMGLGSSRLQYPDTWCFIDWTTNVTAHAAYSYMYAGFSSFLILATVLCNVLVCGALLRMHRQFMRRTSLGTEQHHAAAAASVASRGHPAASPALPRLSDFRRRRSFRRIAGAEIQMVILLIATSLVVLICSIPLVVRVFVNQLYQPSLEREVSKNPDLQAIRIASVNPILDPWIYILLRKTVLSKAIEKIKCLFCRIGGSRRERSGQHCSDSQRTSSAMSGHSRSFISRELKEISSTSQTLLPDLSLPDLSENGLGGRNLLPGVPGMGLAQEDTTSLRTLRISETSDSSQGQDSESVLLVDEAGGSGRAGPAPKGSSLQVTFPSETLNLSEKCI

SEQ ID NO: 1247 - DNA, 1067 bp, Homo sapien
gcgtctgccaggagctacggccggaagatggcggcggccgcagagttgtcgctactggagaagtccctgggactgagtaaggggaataaatacagtgctcagggcgagcgacagattccagttcttcagacaaacaatggtccaagtctaacaggattgactactatagcagctcatctagtcaagcaagccaacaaagaatatttgctggggagtactgcagaagaaaaagcaatcgttcagcagtggttagaatacagggtcactcaagtagatgggcactccagtaaaaatgacatccacacactgttgaaggatcttaattcatatcttgaagataaagtctaccttacagggtataactttacattagcagatatactattgtactatggacttcatcgctttatagttgacctgacagttcaagaaaaggagaaatatcttaatgtgtctcgctggttttgtcacattcagcattatccaggcatcaggcaacatctgtctagtgttgtcttcatcaagaacagactatatactaattcccactagaagctgtccatgccatacagaagatctattaaaagtgttttaaatggaaaatgtactctagaccacaggactaatgtaaattaatatacagtcattcattatttgttgaagttgatagaatttttgaagtgtaaacttgtgtctgaatgttttatttgttctttagctgaagttttgcaatttttatgtcaaaattcaattgctattaaacaagttgagatccagttataaattaaccttgtttttagtagatgacatttatttcaataaaagttgcaaatcgggcttaatcttaaaattggtggtcatttcaatggttgacatatttggctatttattaacctctctttcatattctaaaattcattttccccttatggatatttatggtagtttgttaagaactgataaattgtgccaaggaagccaaaagggaagacagatggatttgttttaaaatgtttatgtgagctagtaaatgtgggaaaaaaaaaaaaaaaaaaaaaaaaaaaaaa

SEQ ID NO: 1248 - protein, 174 aa, Homo sapien
MAAAAELSLLEKSLGLSKGNKYSAQGERQIPVLQTNNGPSLTGLTTIAAHLVKQANKEYLLGSTAEEKAIVQQWLEYRVTQVDGHSSKNDIHTLLKDLNSYLEDKVYLTGYNFTLADILLYYGLHRFIVDLTVQEKEKYLNVSRWFCHIQHYPGIRQHLSSVVFIKNRLYTNSH

SEQ ID NO: 1249 - DNA, 3649 bp, Homo sapien
agtcccagcccaagggtagctggaggcgcgcaggccggctccgctccggccccggacgatgcggcgcgcccaggatgctgccgtgcctcgtagtgctgctggcggcgctcctcagcctccgtcttggctcagacgctcatgggacagagctgcccagccctccgtctgtgtggtttgaagcagaatttttccaccacatcctccactggacacccatcccaaatcagtctgaaagtacctgctatgaagtggcgctcctgaggtatggaatagagtcctggaactccatctccaactgtagccagaccctgtcctatgaccttaccgcagtgaccttggacctgtaccacagcaatggctaccgggccagagtgcgggctgtggacggcagccggcactccaactggaccgtcaccaacacccgcttctctgtggatgaagtgactctgacagttggcagtgtgaacctagagatccacaatggcttcatcctcgggaagattcagctacccaggcccaagatggcccccgcaaatgacacatatgaaagcatcttcagtcacttccgagagtatgagattgccattcgcaaggtgccgggaaacttcacgttcacacacaagaaagtaaaacatgaaaacttcagcctcctaacctctggagaagtgggagagttctgtgtccaggtgaaaccatctgtcgcttcccgaagtaacaaggggatgtggtctaaagaggagtgcatctccctcaccaggcagtatttcaccgtgaccaacgtcatcatcttctttgcctttgtcctgctgctctccggagccctcgcctactgcctggccctccagctgtatgtgcggcgccgaaagaagctacccagtgtcctgctcttcaagaagcccagccccttcatcttcatcagccagcgtccctccccagagacccaagacaccatccacccgcttgatgaggaggcctttttgaaggtgtccccagagctgaagaacttggacctgcacggcagcacagacagtggctttggcagcaccaagccatccctgcagactgaagagccccagttcctcctccctgaccctcacccccaggctgacagaacgctgggaaacggggagccccctgtgctgggggacagctgcagtagtggcagcagcaatagcacagacagcgggatctgcctgcaggagcccagcctgagccccagcacagggcccacctgggagcaacaggtggggagcaacagcaggggccaggatgacagtggcattgacttagttcaaaactctgagggccgggctggggacacacagggtggctcggccttgggccaccacagtcccccggagcctgaggtgcctggggaagaagacccagctgctgtggcattccagggttacctgaggcagaccagatgtgctgaagagaaggcaaccaagacaggctgcctggaggaagaatcgcccttgacagatggccttggccccaaattcgggagatgcctggttgatgaggcaggcttgcatccaccagccctggccaagggctatttgaaacaggatcctctagaaatgactctggcttcctcaggggccccaacgggacagtggaaccagcccactgaggaatggtcactcctggccttgagcagctgcagtgacctgggaatatctgactggagctttgcccatgaccttgcccctctaggctgtgtggcagccccaggtggtctcctgggcagctttaactcagacctggtcaccctgcccctcatctctagcctgcagtcaagtgagtgactcgggctgagaggctgcttttgattttagccatgcctgctcctctgcctggaccaggaggagggcccctggggcagaagttaggcacgaggcagtctgggcacttttctgcaagtccactggggctggccccagccaggccctgcagggctggtcagggtgtctggggcaggaggaggccaactcactgaactagtgcagggtatgtgggtggcactgacctgttctgttgactggggccctgcagactctggcagagctgagaagggcagggaccttctccctcctaggaactctttcctgtatcataaaggattatttgctcaggggaaccatggggctttctggagttgtggtgaggccaccaggctgaagtcagctcagacccagacctccctgcttaggccactcgagcatcagagcttccagcaggaggaagggctgtaggaatggaagcttcagggccttgctgctggggtcatttttaggggaaaaaggaggatatgatggtcacatggggaacctcccctcatcgggcctctggggcaggaagcttgtcactggaagatcttaaggtatatattttctggacactcaaacacatcataatggattcactgaggggagacaaagggagccgagaccctggatggggcttccagctcagaacccatccctctggtgggtacctctggcacccatctgcaaatatctccctctctccaacaaatggagtagcatccccctggggcacttgctgaggccaagccactcacatcctcactttgctgccccaccatcttgctgacaacttccagagaagccatggttttttgtattggtcataactcagccctttgggcggcctctgggcttgggcaccagctcatgccagccccagagggtcagggttggaggcctgtgcttgtgtttgctgctaatgtccagctacagacccagaggataagccactgggcactgggctggggtccctgccttgttggtgttcagctgtgtgattttggactagccacttgtcagagggcctcaatctcccatctgtgaaataaggactccacctttaggggaccctccatgtttgctgggtattagccaagctggtcctgggagaatgcagatactgtccgtggactaccaagctggcttgtttcttatgccagaggctaacagatccaatgggagtccatggtgtcatgccaagacagtatcagacacagccccagaagggggcattatgggccctgcctccccataggccatttggactctgccttcaaacaaaggcagttcagtccacaggcatggaagctgtgaggggacaggcctgtgcgtgccatccagagtcatctcagccctgcctttctctggagcattctgaaaacagatattctggcccagggaatccagccatgacccccacccctctgccaaagtactcttaggtgccagtctggtaactgaactccctctggaggcaggcttgagggaggattcctcagggttcccttgaaagctttatttatttattttgttcatttatttattggagaggcagcattgcacagtgaaagaattctggatatctcaggagccccgaaattctagctctgactttgctgtttccagtggtatgaccttggagaagtcacttatcctcttggagcctcagtttcctcatctgcagaataatgactgacttgtctaattcgtagggatgtgaggttctgctgaggaaatgggtatgaatgtgccttgaacacaaagctctgtcaataagtgatacatgttttttattccaataaattgtcaagaccaca

SEQ ID NO: 1250 - protein, 578 aa, Homo sapien
MLPCLVVLLAALLSLRLGSDAHGTELPSPPSVWFEAEFFHHILHWTPIPNQSESTCYEVALLRYGIESWNSISNCSQTLSYDLTAVTLDLYHSNGYRARVRAVDGSRHSNWTVTNTRFSVDEVTLTVGSVNLEIHNGFILGKIQLPRPKMAPANDTYESIFSHFREYEIAIRKVPGNFTFTHKKVKHENFSLLTSGEVGEFCVQVKPSVASRSNKGMWSKEECISLTRQYFTVTNVIIFFAFVLLLSGALAYCLALQLYVRRRKKLPSVLLFKKPSPFIFISQRPSPETQDTIHPLDEEAFLKVSPELKNLDLHGSTDSGFGSTKPSLQTEEPQFLLPDPHPQADRTLGNGEPPVLGDSCSSGSSNSTDSGICLQEPSLSPSTGPTWEQQVGSNSRGQDDSGIDLVQNSEGRAGDTQGGSALGHHSPPEPEVPGEEDPAAVAFQGYLRQTRCAEEKATKTGCLEEESPLTDGLGPKFGRCLVDEAGLHPPALAKGYLKQDPLEMTLASSGAPTGQWNQPTEEWSLLALSSCSDLGISDWSFAHDLAPLGCVAAPGGLLGSFNSDLVTLPLISSLQSSE

SEQ ID NO: 1251 - DNA, 1824 bp, Homo sapien
cagctctctgtcagaatggccaccatggtaccatccgtgttgtggcccagggcctgctggactctgctggtctgctgtctgctgaccccaggtgtccaggggcaggagttccttttgcgggtggagccccagaaccctgtgctctctgctggagggtccctgtttgtgaactgcagtactgattgtcccagctctgagaaaatcgccttggagacgtccctatcaaaggagctggtggccagtggcatgggctgggcagccttcaatctcagcaacgtgactggcaacagtcggatcctctgctcagtgtactgcaatggctcccagataacaggctcctctaacatcaccgtgtacgggctcccggagcgtgtggagctggcacccctgcctccttggcagccggtgggccagaacttcaccctgcgctgccaagtggagggtgggtcgccccggaccagcctcacggtggtgctgcttcgctgggaggaggagctgagccggcagcccgcagtggaggagccagcggaggtcactgccactgtgctggccagcagagacgaccacggagcccctttctcatgccgcacagaactggacatgcagccccaggggctgggactgttcgtgaacacctcagccccccgccagctccgaacctttgtcctgcccgtgacccccccgcgcctcgtggccccccggttcttggaggtggaaacgtcgtggccggtggactgcaccctagacgggctttttccagcctcagaggcccaggtctacctggcgctgggggaccagatgctgaatgcgacagtcatgaaccacggggacacgctaacggccacagccacagccacggcgcgcgcggatcaggagggtgcccgggagatcgtctgcaacgtgaccctagggggcgagagacgggaggcccgggagaacttgacggtctttagcttcctaggacccattgtgaacctcagcgagcccaccgcccatgaggggtccacagtgaccgtgagttgcatggctggggctcgagtccaggtcacgctggacggagttccggccgcggccccggggcagccagctcaacttcagctaaatgctaccgagagtgacgacggacgcagcttcttctgcagtgccactctcgaggtggacggcgagttcttgcacaggaacagtagcgtccagctgcgagtcctgtatggtcccaaaattgaccgagccacatgcccccagcacttgaaatggaaagataaaacgagacacgtcctgcagtgccaagccaggggcaacccgtaccccgagctgcggtgtttgaaggaaggctccagccgggaggtgccggtggggatcccgttcttcgtcaacgtaacacataatggtacttatcagtgccaagcgtccagctcacgaggcaaatacaccctggtcgtggtgatggacattgaggctgggagctcccactttgtccccgtcttcgtggcggtgttactgaccctgggcgtggtgactatcgtactggccttaatgtacgtcttcagggagcaccaacggagcggcagttaccatgttagggaggagagcacctatctgcccctcacgtctatgcagccgacagaagcaatgggggaagaaccgtccagagctgagtgacgctgggatccgggatcaaagttggcgggggcttggctgtgccctcagattccgcaccaataaagccttcaaactccctaaaaaaaaaaaaaaaaaaaaaaaaaaaaaaaaaaaaaaaaaaaaaaaaaaaaaaaaaaaaaaaaaaaaaaaaaaaaaaaaaaaaaa

SEQ ID NO: 1252 - protein, 547 aa, Homo sapien
MATMVPSVLWPRACWTLLVCCLLTPGVQGQEFLLRVEPQNPVLSAGGSLFVNCSTDCPSSEKIALETSLSKELVASGMGWAAFNLSNVTGNSRILCSVYCNGSQITGSSNITVYGLPERVELAPLPPWQPVGQNFTLRCQVEGGSPRTSLTVVLLRWEEELSRQPAVEEPAEVTATVLASRDDHGAPFSCRTELDMQPQGLGLFVNTSAPRQLRTFVLPVTPPRLVAPRFLEVETSWPVDCTLDGLFPASEAQVYLALGDQMLNATVMNHGDTLTATATATARADQEGAREIVCNVTLGGERREARENLTVFSFLGPIVNLSEPTAHEGSTVTVSCMAGARVQVTLDGVPAAAPGQPAQLQLNATESDDGRSFFCSATLEVDGEFLHRNSSVQLRVLYGPKIDRATCPQHLKWKDKTRHVLQCQARGNPYPELRCLKEGSSREVPVGIPFFVNVTHNGTYQCQASSSRGKYTLVVVMDIEAGSSHFVPVFVAVLLTLGVVTIVLALMYVFREHQRSGSYHVREESTYLPLTSMQPTEAMGEEPSRAE

SEQ ID NO: 1253 - DNA, 916 bp, Homo sapien
acttctcgctcgacacagccagagctggaggtgggtgcccggcacggaggggcctgcggaccaatggctctgccctgcaccttagggctcgggatgctgctggccctgccaggggccttgggctcgggtggcagcgcggaggacagcgtgggctccagctctgtcaccgttgtcctgctgctgctgctgctcctactgctggccactggcctagcactggcctggcgccgcctcagccgtgactcagggggctactaccacccggcccgcctaggtgccgcgctgtggggccgcacgcggcgcctgctctgggccagccccccaggtcgctggctgcaggcccgagctgagctggggtccacagacaatgaccttgagcgacaggaggatgagcaggacacagactatgaccacgtcgcggatggtggcctgcaggctgaccctggggaaggcgagcagcaatgtggagaggcgtccagcccagagcaggtccccgtgcgggctgaggaagccagagacagtgacacggagggcgacctggtcctcggctccccaggaccagcgagcgcagggggcagtgctgaggccctgctgagtgacctgcacgcctttgctggcagcgcagcctgggatgacagcgccagggcagctgggggccagggcctccatgtcaccgcactgtagaggccggtcttggtgtcccatccctgtcacagccgctcactccccgtgcctctgcttcccaagatgccatggctggactggacccccagcccacatgaccatgcctcagactgtcacccctaccagttcccaagtccatgtgtaccccgctcaccacgggaacggccccccccaaccacaggcatcaggcaaccatttgaaataaaactccttcagcctgtgaaaaaaaaaa

SEQ ID NO: 1254 - protein, 206 aa, Homo sapien
MALPCTLGLGMLLALPGALGSGGSAEDSVGSSSVTVVLLLLLLLLLATGLALAWRRLSRDSGGYYHPARLGAALWGRTRRLLWASPPGRWLQARAELGSTDNDLERQEDEQDTDYDHVADGGLQADPGEGEQQCGEASSPEQVPVRAEEARDSDTEGDLVLGSPGPASAGGSAEALLSDLHAFAGSAAWDDSARAAGGQGLHVTAL

SEQ ID NO: 1255 - DNA, 1389 bp, Homo sapien
cgcggacttctgccaagcaccggctcatgtgaggctcgcggcacagcgttctctgggctccccagaagccagcctttcgctcccggacccggcagcccgagcaggagccgtgggaccgggcgccagcaccctctgcggcgtgtcatgggcccgcgccgccggagccgaaagcccgaggccccgaggaggcgcagcccgagcccgaccccgacccccggcccctcccggcggggcccctccttaggcgcttcctcccatcaacacagtcggcggagacaaggttggctaaaggagatccgaaagcttcagaagagcacacacctcttgataaggaagctgcccttcagccgcctggcaagagaaatatgtgttaaattcactcgtggtgtggacttcaattggcaagcccaggccctattggccctacaagaggcagcagaagcatttctagttcatctctttgaggacgcctatctcctcaccttacatgcaggccgagttactctcttcccaaaggatgtgcaactggcccggaggatccggggccttgaggagggactcggctgagctcctgcacccagtgtttctgtcagtctttcctgctcagccaggggggatgataccggggactctccagagccatgactagatccaatggattctgcgatgctgtctggactttgctgtctctgaacagtatgtgtgtgttgctttaaatatttttcttttttttgagaaggagaagactgcatgactttcctctgtaacagaggtaatatatgagacaatcaacaccgttccaaaggcctgaaaataattttcagataaagagactccaaggttgactttagtttgtgagttactcatgtgactatttgaggattttgaaaacatcagatttgctgtggtatgggagaaaaggttatgtacttattattttagctctttctgtaatatttacattttttaccatatgtacatttgtacttttattttacacataagggaaaaaataagaccactttgagcagttgcctggaaggctgggcatttccatcatatagacctctgcccttcagagtagcctcaccattagtggcagcatcatgtaactgagtggactgtgcttgtcaacggatgtgtagcttttcagaaacttaattggggatgaatagaaaacctgtaagctttgatgttctggttacttctagtaaattcctgtcaaaatcaattcagaaattctaacttggagaatttaacattttactcttgtaaatcatagaagatgtatcataacagttcagaattttaaagtacattttcgatgcttttatgggtatttttgtagtttctttgtagagagataataaaaatcaaaatatttaatga

SEQ ID NO: 1256 - protein, 140 aa, Homo sapien
MGPRRRSRKPEAPRRRSPSPTPTPGPSRRGPSLGASSHQHSRRRQGWLKEIRKLQKSTHLLIRKLPFSRLAREICVKFTRGVDFNWQAQALLALQEAAEAFLVHLFEDAYLLTLHAGRVTLFPKDVQLARRIRGLEEGLG

SEQ ID NO: 1257 - DNA, 2905 bp, Homo sapien
cggcagccagctgagagcaatgggaaatggggagtcccagctgtcctcggtgcctgctcagaagctgggttggtttatccaggaatacctgaagccctacgaagaatgtcagacactgatcgacgagatggtgaacaccatctgtgacgtctgcaggaaccccgaacagttccccctggtgcagggagtggccataggtggctcctatggacggaaaacagtcttaagaggcaactccgatggtacccttgtccttttcttcagtgacttaaaacaattccaggatcagaagagaagccaacgtgacatcctcgataaaactggggataagctgaagttctgtctgttcacgaagtggttgaaaaacaatttcgagatccagaagtcccttgatgggtccaccatccaggtgttcacaaaaaatcagagaatctctttcgaggtgctggccgccttcaacgctctgagcttaaatgataatcccagcccctggatctatcgagagctcaaaagatccttggataagacaaatgccagtcctggtgagtttgcagtctgcttcactgaactccagcagaagttttttgacaaccgtcctggaaaactaaaggatttgatcctcttgataaagcactggcatcaacagtgccagaaaaaaatcaaggatttaccctcgctgtctccgtatgccctggagctgcttacggtgtatgcctgggaacaggggtgcagaaaagacaactttgacattgctgaaggcgtcagaacggttctggagctgatcaaatgccaggagaagctgtgtatctattggatggtcaactacaactttgaagatgagaccatcaggaacatcctgctgcaccagctccaatcagcgaggccagtaatcttggatccagttgacccaaccaataatgtgagtggagataaaatatgctggcaatggctgaaaaaagaagctcaaacctggttgacttctcccaacctggataatgagttacctgcaccatcttggaatgtcctgcctgcaccactcttcacgaccccaggccaccttctggataagttcatcaaggagtttctccagcccaacaaatgcttcctagagcagattgacagtgctgttaacatcatccgtacattccttaaagaaaactgcttccgacaatcaacagccaagatccagattgtccggggaggatcaaccgccaaaggcacagctctgaagactggctctgatgccgatctcgtcgtgttccataactcacttaaaagctacacctcccaaaaaaacgagcggcacaaaatcgtcaaggaaatccatgaacagctgaaagccttttggagggagaaggaggaggagcttgaagtcagctttgagcctcccaagtggaaggctcccagggtgctgagcttctctctgaaatccaaagtcctcaacgaaagtgtcagctttgatgtgcttcctgcctttaatgcactgggtcagctgagttctggctccacacccagccccgaggtttatgcagggctcattgatctgtataaatcctcggacctcccgggaggagagttttctacctgtttcacagtcctgcagcgaaacttcattcgctcccggcccaccaaactaaaggatttaattcgcctggtgaagcactggtacaaagagtgtgaaaggaaactgaagccaaaggggtctttgcccccaaagtatgccttggagctgctcaccatctatgcctgggagcaggggagtggagtgccggattttgacactgcagaaggtttccggacagtcctggagctggtcacacaatatcagcagctcggcatcttctggaaggtcaattacaactttgaagatgagaccgtgaggaagtttctactgagccagttgcagaaaaccaggcctgtgatcttggacccaggcgaacccacaggtgacgtgggtggaggggaccgttggtgttggcatcttctggacaaagaagcaaaggttaggttatcctctccctgcttcaaggatgggactggaaacccaataccaccttggaaagtgccgacaatgcagacaccaggaagttgtggagctaggatccatcctattgtcaatgagatgttctcatccagaagccatagaatcctgaataataattctaaaagaaacttctggagatcatctggcaatcgcttttaaagactcggctcaccgtgagaaagagtcactcacatccattcttcccttgatggtccctattcctccttcccttgccttcttggacttcttgaaatcaatcaagactgcaaaccctttcataaagctgccttgctgaactcctctctgcaggagccctgcttaaaatagttgatgtcatcactttatgtgcatcttatttctgtcaacttgtatttttttttcttgtatttttccaattagctcctcctttttccttccagtctaaaaaaggaatcctctgtgtcttcaaagcaaagctctttactttccccttggttctcataactctgtgatcttgctctcggtgcttccaactcatccacgtcctgtctgtttcctctgtatacaaaaccctttctgcccctgctgacacagacatcctctatgccagcagccaggccaaccctttcattagaacttcaagctctccaaaggctcagattataactgttgtcatatttatatgaggctgttgtcttttccttctgagcctgcctttatccccccacccaggagtatcctcttgccaaagcaaaagactttttccttggctttagccttaaagatacttgaaggtctaggtgctttaacctcacataccctcacttaaacttttatcactgttgcatataccagttgtgatacaataaagaatgtatctgg

SEQ ID NO: 1258 - protein, 727 aa, Homo sapien
MGNGESQLSSVPAQKLGWFIQEYLKPYEECQTLIDEMVNTICDVCRNPEQFPLVQGVAIGGSYGRKTVLRGNSDGTLVLFFSDLKQFQDQKRSQRDILDKTGDKLKFCLFTKWLKNNFEIQKSLDGSTIQVFTKNQRISFEVLAAFNALSLNDNPSPWIYRELKRSLDKTNASPGEFAVCFTELQQKFFDNRPGKLKDLILLIKHWHQQCQKKIKDLPSLSPYALELLTVYAWEQGCRKDNFDIAEGVRTVLELIKCQEKLCIYWMVNYNFEDETIRNILLHQLQSARPVILDPVDPTNNVSGDKICWQWLKKEAQTWLTSPNLDNELPAPSWNVLPAPLFTTPGHLLDKFIKEFLQPNKCFLEQIDSAVNIIRTFLKENCFRQSTAKIQIVRGGSTAKGTALKTGSDADLVVFHNSLKSYTSQKNERHKIVKEIHEQLKAFWREKEEELEVSFEPPKWKAPRVLSFSLKSKVLNESVSFDVLPAFNALGQLSSGSTPSPEVYAGLIDLYKSSDLPGGEFSTCFTVLQRNFIRSRPTKLKDLIRLVKHWYKECERKLKPKGSLPPKYALELLTIYAWEQGSGVPDFDTAEGFRTVLELVTQYQQLGIFWKVNYNFEDETVRKFLLSQLQKTRPVILDPGEPTGDVGGGDRWCWHLLDKEAKVRLSSPCFKDGTGNPIPPWKVPTMQTPGSCGARIHPIVNEMFSSRSHRILNNNSKRNFWRSSGNRF

SEQ ID NO: 1259 - DNA, 822 bp, Homo sapien
ggagggggcatggcggatactgtgttgtttgagtttcttcacacggagatggtggctgagctgtgggctcacgaccccgaccccggcccgggggtgagcgccgggctccgtggggaggaagcgggggccaccaagggacagaagatgagcctgtcggtcctggagggtatggggttccgtgtgggccaggctctaggcgagaggctgccccgggagacgctggccttcagggaggagctggatgtcctcaagttcttgtgcaaagacctgtgggtggcggtgttccagaagcagatggacagcctgcgcaccaatcaccaggggacctacgtcctgcaagacaacagcttccccctcctcctcccgatggcctctggcctgcagtatctggaggaagcacccaagttcctggccttcacctgcggcctcctgcgcggcgccctctataccctgggcattgagagcgtggtcaccgcctccgtggcagccctgcccgtctgtaagttccaggtggtgattccgaaatcctaagcctgcctcgcacctgctgagccgcactgctgcccctggcctcaccggcctcaggagacggtggggccgctgcatttcggggtggtcttgggaatcccaggccctaggggtcacatttgctcaggaagtgggtatcaaattgaggtgggggtgtcagaggaggcaaaggggtcccagctgcggtcaggactgtggtgggattcccgcctcggcagcgtcactgcccagtagctgctcaataaaggctgtgtgtgtggaatctgaaaaaaaaaaaaaaaaaaaaaaaaaaaa

SEQ ID NO: 1260 - protein, 173 aa, Homo sapien
MADTVLFEFLHTEMVAELWAHDPDPGPGVSAGLRGEEAGATKGQKMSLSVLEGMGFRVGQALGERLPRETLAFREELDVLKFLCKDLWVAVFQKQMDSLRTNHQGTYVLQDNSFPLLLPMASGLQYLEEAPKFLAFTCGLLRGALYTLGIESVVTASVAALPVCKFQVVIPKS

SEQ ID NO: 1261 - DNA, 2838 bp, Homo sapien
ctccggcccggccccgagcaccgcctccccagccagcgccgccgcgatggcggaggacagcgagtctgcggccagccagcagagcctggaactggacgaccaggacacgtgcgggatagacggggacaatgaggaggagacggagcacgccaaaggaagtcctggagggtatttgggagccaaaaagaaaaagaagaaacagaagagaaaaaaggagaaaccaaattccggaggcaccaagtcagactcggcatctgattcccaggagattaaaattcagcagccttcgaaaaatcccagtgttccaatgcagaagttgcaggatatccagagagcaatggagctgctatccgcatgccagggcccagccaggaacattgatgaggctgcaaagcacagataccagttttgggacacacaaccggtaccaaaactagatgaagtcataacatctcatggtgcaattgaaccagataaagacaacgtacgccaagaaccgtattctttgccacagggttttatgtgggacactttagacttgagtgatgccgaagtgctcaaggagttatacacgttgttaaatgagaattacgtagaagatgatgacaatatgttccgatttgactattcacccgagttcctgttgtgggctctgcgtccaccaggctggctcctgcagtggcactgtggggtcagagtgtcttcaaataaaaaactggtcgggttcataagtgccatcccagcaaacattcggatttatgacagtgtgaagaagatggtagaaatcaactttctttgtgttcataagaagttgagatcgaaacgggtagccccagtgctaatccgagagatcactagaagagtgaacctggaagggatcttccaggctgtgtacaccgcgggagtggttcttcctaagcccatagccacatgcagatactggcatcgatcactaaaccccagaaaattggtagaagtgaaattttctcacttgagtagaaatatgactttacagagaacaatgaagctatacagacttccagatgttacaaagacttcaggtttgagaccaatggaaccaaaagatatcaaatcagttcgagaattaatcaacacttacctgaagcagtttcatctggctccagtgatggatgaagaggaagtagcccactggttcctcccccgggagcacattattgacacgtttgtagtggagagccccaacggtaaactgactgatttcctgagcttctatacgctcccctccacggtgatgcaccaccctgctcacaagagcctcaaagccgcctactcattctacaacatccacacagagacgcccctgctggacctcatgagcgacgcgctcatcctggctaaatcgaaaggatttgatgtattcaatgcactggatttgatggaaaataagacattcttggaaaaactcaagtttggtataggagatggcaatttgcagtattacctgtacaattggaggtgtccaggtacagattctgaaaaggttggactagtactacaatagatggatatttttatttctagaactctgacatcatcatttgttaatatttaatgatttctggaactgccattccaaagaagaataaaagcacaactcaagtgaaattgaagtagtcgataatcagaaaagatgacaaaagtccacatgtgacatttgtacgtttctagctagaatgttaaacttcatcctttttttactgttgacctatttgtgggagggatgaaaggctacaaagagcacattcttgtaattttcaaatttttgcctgtctcttgaagaggtattttttcacccttagaaaagggactgtttttctatggactaagtagaagttacagagtcatgtaagaaaatctttgctattgtgtggagagaaattgctgcatttctgtttcttaagtgatggtacatttgtccatgtaacagaacaaaagatccatttggaaattttttttactggtatcaccttacatggtatcactgggaacatttatggaatcaacacttctgtagctcagtgacaggtggtggttgtttaagtgcagagcaatattaaatgtactggtgactagtacatgtatttctccataagcagagttgccgaatcaataaacatgcaagtttgtactttgatctttaccaggtcagtggattgcttcaaaagcagagttttgtgcaagcactcactgtgctctctgaaagagcctgaggccgggcgtggtggctcacgcctgtaatcccagcactttgggaggccaaggtgggcagatcatgaggtcaggagatcgagaccattctggccaacatagtgaaaccccatctctactaaaaatacaaaaattagccgggcgtggtggcgtgtgcctgtagtcccagctgcttgggaggctgaggcaggagaatcgcttgaacctgagaggtgaggttgcagtgagccgagatcgagccactgcactccagcctgggtgacagagcgtgagactccgtctcaaaaaaaaaaaaaaaagaaagagcctgtacccgcgactaactagacttttcttgctgttgtgcaaagttcagtttcttctcagcaacatcaaggatatatgaagaaaaggaaataaaaaactgtaaagtcaaaagagatgcctggtggaacttattcgtgctatcagggcattgatagtttgaatgtttttattacttatgcaaaattgcacatactcctctatgctgattttatcatgaaaactgtcatgtgtcatgctaatggaaaatgtcttatttgtaaataagtattcataattttgccg

SEQ ID NO: 1262 - protein, 498 aa, Homo sapien
MAEDSESAASQQSLELDDQDTCGIDGDNEEETEHAKGSPGGYLGAKKKKKKQKRKKEKPNSGGTKSDSASDSQEIKIQQPSKNPSVPMQKLQDIQRAMELLSACQGPARNIDEAAKHRYQFWDTQPVPKLDEVITSHGAIEPDKDNVRQEPYSLPQGFMWDTLDLSDAEVLKELYTLLNENYVEDDDNMFRFDYSPEFLLWALRPPGWLLQWHCGVRVSSNKKLVGFISAIPANIRIYDSVKKMVEINFLCVHKKLRSKRVAPVLIREITRRVNLEGIFQAVYTAGVVLPKPIATCRYWHRSLNPRKLVEVKFSHLSRNMTLQRTMKLYRLPDVTKTSGLRPMEPKDIKSVRELINTYLKQFHLAPVMDEEEVAHWFLPREHIIDTFVVESPNGKLTDFLSFYTLPSTVMHHPAHKSLKAAYSFYNIHTETPLLDLMSDALILAKSKGFDVFNALDLMENKTFLEKLKFGIGDGNLQYYLYNWRCPGTDSEKVGLVLQ

SEQ ID NO: 1263 - DNA, 2838 bp, Homo sapien; identical to SEQ ID NO: 1261

SEQ ID NO: 1264 - protein, 498 aa, Homo sapien; identical to SEQ ID NO: 1262

SEQ ID NO: 1265 - DNA, 2403 bp, Homo sapien
tttgcaggtgcctcaggaaccctgaagctgggctgagccatgatgctgctgccagaacccctgcagagggcctggtttcaggagactcagagtcctctgtgaaaaagcccttggagagcgccccagcagggctgcacttggctcctgtgaggaaggggctcaggggtctgggcccctccgcctgggccgggctgggagccaggcgggcggctgggctgcagcaatggaccgtgagctggcccagcccgcgtccgtgctgagcctgcctgtcgtctgtggccatgcccatcatgggctcctcggtgtacatcacggtggagctggccattgctgtgctggccatcctgggcaatgtgctggtgtgctgggccgtgtggctcaacagcaacctgcagaacgtcaccaactactttgtggtgtcactggcggcggccgacatcgcagtgggtgtgctcgccatcccctttgccatcaccatcagcaccgggttctgcgctgcctgccacggctgcctcttcattgcctgcttcgtcctggtcctcacgcagagctccatcttcagtctcctggccatcgccattgaccgctacattgccatccgcatcccgctccggtacaatggcttggtgaccggcacgagggctaagggcatcattgccatctgctgggtgctgtcgtttgccatcggcctgactcccatgctaggttggaacaactgcggtcagccaaaggagggcaagaaccactcccagggctgcggggagggccaagtggcctgtctctttgaggatgtggtccccatgaactacatggtgtacttcaacttctttgcctgtgtgctggtgcccctgctgctcatgctgggtgtctatttgcggatcttcctggcggcgcgacgacagctgaagcagatggagagccagcctctgccgggggagcgggcacggtccacactgcagaaggaggtccatgctgccaagtcactggccatcattgtggggctctttgccctctgctggctgcccctacacatcatcaactgcttcactttcttctgccccgactgcagccacgcccctctctggctcatgtacctggccatcgtcctctcccacaccaattcggttgtgaatcccttcatctacgcctaccgtatccgcgagttccgccagaccttccgcaagatcattcgcagccacgtcctgaggcagcaagaacctttcaaggcagctggcaccagtgcccgggtcttggcagctcatggcagtgacggagagcaggtcagcctccgtctcaacggccacccgccaggagtgtgggccaacggcagtgctccccaccctgagcggaggcccaatggctatgccctggggctggtgagtggagggagtgcccaagagtcccaggggaacacgggcctcccagacgtggagctccttagccatgagctcaagggagtgtgcccagagccccctggcctagatgaccccctggcccaggatggagcaggagtgtcctgatgattcatggagtttgccccttcctaagggaaggagatctttatctttctggttggcttgaccagtcacgttgggagaagagagagagtgccaggagaccctgagggcagccggttcctactttggactgagagaagggagccccaggctggagcagcatgaggcccagcaagaagggcttgggttctgaggaagcagatgtttcatgctgtgaggccttgcaccaggtgggggccacagcaccagcagcatctttgctgggcaggcccagccctccactgcagaagcatctggaagcaccaccttgtctccacagagcagcttgggcacagcagactggcctggccctgagactggggagtggctccaatagcctcctgccacccacacaccactctccctagactctcctagggttcaggagctgctgggcccagaggtgacatttgacttttttccaggaaaaatgtaagtgtgaggaaaccctttttattttattacctttcactctctggctgctgggtctgccgtcggtcctgctgctaacctggcaccagagcctctgcccggggagcctcaggcagtcctctcctgctgtcacagctgccatccacttctcagtcccagggccatctcttggagtgacaaagctgggatcaaggatagggagttgtaacagagcagtgccagagcatgggcccaggtcccaggggagaggttggggctggcaggccactggcatgtgctgagtagcgcagagctacccagtgagaggccttgtctaactgcctttccttctaaagggaatgtttttttctgagataaaataaaaacgagccacatcgtgttttaagcttgtccaaatgaaaaaaaaaaaaaaaaa

SEQ ID NO: 1266 - protein, 412 aa, Homo sapien
MPIMGSSVYITVELAIAVLAILGNVLVCWAVWLNSNLQNVTNYFVVSLAAADIAVGVLAIPFAITISTGFCAACHGCLFIACFVLVLTQSSIFSLLAIAIDRYIAIRIPLRYNGLVTGTRAKGIIAICWVLSFAIGLTPMLGWNNCGQPKEGKNHSQGCGEGQVACLFEDVVPMNYMVYFNFFACVLVPLLLMLGVYLRIFLAARRQLKQMESQPLPGERARSTLQKEVHAAKSLAIIVGLFALCWLPLHIINCFTFFCPDCSHAPLWLMYLAIVLSHTNSVVNPFIYAYRIREFRQTFRKIIRSHVLRQQEPFKAAGTSARVLAAHGSDGEQVSLRLNGHPPGVWANGSAPHPERRPNGYALGLVSGGSAQESQGNTGLPDVELLSHELKGVCPEPPGLDDPLAQDGAGVS

SEQ ID NO: 1267 - DNA, 2771 bp, Homo sapien
ggccacaggccagcgccactctgccaggctcccggccatcgcccgcctggtgcgccgcccgccagctctttgcccgcgcggggccgcccgccgcgggctcagggcagaccatgcgcccgccaagtccgctgcccgcccgctggctatgcgtgctggcaggcgccctcgcctgggcccttgggccggcgggcggccaggcggccaggctgcaggaggagtgtgactatgtgcagatgatcgaggtgcagcacaagcagtgcctggaggaggcccagctggagaatgagacaataggctgcagcaagatgtgggacaacctcacctgctggccagccacccctcggggccaggtagttgtcttggcctgtcccctcatcttcaagctcttctcctccattcaaggccgcaatgtaagccgcagctgcaccgacgaaggctggacgcacctggagcctggcccgtaccccattgcctgtggtttggatgacaaggcagcgagtttggatgagcagcagaccatgttctacggttctgtgaagaccggctacaccattggctacggcctgtccctcgccacccttctggtcgccacagctatcctgagcctgttcaggaagctccactgcacgcggaactacatccacatgcacctcttcatatccttcatcctgagggctgccgctgtcttcatcaaagacttggccctcttcgacagcggggagtcggaccagtgctccgagggctcggtgggctgtaaggcagccatggtctttttccaatattgtgtcatggctaacttcttctggctgctggtggagggcctctacctgtacaccctgcttgccgtctccttcttctctgagcggaagtacttctgggggtacatactcatcggctggggggtacccagcacattcaccatggtgtggaccatcgccaggatccattttgaggattatgggtgctgggacaccatcaactcctcactgtggtggatcataaagggccccatcctcacctccatcttggtaaacttcatcctgtttatttgcatcatccgaatcctgcttcagaaactgcggcccccagatatcaggaagagtgacagcagtccatactcaaggctagccaggtccacactcctgctgatccccctgtttggagtacactacatcatgttcgccttctttccggacaattttaagcctgaagtgaagatggtctttgagctcgtcgtggggtctttccagggttttgtggtggctatcctctactgcttcctcaatggtgaggtgcaggcggagctgaggcggaagtggcggcgctggcacctgcagggcgtcctgggctggaaccccaaataccggcacccgtcgggaggcagcaacggcgccacgtgcagcacgcaggtttccatgctgacccgcgtcagcccaggtgcccgccgctcctccagcttccaagccgaagtctccctggtctgaccaccaggatcccaggggcccaaggcggcccctcccgccccttcccactcaccccggcagacgccggggacagaggcctgcccgggcgcggccagccccggccctgggctcggaggctgcccccggccccctggtctctggtccggacactcctagagaacgcagccctagagcctgcctggagcgtttctagcaagtgagagagatgggagctcctctcctggaggattgcaggtggaactcagtcattagactcctcctccaaaggccccctacgccaatcaagggcaaaaagtctacatactttcatcctgactctgccccctgctggctcttctgcccaattggaggaaagcaaccggtggatcctcaaacaacactggtgtgacctgagggcagaaaggttctgcccggggaaggtcaccagcaccaacaccacggtagtgcctgaaatttcaccattgctgtcaagttcctttgggttaagcattaccactcaggcatttgactgaagatgcagctcactaccctattctctctttacgcttagttatcagctttttaaagtgggttattctggagtttttgtttggagagcacacctatcttagtggttccccaccgaagtggactggcccctgggtcagtctggtgggaggacggtgcaacccaaggactgagggactctgaagcctctgggaaatgagaaggcagccaccagcgaatgctaggtctcggactaagcctacctgctctccaagtctcagtggcttcatctgtcaagtgggatctgtcacaccagccatacttatctctctgtgctgtggaagcaacaggaatcaagagctgccctccttgtccacccacctatgtgccaactgttgtaactaggctcagagatgtgcacccatgggctctgacagaaagcagatacctcaccctgctacacatacaggatttgaactcagatctgtctgataggaatgtgaaagcacggactcttactgctaacttttgtgtatcgtaaccagccagatcctcttggttatttgtttaccacttgtattattaatgccattatcctgaattccccttgccaccccaccctccctggcgtgtggctgaggaggcctccatctcatgtatcatctggataggagcctgctggtcacagcctcctctgtctgcccttcaccccagtggccactcagcttcctacccacacctctgccagaagatcccctcaggactgcaacaggcttgtgcaacaataaatgttggcttgga

SEQ ID NO: 1268 - protein, 457 aa, Homo sapien
MRPPSPLPARWLCVLAGALAWALGPAGGQAARLQEECDYVQMIEVQHKQCLEEAQLENETIGCSKMWDNLTCWPATPRGQVVVLACPLIFKLFSSIQGRNVSRSCTDEGWTHLEPGPYPIACGLDDKAASLDEQQTMFYGSVKTGYTIGYGLSLATLLVATAILSLFRKLHCTRNYIHMHLFISFILRAAAVFIKDLALFDSGESDQCSEGSVGCKAAMVFFQYCVMANFFWLLVEGLYLYTLLAVSFFSERKYFWGYILIGWGVPSTFTMVWTIARIHFEDYGCWDTINSSLWWIIKGPILTSILVNFILFICIIRILLQKLRPPDIRKSDSSPYSRLARSTLLLIPLFGVHYIMFAFFPDNFKPEVKMVFELVVGSFQGFVVAILYCFLNGEVQAELRRKWRRWHLQGVLGWNPKYRHPSGGSNGATCSTQVSMLTRVSPGARRSSSFQAEVSLV

SEQ ID NO: 1269 - DNA, 2667 bp, Homo sapien
gagggtgggtcgaccccgggaattcggcacgagcggcggcggggccacccgcgagtccagcgtcgccgcagccccccaatgcggccgcgagaagcagcgggggggcaggcgatcgaaggagccttcacgtaaatgggtccagtcatgcctcccagtaagaagccagaaagctcaggaattagtgtctccagtggactgagtcagtgttacgggggcagcggtttctccaaggcccttcaggaagacgatgacctcgacttttctctgcctgacatccgattagaagagggggccatggaagatgaagagctgaccaacctgaactggctgcacgagagcaagaacttgctgaagagctttggggagtcggtcctcaggagtgtcagccccgtccaggacctggacgatgacacccccccatcccctgcccactctgacatgccctacgatgccaggcagaaccccaactgcaaacccccctactccttcagctgcctcatatttatggccatcgaggactctccaaccaagcgcctgccagtgaaggatatctacaactggatcttggaacattttccgtattttgcaaatgcacctactgggtggaaaaactcagtgagacacaatttatcattgaataagtgttttaagaaagtggacaaagagaggagtcagagtattgggaaagggtcgttgtggtgcatagacccagagtatagacaaaatctaattcaggctttgaaaaagacaccttatcacccacacccacacgtgttcaatacacctcccacctgtcctcaggcatatcaaagcacatcaggtccacccatctggccgggcagtaccttcttcaagagaaatggagcccttctccaagatcctgacattgatgctgccagtgccatgatgcttttgaatactccccctgagatacaagcaggttttcctccaggagtgatccaaaatggagcgcgggtcctgagccgagggctgtttcctggcgtgcggccgctgccaatcactcccattggggtgacagcggccatgaggaatggcatcaccagctgccggatgcggactgagagtgagccatcttgtggctccccagtggtcagcggagaccccaaggaggatcacaactacagcagtgccaagtcctccaacgcccggagcacctcgcccaccagcgactccatctcctcctcctcctcctcagccgacgaccactatgagtttgccaccaaggggagccaggagggcagcgagggcagcgaggggagcttccggagccacgagagccccagcgacacggaagaggacgacaggaagcacagccagaaggagcccaaggattctctgggggacagcgggtacgcatcccagcacaagaagcgccagcacttcgccaaggccaggaaggtccccagcgacacactgcccctcaaaaagagacgcaccgaaaagccccccgagagcgatgatgaggagatgaaagaagcggcagggtccctcctgcacttagcagggatccggtcctgtttgaataacatcaccaatcggacggcaaaggggcagaaagagcaaaaggaaaccacaaaaaattaaaaacaagtcactgatttgttttgaacttacgaccatttggtttcagcatgtcaggagatttctaatgatttgtggcaatatcagcaattttttttcttttttcttgtttggggtttggttttctttcttttcttttccttttattgggttttaatttgccccctcttctttgttttggacccttaagaattttatttttaaaggagattgaagccatagaactcatattgacactcagctgttttacaaaagcttttcattatctgaagacaaaaccgaaaaagccaaaattaccattgcttcctccagcttgtcagaaacctgtggctgaatccgcagggatgtcaacgtcaatatcacaggaacacacattcggcacctagaaggcacgtgggcaaagtaatcatcgttcaggcccaacccttaggtttaaaaagtcaggttgtccatcccattggggttcactgagtgaaggcacataaagcaattgaggaggaggaggaacccctcgtccccctaggagcagacccaagcttgtggcaccaggcatctgatggtgccaggaaagccactggaattgtcacacggcgagcacagagggccggccaccagtcctcgatgcttctgaaccctgaaccccgatgacatcttacgaggtggacgttggactgttcatgcgcatcgggtgtcagtgactcatggagaagaaatggggtaaatttttagtgatgttgctaatcattgaattctgttctctattaaattaagaaaatgttccaaaagccataagcctgaagattggccctgtgcacgcacgcacacacacacacacacacacacacacacacacacacacacgaaggagagagagagaaaactgatggggaaaacaagctgtgtcttcttaactgcccaagtgaaaagcaaccaagtccaggaaattacaatagctgttaaggaaaggaaataatggtacagatctttttctgtctatcaaaactatttgatccaagtgaaaaaaaaaaaaaaactagaaagctacggaacctgcaatgcggccgc

SEQ ID NO: 1270 - protein, 490 aa, Homo sapien
MGPVMPPSKKPESSGISVSSGLSQCYGGSGFSKALQEDDDLDFSLPDIRLEEGAMEDEELTNLNWLHESKNLLKSFGESVLRSVSPVQDLDDDTPPSPAHSDMPYDARQNPNCKPPYSFSCLIFMAIEDSPTKRLPVKDIYNWILEHFPYFANAPTGWKNSVRHNLSLNKCFKKVDKERSQSIGKGSLWCIDPEYRQNLIQALKKTPYHPHPHVFNTPPTCPQAYQSTSGPPIWPGSTFFKRNGALLQDPDIDAASAMMLLNTPPEIQAGFPPGVIQNGARVLSRGLFPGVRPLPITPIGVTAAMRNGITSCRMRTESEPSCGSPVVSGDPKEDHNYSSAKSSNARSTSPTSDSISSSSSSADDHYEFATKGSQEGSEGSEGSFRSHESPSDTEEDDRKHSQKEPKDSLGDSGYASQHKKRQHFAKARKVPSDTLPLKKRRTEKPPESDDEEMKEAAGSLLHLAGIRSCLNNITNRTAKGQKEQKETTKN

SEQ ID NO: 1271 - DNA, 2254 bp, Homo sapien
gggaattctgaaagccgctggcggaccgcgcgcagcggccagagaccgagccctaaggagagtgcggcgcttcccgaggcgtgcagctgggaactgcaactcatctgggttgtgcgcagaaggctggggcaagcgagtagagaagtggagcgtaagccaggggcgttgggggccgtgcgggtcgggcgcgtgccacgcccgcggggtgaagtcggagcgcggggcctgctggagagaggagcgctgcggaccgagtaatggcaatgcagatgcagcttgaagcaaatgcagatacttcagtggaagaagaaagctttggcccacaacccatttcacggttagagcagtgtggcataaatgccaacgatgtgaagaaattggaagaagctggattccatactgtggaggctgttgcctatgcgccaaagaaggagctaataaatattaagggaattagtgaagccaaagctgataaaattctggctgaggcagctaaattagttccaatgggtttcaccactgcaactgaattccaccaaaggcggtcagagatcatacagattactactggctccaaagagcttgacaaactacttcaaggtggaattgagactggatctatcacagaaatgtttggagaattccgaactgggaagacccagatctgtcatacgctagctgtcacctgccagcttcccattgaccggggtggaggtgaaggaaaggccatgtacattgacactgagggtacctttaggccagaacggctgctggcagtggctgagaggtatggtctctctggcagtgatgtcctggataatgtagcatatgctcgagcgttcaacacagaccaccagacccagctcctttatcaagcatcagccatgatggtagaatctaggtatgcactgcttattgtagacagtgccaccgccctttacagaacagactactcgggtcgaggtgagctttcagccaggcagatgcacttggccaggtttctgcggatgcttctgcgactcgctgatgagtttggtgtagcagtggtaatcactaatcaggtggtagctcaagtggatggagcagcgatgtttgctgctgatcccaaaaaacctattggaggaaatatcatcgcccatgcatcaacaaccagattgtatctgaggaaaggaagaggggaaaccagaatctgcaaaatctacgactctccctgtcttcctgaagctgaagctatgttcgccattaatgcagatggagtgggagatgccaaagactgaatcattgggtttttcctctgttaaaaaccttaagtgctgcagcctaatgagagtgcactgctccctggggttctctacaggcctcttcctgttgtgactgccaggataaagcttccgggaaaacagctattatatcagcttttctgatggtataaacaggagacaggtcagtagtcacaaactgatctaaaatgtttattccttctgtagtgtattaatctctgtgtgttttctttggttttggaggaggggtatgaagtatctttgacatggtgccttaggaatgacttgggtttaacaagctgtctactggacaatcttatgtttccaagagaactaaagctggagagacctgacccttctctcacttctaaattaatggtaaaataaaatgcctcagctatgtagcaaagggaatgggtctgcacagattctttttttctgtcagtaaaactctcaagcaggtttttaagttgtctgtctgaatgatcttgtgtaagggtttggttatggagtcttgtgccaaacctactaggccattagcccttcaccatctacctgcttggtctttcattgctaagactaactcaagataatcctagagtcttaaagcatttcaggccagtgtggtgtcttgcgcctgtactcccagcactttgggaggccgaggcaggtggatcgcttgagccaggagttttaagtccagcttggccaagatggtgaaatcccatctctacaaaaaatgcagaacttaatctggacacactgttacacgtgcctgtagtcccagctactctatagcctgaggtgggagaatcacttaagcctggaaggtggaagttgcagtgagtcgagattgcactgctgcattccagccagggtgacagagtgagaccatgtttcaaacaagaaacatttcagagggcaagtaaacagatttgattgtgaggcttctaataaagtagttattagtagtg

SEQ ID NO: 1272 - protein, 339 aa, Homo sapien
MAMQMQLEANADTSVEEESFGPQPISRLEQCGINANDVKKLEEAGFHTVEAVAYAPKKELINIKGISEAKADKILAEAAKLVPMGFTTATEFHQRRSEIIQITTGSKELDKLLQGGIETGSITEMFGEFRTGKTQICHTLAVTCQLPIDRGGGEGKAMYIDTEGTFRPERLLAVAERYGLSGSDVLDNVAYARAFNTDHQTQLLYQASAMMVESRYALLIVDSATALYRTDYSGRGELSARQMHLARFLRMLLRLADEFGVAVVITNQVVAQVDGAAMFAADPKKPIGGNIIAHASTTRLYLRKGRGETRICKIYDSPCLPEAEAMFAINADGVGDAKD

SEQ ID NO: 1273 - DNA, 2748 bp, Homo sapien
agcgggtgcggggcgggaccggcccggcctatatattgggttggcgccggcgccagctgagccgagcggtagctggtctggcgaggttttatacacctgaaagaagagaatgtcaagacgaagtagccgtttacaagctaagcagcagccccagcccagccagacggaatccccccaagaagcccagataatccaggccaagaagaggaaaactacccaggatgtcaaaaaaagaagagaggaggtcaccaagaaacatcagtatgaaattaggaattgttggccacctgtattatctggggggatcagtccttgcattatcattgaaacacctcacaaagaaataggaacaagtgatttctccagatttacaaattacagatttaaaaatctttttattaatccttcacctttgcctgatttaagctggggatgttcaaaagaagtctggctaaacatgttaaaaaaggagagcagatatgttcatgacaaacattttgaagttctgcattctgacttggaaccacagatgaggtccatacttctagactggcttttagaggtatgtgaagtatacacacttcatagggaaacattttatcttgcacaagacttttttgatagatttatgttgacacaaaaggatataaataaaaatatgcttcaactcattggaattacctcattattcattgcttccaaacttgaggaaatctatgctcctaaactccaagagtttgcttacgtcactgatggtgcttgcagtgaagaggatatcttaaggatggaactcattatattaaaggctttaaaatgggaactttgtcctgtaacaatcatctcctggctaaatctctttctccaagttgatgctcttaaagatgctcctaaagttcttctacctcagtattctcaggaaacattcattcaaatagctcagcttttagatctgtgtattctagccattgattcattagagttccagtacagaatactgactgctgctgccttgtgccattttacctccattgaagtggttaagaaagcctcaggtttggagtgggacagtatttcagaatgtgtagattggatggtaccttttgtcaatgtagtaaaaagtactagtccagtgaagctgaagacttttaagaagattcctatggaagacagacataatatccagacacatacaaactatttggctatgctggaggaagtaaattacataaacaccttcagaaaagggggacagttgtcaccagtgtgcaatggaggcattatgacaccaccgaagagcactgaaaaaccaccaggaaaacactaaagaagataactaagcaaacaagttggaattcaccaagattgggtagaactggtatcactgaactactaaagttttacagaaagtagtgctgtgattgattgccctagccaattcacaagttacactgccattctgattttaaaacttacaattggcactaaagaatacatttaattatttcctatgttagctgttaaagaaacagcaggacttgtttacaaagatgtcttcattcccaaggttactggatagaagccaaccacagtctataccatagcaatgtttttcctttaatccagtgttactgtgtttatcttgataaactaggaattttgtcactggagttttggactggataagtgctaccttaaagggtatactaagtgatacagtactttgaatctagttgttagattctcaaaattcctacactcttgactagtgcaatttggttcttgaaaattaaatttaaacttgtttacaaaggtttagttttgtaataaggtgactaatttatctatagctgctatagcaagctattataaaacttgaatttctacaaatggtgaaatttaatgttttttaaactagtttatttgccttgccataacacattttttaactaataaggcttagatgaacatggtgttcaacctgtgctctaaacagtgggagtaccaaagaaattataaacaagataaatgctgtggctccttcctaactggggctttcttgacatgtaggttgcttggtaataacctttttgtatatcacaatttgggtgaaaaacttaagtaccctttcaaactatttatatgaggaagtcactttactactctaagatatccctaaggaatttttttttttaatttagtgtgactaaggctttatttatgtttgtgaaactgttaaggtcctttctaaattcctccattgtgagataaggacagtgtcaaagtgataaagcttaacacttgacctaaacttctattttcttaaggaagaagagtattaaatatatactgactcctagaaatctatttattaaaaaaagacatgaaaacttgctgtacataggctagctatttctaaatattttaaattagcttttctaaaaaaaaaatccagcctcataaagtagattagaaaactagattgctagtttattttgttatcagatatgtgaatctcttctccctttgaagaaactatacatttattgttacggtatgaagtcttctgtatagtttgtttttaaactaatatttgtttcagtattttgtctgaaaagaaaacaccactaattgtgtacatatgtattatataaacttaaccttttaatactgtttatttttagcccattgtttaaaaaataaaagttaaaaaaatttaactgcttaaaagtaaaaaaaaaaaaaaaaaaa

SEQ ID NO: 1274 - protein, 404 aa, Homo sapien
MSRRSSRLQAKQQPQPSQTESPQEAQIIQAKKRKTTQDVKKRREEVTKKHQYEIRNCWPPVLSGGISPCIIIETPHKEIGTSDFSRFTNYRFKNLFINPSPLPDLSWGCSKEVWLNMLKKESRYVHDKHFEVLHSDLEPQMRSILLDWLLEVCEVYTLHRETFYLAQDFFDRFMLTQKDINKNMLQLIGITSLFIASKLEEIYAPKLQEFAYVTDGACSEEDILRMELIILKALKWELCPVTIISWLNLFLQVDALKDAPKVLLPQYSQETFIQIAQLLDLCILAIDSLEFQYRILTAAALCHFTSIEVVKKASGLEWDSISECVDWMVPFVNVVKSTSPVKLKTFKKIPMEDRHNIQTHTNYLAMLEEVNYINTFRKGGQLSPVCNGGIMTPPKSTEKPPGKH

SEQ ID NO: 1275 - DNA, 2348 bp, Homo sapien
cctttctgtcctggttccctgaagcatcgagagggaaccgcggccggcaggccggaccgctccggagaggaggcagcggcagtttgagcccctgtaaatgttatatgtgtacttttttttactatgtggcgtcgaagcctgtggacattttcgcggtccgggtccctgcggcggacgggtcggatcgtgctcgtggccagggcgcagtcaggtgtcgcgtggtcctgatctaggaagagactgcggccttatcaccgtctcggtgtctgctttcaccttcaactgcccccctcctcacctggaccgctcaccctcctcctcccctctcaccccgccatccccaccagtccccacctgtctctgtagactgcaagactcatcaagtgacttgctgagcaaaccctgccgagaagagattttcttcaatcacatctgaataaatcacttgaagaaagcttatagcttcattgcaccatgtgtggcatttgggcgctgtttggcagtgatgattgcctttctgttcagtgtctgagtgctatgaagattgcacacagaggtccagatgcattccgttttgagaatgtcaatggatacaccaactgctgctttggatttcaccggttggcggtagttgacccgctgtttggaatgcagccaattcgagtgaagaaatatccgtatttgtggctctgttacaatggtgaaatctacaaccataagaagatgcaacagcattttgaatttgaataccagaccaaagtggatggtgagataatccttcatctttatgacaaaggaggaattgagcaaacaatttgtatgttggatggtgtgtttgcatttgttttactggatactgccaataagaaagtgttcctgggtagagatacatatggagtcagacctttgtttaaagcaatgacagaagatggatttttggctgtatgttcagaagctaaaggtcttgttacattgaagcactccgcgactccctttttaaaagtggagccttttcttcctggacactatgaagttttggatttaaagccaaatggcaaagttgcatccgtggaaatggttaaatatcatcactgtcgggatgaacccctgcacgccctctatgacaatgtggagaaactctttccaggttttgagatagaaactgtgaagaacaacctcaggatcctttttaataatgctgtaaagaaacgtttgatgacagacagaaggattggctgccttttatcagggggcttggactccagcttggttgctgccactctgttgaagcagctgaaagaagcccaagtacagtatcctctccagacatttgcaattggcatggaagacagccccgatttactggctgctagaaaggtggcagatcatattggaagtgaacattatgaagtcctttttaactctgaggaaggcattcaggctctggatgaagtcatattttccttggaaacttatgacattacaacagttcgtgcttcagtaggtatgtatttaatttccaagtatattcggaagaacacagatagcgtggtgatcttctctggagaaggatcagatgaacttacgcagggttacatatattttcacaaggctccttctcctgaaaaagccgaggaggagagtgagaggcttctgagggaactctatttgtttgatgttctccgcgcagatcgaactactgctgcccatggtcttgaactgagagtcccatttctagatcatcgattttcttcctattacttgtctctgccaccagaaatgagaattccaaagaatgggatagaaaaacatctcctgagagagacgtttgaggattccaatctgatacccaaagagattctctggcgaccaaaagaagccttcagtgatggaataacttcagttaagaattcctggtttaagattttacaggaatacgttgaacatcaggttgatgatgcaatgatggcaaatgcagcccagaaatttcccttcaatactcctaaaaccaaagaaggatattactaccgtcaagtctttgaacgccattacccaggccgggctgactggctgagccattactggatgcccaagtggatcaatgccactgacccttctgcccgcacgctgacccactacaagtcagctgtcaaagcttaggtggtctttatgctgtaatgtgaaagcaaatatttcttcgtgttggatggggactgtgggtagataggggaacaatgagagtcaactcaggctaacttgggtgtgaaaaaaataaaagtcctaaatctaaaaaaaaaaaaaaaaaaaaaaaaaaaaaaaaaaaaaaaaaaaaaaaaaaaaaaaaaaaa

SEQ ID NO: 1276 - protein, 561 aa, Homo sapien
MCGIWALFGSDDCLSVQCLSAMKIAHRGPDAFRFENVNGYTNCCFGFHRLAVVDPLFGMQPIRVKKYPYLWLCYNGEIYNHKKMQQHFEFEYQTKVDGEIILHLYDKGGIEQTICMLDGVFAFVLLDTANKKVFLGRDTYGVRPLFKAMTEDGFLAVCSEAKGLVTLKHSATPFLKVEPFLPGHYEVLDLKPNGKVASVEMVKYHHCRDEPLHALYDNVEKLFPGFEIETVKNNLRILFNNAVKKRLMTDRRIGCLLSGGLDSSLVAATLLKQLKEAQVQYPLQTFAIGMEDSPDLLAARKVADHIGSEHYEVLFNSEEGIQALDEVIFSLETYDITTVRASVGMYLISKYIRKNTDSVVIFSGEGSDELTQGYIYFHKAPSPEKAEEESERLLRELYLFDVLRADRTTAAHGLELRVPFLDHRFSSYYLSLPPEMRIPKNGIEKHLLRETFEDSNLIPKEILWRPKEAFSDGITSVKNSWFKILQEYVEHQVDDAMMANAAQKFPFNTPKTKEGYYYRQVFERHYPGRADWLSHYWMPKWINATDPSARTLTHYKSAVKA

SEQ ID NO: 1277 - DNA, 839 bp, Homo sapien
aagccacaggctccctggctggcgtcagctaaagtggctgttgggtgtccgcaggcttctgcctggccgccgccgcctataagctaccaggaggagctttacgacttcccgtcctgcgggaagtggcgggcacgatcgcaaggtagcgcagaagcttctcaatggccagcgccagctgcagccccggcggcgcactcgcctcacctgagcctgggaggaaaattcttccaaggatgatctcccactcagagctgaggaagcttttctactcagcagatgctgtgtgttttgatgttgacagcacggtcatcagtgaagaaggaatcggatgctttcattggatttggaggaaatgtgatcaggcaacaagtcaaggataacgccaaatggtatatcactgattttgtagagctgctgggagaaccggaagaataacatccattgtcatacagctccaaacaacttcagatgaatttttacaagttacacagattgatactgtttgcttacaattgcctattacaacttgctataaaaagttggtacagatgatctgcactgtcaagtaaactacagttaggaatcctcaaagattggtttgtttgtttttaactgtagttccagtattatatgatcactatcgatttcctggagagttttgtaatctgaattctttatgtatattcctagctatatttcatacaaagtgttttaagagtggagagtcaattaaacacctttactcttaggaatatagattcggcagccttcagtgaatattggtttttttccctttggtatgtcaataaaagtttatccatgtgtcagaaaaaaaaaaa

SEQ ID NO: 1278 - protein, 72 aa, Homo sapien
MASASCSPGGALASPEPGRKILPRMISHSELRKLFYSADAVCFDVDSTVISEEGIGCFHWIWRKCDQATSQG

SEQ ID NO: 1279 - DNA, 5084 bp, Homo sapien
gatcccatcgcagctaccgcgatgagaggcgctcgcggcgcctgggattttctctgcgttctgctcctactgcttcgcgtccagacaggctcttctcaaccatctgtgagtccaggggaaccgtctccaccatccatccatccaggaaaatcagacttaatagtccgcgtgggcgacgagattaggctgttatgcactgatccgggctttgtcaaatggacttttgagatcctggatgaaacgaatgagaataagcagaatgaatggatcacggaaaaggcagaagccaccaacaccggcaaatacacgtgcaccaacaaacacggcttaagcaattccatttatgtgtttgttagagatcctgccaagcttttccttgttgaccgctccttgtatgggaaagaagacaacgacacgctggtccgctgtcctctcacagacccagaagtgaccaattattccctcaaggggtgccaggggaagcctcttcccaaggacttgaggtttattcctgaccccaaggcgggcatcatgatcaaaagtgtgaaacgcgcctaccatcggctctgtctgcattgttctgtggaccaggagggcaagtcagtgctgtcggaaaaattcatcctgaaagtgaggccagccttcaaagctgtgcctgttgtgtctgtgtccaaagcaagctatcttcttagggaaggggaagaattcacagtgacgtgcacaataaaagatgtgtctagttctgtgtactcaacgtggaaaagagaaaacagtcagactaaactacaggagaaatataatagctggcatcacggtgacttcaattatgaacgtcaggcaacgttgactatcagttcagcgagagttaatgattctggagtgttcatgtgttatgccaataatacttttggatcagcaaatgtcacaacaaccttggaagtagtagataaaggattcattaatatcttccccatgataaacactacagtatttgtaaacgatggagaaaatgtagatttgattgttgaatatgaagcattccccaaacctgaacaccagcagtggatctatatgaacagaaccttcactgataaatgggaagattatcccaagtctgagaatgaaagtaatatcagatacgtaagtgaacttcatctaacgagattaaaaggcaccgaaggaggcacttacacattcctagtgtccaattctgacgtcaatgctgccatagcatttaatgtttatgtgaatacaaaaccagaaatcctgacttacgacaggctcgtgaatggcatgctccaatgtgtggcagcaggattcccagagcccacaatagattggtatttttgtccaggaactgagcagagatgctctgcttctgtactgccagtggatgtgcagacactaaactcatctgggccaccgtttggaaagctagtggttcagagttctatagattctagtgcattcaagcacaatggcacggttgaatgtaaggcttacaacgatgtgggcaagacttctgcctattttaactttgcatttaaaggtaacaacaaagagcaaatccatccccacaccctgttcactcctttgctgattggtttcgtaatcgtagctggcatgatgtgcattattgtgatgattctgacctacaaatatttacagaaacccatgtatgaagtacagtggaaggttgttgaggagataaatggaaacaattatgtttacatagacccaacacaacttccttatgatcacaaatgggagtttcccagaaacaggctgagttttgggaaaaccctgggtgctggagctttcgggaaggttgttgaggcaactgcttatggcttaattaagtcagatgcggccatgactgtcgctgtaaagatgctcaagccgagtgcccatttgacagaacgggaagccctcatgtctgaactcaaagtcctgagttaccttggtaatcacatgaatattgtgaatctacttggagcctgcaccattggagggcccaccctggtcattacagaatattgttgctatggtgatcttttgaattttttgagaagaaaacgtgattcatttatttgttcaaagcaggaagatcatgcagaagctgcactttataagaatcttctgcattcaaaggagtcttcctgcagcgatagtactaatgagtacatggacatgaaacctggagtttcttatgttgtcccaaccaaggccgacaaaaggagatctgtgagaataggctcatacatagaaagagatgtgactcccgccatcatggaggatgacgagttggccctagacttagaagacttgctgagcttttcttaccaggtggcaaagggcatggctttcctcgcctccaagaattgtattcacagagacttggcagccagaaatatcctccttactcatggtcggatcacaaagatttgtgattttggtctagccagagacatcaagaatgattctaattatgtggttaaaggaaacgctcgactacctgtgaagtggatggcacctgaaagcattttcaactgtgtatacacgtttgaaagtgacgtctggtcctatgggatttttctttgggagctgttctctttaggaagcagcccctatcctggaatgccggtcgattctaagttctacaagatgatcaaggaaggcttccggatgctcagccctgaacacgcacctgctgaaatgtatgacataatgaagacttgctgggatgcagatcccctaaaaagaccaacattcaagcaaattgttcagctaattgagaagcagatttcagagagcaccaatcatatttactccaacttagcaaactgcagccccaaccgacagaagcccgtggtagaccattctgtgcggatcaattctgtcggcagcaccgcttcctcctcccagcctctgcttgtgcacgacgatgtctgagcagaatcagtgtttgggtcacccctccaggaatgatctcttcttttggcttccatgatggttattttcttttctttcaacttgcatccaactccaggatagtgggcaccccactgcaatcctgtctttctgagcacactttagtggccgatgatttttgtcatcagccaccatcctattgcaaaggttccaactgtatatattcccaatagcaacgtagcttctaccatgaacagaaaacattctgatttggaaaaagagagggaggtatggactgggggccagagtcctttccaaggcttctccaattctgcccaaaaatatggttgatagtttacctgaataaatggtagtaatcacagttggccttcagaaccatccatagtagtatgatgatacaagattagaagctgaaaacctaagtcctttatgtggaaaacagaacatcattagaacaaaggacagagtatgaacacctgggcttaagaaatctagtatttcatgctgggaatgagacataggccatgaaaaaaatgatccccaagtgtgaacaaaagatgctcttctgtggaccactgcatgagcttttatactaccgacctggtttttaaatagagtttgctattagagcattgaattggagagaaggcctccctagccagcacttgtatatacgcatctataaattgtccgtgttcatacatttgaggggaaaacaccataaggtttcgtttctgtatacaaccctggcattatgtccactgtgtatagaagtagattaagagccatataagtttgaaggaaacagttaataccattttttaaggaaacaatataaccacaaagcacagtttgaacaaaatctcctcttttagctgatgaacttattctgtagattctgtggaacaagcctatcagcttcagaatggcattgtactcaatggatttgatgctgtttgacaaagttactgattcactgcatggctcccacaggagtgggaaaacactgccatcttagtttggattcttatgtagcaggaaataaagtataggtttagcctccttcgcaggcatgtcctggacaccgggccagtatctatatatgtgtatgtacgtttgtatgtgtgtagacaaatatttggaggggtatttttgccctgagtccaagagggtcctttagtacctgaaaagtaacttggctttcattattagtactgctcttgtttcttttcacatagctgtctagagtagcttaccagaagcttccatagtggtgcagaggaagtggaaggcatcagtccctatgtatttgcagttcacctgcacttaaggcactctgttatttagactcatcttactgtacctgttccttagaccttccataatgctactgtctcactgaaacatttaaattttaccctttagactgtagcctggatattattcttgtagtttacctctttaaaaacaaaacaaaacaaaacaaaaaactccccttcctcactgcccaatataaaaggcaaatgtgtacatggcagagtttgtgtgttgtcttgaaagattcaggtatgttgcctttatggtttcccccttctacatttcttagactacatttagagaactgtggccgttatctggaagtaaccatttgcactggagttctatgctctcgcacctttccaaagttaacagattttggggttgtgttgtcacccaagagattgttgtttgccatactttgtctgaaaaattcctttgtgtttctattgacttcaatgatagtaagaaaagtggttgttagttatagatgtctaggtacttcaggggcacttcattgagagttttgtcttgccatactttgtctgaaaaattcctttgtgtttctattgacttcaatgatagtaagaaaagtggttgttagttatagatgtctaggtacttcaggggcacttcattgagagttttgtcaatgtcttttgaatattcccaagcccatgagtccttgaaaatattttttatatatacagtaactttatgtgtaaatacataagcggcgtaagtttaaaggatgttggtgttccacgtgttttattcctgtatgttgtccaattgttgacagttctgaagaattc

SEQ ID NO: 1280 - protein, 976 aa, Homo sapien [sequence omitted]

SEQ ID NO: 1281 - DNA, 1548 bp, Homo sapien
caacatggcggccgcggtggcggcggcacctggggccttgggatccctgcatgctggcggcgcccgcctggtggccgcttgcagtgcgtggctctgcccggggttgaggctgcccggctcgttggcaggccggcgagcgggcccggcgatctgggcccagggctgggtacctgcggccgggggtcccgccccgaaaaggggctacagctctgagatgaagacggaggacgagctgcgggtgcggcacctggaggaggagaaccgaggaattgtggtgcttggaataaacagagcttatggcaaaaattcactcagtaaaaatcttataaaaatgctatcaaaagctgtggatgctttgaaatctgataagaaagtacggaccataataatcaggagtgaagtcccagggatattctgtgctggtgctgaccttaaggaaagagccaaaatgagttccagtgaagttggtccttttgtctccaaaataagagcagtgattaacgatattgctaatcttccagtgccaacaattgcagcaatagatggactcgctttaggtggtggtcttgaactggctttagcctgtgatatacgagtagcagcttcctctgcaaaaatgggcctggttgaaacaaaattggcgattattcctggtggaggggggacacagcgattgccacgcgccattggaatgtccctggccaaggagctcatattctctgcgcgagtcctcgatggcaaagaagccaaagcagtgggcttaatcagccacgttctggaacagaaccaggagggagacgcggcctacaggaaggccttggacctggcgagagagtttttacctcagggacctgttgcaatgagagtggcaaaattagcaattaatcaagggatggaggtcgatttagtaacagggttagccatagaagaagcttgttatgctcagaccattccaacaaaagacagacttgaaggtcttcttgcttttaaagagaaaaggccccctcgctataaaggagaataaaaggaacagaaattcttaagatgccaatgtaataaatgtacttcctggaagtgtctttcggatccactatatgcctcagcacatggaaccttaatgaccaaagtgaagagcagattattcatacggtgtaataagcgtctggaatggacccatccgtgtacttcattcaaatgtgtaaatgtcatattcattcagatttataaagctagtagtgtatagtcagaaacagaatcaaagttagatatacatttttaaatatttactgcatatgaggctttctgttaattttttaatgtgaataatttatatattgcacattctaggaataatattgattgtatgtctactgtgctgcattaagaaaataaaatttctatataccaaaaatgtgaagttataccaaataaagtttctaagtgattaatgcatacgaacagctacatatacatatatctaaacctgaaaaatgaattgatattctgagtgaaaactacctaatataaataaaattagtgaaaagaaaa

SEQ ID NO: 1282 - protein, 339 aa, Homo sapien
MAAAVAAAPGALGSLHAGGARLVAACSAWLCPGLRLPGSLAGRRAGPAIWAQGWVPAAGGPAPKRGYSSEMKTEDELRVRHLEEENRGIVVLGINRAYGKNSLSKNLIKMLSKAVDALKSDKKVRTIIIRSEVPGIFCAGADLKERAKMSSSEVGPFVSKIRAVINDIANLPVPTIAAIDGLALGGGLELALACDIRVAASSAKMGLVETKLAIIPGGGGTQRLPRAIGMSLAKELIFSARVLDGKEAKAVGLISHVLEQNQEGDAAYRKALDLAREFLPQGPVAMRVAKLAINQGMEVDLVTGLAIEEACYAQTIPTKDRLEGLLAFKEKRPPRYKGE

SEQ ID NO: 1283 - DNA, 3927 bp, Homo sapien
gaattccggcccccgtgtctgggcgtccgcctcctggcctcctggctgaggggaagctgagtgggccacggcccatgtgtcgcactcgcctcggctcccacacagccgcctctgctccagcaaggatgtggctcttccacactctgctctgcatagccagcctggccctgctggccgctttcaatgtggatgtggcccggccctggctcacgcccaagggaggtgcccctttcgtgctcagctcccttctgcaccaagaccccagcaccaaccagacctggctcctggtcaccagccccagaaccaagaggacaccagggcccctccatcgatgttcccttgtccaggatgaaatcctttgccatcctgtagagcatgtccccatccccaaggggaggcaccggggagtgaccgttgtccggagccaccacggtgttttgatatgcattcaagtgctggtccggcggcctcacagcctcagctcagaactcacaggcacctgtagcctcctgggccctgacctccgtccccaggctcaggccaacttcttcgaccttgaaaatctcctggatccagatgcacgtgtggacactggagactgctacagcaacaaagaaggcggtggagaagacgatgtgaacacagccaggcagcgccgggctctggagaaggaggaggaggaagacaaggaggaggaggaagacgaggaggaggaggaagctggcaccgagattgccatcatcctggatggctcaggaagcattgatcccccagactttcagagagccaaagacttcatctccaacatgatgaggaacttctatgaaaagtgttttgagtgcaactttgccttggtgcagtatggaggagtgatccagactgagtttgaccttcgggacagccaggatgtgatggcctccctcgccagagtccagaacatcactcaagtggggagtgtcaccaagactgcctcagccatgcaacacgtcttagacagcatcttcacctcaagccacggctccaggagaaaggcatccaaggtcatggtggtgctcaccgatggtggcatattcgaggaccccctcaaccttacgacagtcatcaactcccccaaaatgcagggtgttgagcgctttgccattggggtgggagaagaatttaagagtgctaggactgcgagggaactgaacctgatcgcctcagacccggatgagacccatgctttcaaggtgaccaactacatggcgctggatgggctgctgagcaaactgcggtacaacatcatcagcatggaaggcacggttggagacgcccttcactaccagctggcacagattggcttcagtgctcagatcctggatgagcggcaggtgctgctcggcgccgtcggggcctttgactggtccggaggggcgttgctctacgacacacgcagccgccggggccgcttcctgaaccagacagcggcggcggcggcagacgcggaggctgcgcagtacagctacctgggttacgctgtggccgtgctgcacaagacctgcagcctctcctacgtcgcgggggctccacagtacaaacatcatggggccgtgtttgagctccagaaggagggcagagaggccagcttcctgccagtgctggagggagagcagatggggtcctattttggctctgagctgtgccctgtggacattgacatggatggaagcacggacttcttgctggtggctgctccattttaccacgttcatggagaagaaggcagagtctacgtgtaccgtctcagcgagcaggatggttctttctccttggcacgcatactgagtgggcaccccgggttcaccaatgcccgctttggctttgccatggcggctatgggggatctcagtcaggataagctcacagatgtggccatcggggcccccctggaaggttttggggcagatgatggtgccagcttcggcagtgtgtatatctacaatggacactgggacggcctctccgccagcccctcgcagcggatcagagcctccacggtggccccaggactccagtacttcggcatgtccatggctggtggctttgatattagtggcgacggccttgccgacatcaccgtgggcactctgggccaggcggttgtgttccgctcccggcctgtggttcgcctgaaggtctccatggccttcacccccagcgcactgcccatcggcttcaacggcgtcgtgaatgtccgtttatgttttgaaatcagctctgtaaccacagcctctgagtcaggcctccgtgaggcacttctcaacttcacgctggatgtggatgtggggaagcagaggagacggctgcagtgttcagacgtaagaagctgtctgggctgcctgagggagtggagcagcggatcccagctttgtgaggacctcctgctcatgcccacagagggagagctctgtgaggaggactgcttctccaatgccagtgtcaaagtcagctaccagctccagacccctgagggacagacggaccatccccagcccatcctggaccgctacactgagccctttgccatcttccagctgccctatgagaaggcctgcaagaataagctgttttgtgtcgcagaattacagttggccaccaccgtctctcagcaggagttggtggtgggtctcacaaaggagctgaccctgaacattaacctaactaactccggggaagattcctacatgacaagcatggccttgaattaccccagaaacctgcagttgaagaggatgcaaaagcctccctctccaaacattcagtgtgatgaccctcagccggttgcttctgtcctgatcatgaactgcaggattggtcaccccgtcctcaagaggtcatctgctcatgtttcagtcgtttggcagctagaggagaatgcctttccaaacaggacagcagacatcactgtgactgtcaccaattccaatgaaagacggtctttggccaacgagacccacacccttcaattcaggcatggcttcgttgcagttctgtccaaaccatccataatgtacgtgaacacaggccaggggctttctcaccacaaagaattcctcttccatgtacatggggagaacctctttggagcagaataccagttgcaaatttgcgtcccaaccaaattacgaggtctccaggttgcagcagtgaagaagctgacgaggactcaggcctccacggtgtgcacctggagtcaggagcgcgcttgtgcgtacagttcggttcagcatgtggaagaatggcattcagtgagctgtgtcatcgcttcagataaagaaaatgtcaccgtggctgcagagatctcctgggatcactctgaggagttactaaaagatgtaactgaactgcagatccttggtgaaatatctttcaacaaatctctatatgagggactgaatgcagagaaccacagaactaagatcactgtcgtcttcctgaaagatgagaagtaccattctttgcctatcatcattaaaggcagcgttggtggacttctggtgttgatcgtgattctggtcatcctgttcaagtgtggcttttttaaaagaaaatatcaacaactgaacttggagagcatcaggaaggcccagctgaaatcagagaatctgctcgaagaagagaattaggacctgctatccactgggagaggctatcagccagtcctgggacttggagacccagcatcctttgcattactttttccttcaggatgatctagagcagcatggagctgttggtagaatattagtttttaaccatacattgtcccaaaagtgtctgtgcattgtgcaaaaagtaaacttaggaaacatttggtattaaataaatttacacttttctttgcaaaaaaaaaaaaaaaaaaaaaaaaaaaaaaaaaaaaaaaaaaaa

SEQ ID NO: 1284 - protein, 1179 aa, Homo sapien
MWLFHTLLCIASLALLAAFNVDVARPWLTPKGGAPFVLSSLLHQDPSTNQTWLLVTSPRTKRTPGPLHRCSLVQDEILCHPVEHVPIPKGRHRGVTVVRSHHGVLICIQVLVRRPHSLSSELTGTCSLLGPDLRPQAQANFFDLENLLDPDARVDTGDCYSNKEGGGEDDVNTARQRRALEKEEEEDKEEEEDEEEEEAGTEIAIILDGSGSIDPPDFQRAKDFISNMMRNFYEKCFECNFALVQYGGVIQTEFDLRDSQDVMASLARVQNITQVGSVTKTASAMQHVLDSIFTSSHGSRRKASKVMVVLTDGGIFEDPLNLTTVINSPKMQGVERFAIGVGEEFKSARTARELNLIASDPDETHAFKVTNYMALDGLLSKLRYNIISMEGTVGDALHYQLAQIGFSAQILDERQVLLGAVGAFDWSGGALLYDTRSRRGRFLNQTAAAAADAEAAQYSYLGYAVAVLHKTCSLSYVAGAPQYKHHGAVFELQKEGREASFLPVLEGEQMGSYFGSELCPVDIDMDGSTDFLLVAAPFYHVHGEEGRVYVYRLSEQDGSFSLARILSGHPGFTNARFGFAMAAMGDLSQDKLTDVAIGAPLEGFGADDGASFGSVYIYNGHWDGLSASPSQRIRASTVAPGLQYFGMSMAGGFDISGDGLADITVGTLGQAVVFRSRPVVRLKVSMAFTPSALPIGFNGVVNVRLCFEISSVTTASESGLREALLNFTLDVDVGKQRRRLQCSDVRSCLGCLREWSSGSQLCEDLLLMPTEGELCEEDCFSNASVKVSYQLQTPEGQTDHPQPILDRYTEPFAIFQLPYEKACKNKLFCVAELQLATTVSQQELVVGLTKELTLNINLTNSGEDSYMTSMALNYPRNLQLKRMQKPPSPNIQCDDPQPVASVLIMNCRIGHPVLKRSSAHVSVVWQLEENAFPNRTADITVTVTNSNERRSLANETHTLQFRHGFVAVLSKPSIMYVNTGQGLSHHKEFLFHVHGENLFGAEYQLQICVPTKLRGLQVAAVKKLTRTQASTVCTWSQERACAYSSVQHVEEWHSVSCVIASDKENVTVAAEISWDHSEELLKDVTELQILGEISFNKSLYEGLNAENHRTKITVVFLKDEKYHSLPIIIKGSVGGLLVLIVILVILFKCGFFKRKYQQLNLESIRKAQLKSENLLEEEN

SEQ ID NO: 1285 - DNA, 3493 bp, Homo sapien
agcggccggggccacgatggagcgcgacggctgcgcggggggcgggagccgcggcggcgagggcgggcgcgctccccgggagggcccggcggggaacggccgcgatcggggccgcagccacgctgccgaggcgcccggggacccgcaggcggccgcgtccttgctggcccctatggacgtgggggaggagccgctggagaaggcggcgcgcgcccgcactgccaaggaccccaacacctataaagtactctcgctggtattgtcagtatgtgtgttaacaacaatacttggttgtatatttgggttgaaaccaagctgtgccaaagaagttaaaagttgcaaaggtcgctgtttcgagagaacatttgggaactgtcgctgtgatgctgcctgtgttgagcttggaaactgctgtttagattaccaggagacgtgcatagaaccagaacatatatggacttgcaacaaattcaggtgtggtgagaaaaggttgaccagaagcctctgtgcctgttcagatgactgcaaggacaagggcgactgctgcatcaactacagttctgtgtgtcaaggtgagaaaagttgggtagaagaaccatgtgagagcattaatgagccacagtgcccagcagggtttgaaacgcctcctaccctcttattttctttggatggattcagggcagaatatttacacacttggggtggacttcttcctgttattagcaaactaaaaaaatgtggaacatatactaaaaacatgagaccggtatatccaacaaaaactttccccaatcactacagcattgtcaccggattgtatccagaatctcatggcataatcgacaataaaatgtatgatcccaaaatgaatgcttccttttcacttaaaagtaaagagaaatttaatcctgagtggtacaaaggagaaccaatttgggtcacagctaagtatcaaggcctcaagtctggcacatttttctggccaggatcagatgtggaaattaacggaattttcccagacatctataaaatgtataatggttcagtaccatttgaagaaaggattttagctgttcttcagtggctacagcttcctaaagatgaaagaccacacttttacactctgtatttagaagaaccagattcttcaggtcattcatatggaccagtcagcagtgaagtcatcaaagccttgcagagggttgatggtatggttggtatgctgatggatggtctgaaagagctgaacttgcacagatgcctgaacctcatccttatttcagatcatggcatggaacaaggcagttgtaagaaatacatatatctgaataaatatttgggggatgttaaaaatattaaagttatctatggacctgcagctcgattgagaccctctgatgtcccagataaatactattcatttaactatgaaggcattgcccgaaatctttcttgccgggaaccaaaccagcacttcaaaccttacctgaaacatttcttacctaagcgtttgcactttgctaagagtgatagaattgagcccttgacattctatttggaccctcagtggcaacttgcattgaatccctcagaaaggaaatattgtggaagtggatttcatggctctgacaatgtattttcaaatatgcaagccctctttgttggctatggacctggattcaagcatggcattgaggctgacacctttgaaaacattgaagtctataacttaatgtgtgatttactgaatttgacaccggctcctaataacggaactcatggaagtcttaaccaccttctaaagaatcctgtttatacgccaaagcatcccaaagaagtgcaccccctggtacagtgccccttcacaagaaaccccagagataaccttggctgctcatgtaacccttcgattttgccgattgaggattttcaaacacagttcaatctgactgtggcagaagagaagattattaagcatgaaactttaccctatggaagacctagagttctccagaaggaaaacaccatctgtcttctttcccagcaccagtttatgagtggatacagccaagacatcttaatgcccctttggacatcctataccgtggacagaaatgacagtttctctacggaagacttctccaactgtctgtaccaggactttagaattcctcttagtcctgtccataaatgttcattttataaaaataacaccaaagtgagttacgggttcctctccccaccacaactaaataaaaattcaagtggaatatattctgaagctttgcttactacaaatatagtgccaatgtaccagagttttcaagttatatggcgctactttcatgacaccctactgcgaaagtatgctgaagaaagaaatggtgtcaatgtcgtcagtggtcctgtgtttgactttgattatgatggacgttgtgattccttagagaatctgaggcaaaaaagaagagtcatccgtaaccaagaaattttgattccaactcacttctttattgtgctaacaagctgtaaagatacatctcagacgcctttgcactgtgaaaacctagacaccttagctttcattttgcctcacaggactgataacagcgagagctgtgtgcatgggaagcatgactcctcatgggttgaagaattgttaatgttacacagagcacggatcacagatgttgagcacatcactggactcagcttctatcaacaaagaaaagagccagtttcagacattttaaagttgaaaacacatttgccaacctttagccaagaagactgatatgttttttatccccaaacaccatgaatctttttgagagaaccttatattttatatagtcctctagctacactattgcattgttcagaaactgtcgaccagagttagaacggagccctcggtgatgcggacatctcagggaaacttgcgtactcagcacagcagtggagagtgttcctgttgaatcttgcacatatttgaatgtgtaagcattgtatacattgatcaagttcgggggaataaagacagaccacacctaaaactgcctttctgcttctcttaaaggagaagtagctgtgaacattgtctggataccagatatttgaatctttcttactattggtaataaaccttgatggcattgggcaaacagtagacttatagtagggttggggtagcccatgttatgtgactatctttatgagaattttaaagtggttctggatatcttttaacttggagtttcatttcttttcattgtaatcaaaaaaaaaattaacagaagccaaaatacttctgagaccttgtttcaatctttgctgtatatcccctcaaaatccaagttattaatcttatgtgttttctttttaattttttgattggatttctttagatttaatggttcaaatgagttcaactttgagggacgatctttgaatatacttacctattataaaatcttactttgtatttgtattt

SEQ ID NO: 1286 - protein, 873 aa, Homo sapien
MDVGEEPLEKAARARTAKDPNTYKVLSLVLSVCVLTTILGCIFGLKPSCAKEVKSCKGRCFERTFGNCRCDAACVELGNCCLDYQETCIEPEHIWTCNKFRCGEKRLTRSLCACSDDCKDKGDCCINYSSVCQGEKSWVEEPCESINEPQCPAGFETPPTLLFSLDGFRAEYLHTWGGLLPVISKLKKCGTYTKNMRPVYPTKTFPNHYSIVTGLYPESHGIIDNKMYDPKMNASFSLKSKEKFNPEWYKGEPIWVTAKYQGLKSGTFFWPGSDVEINGIFPDIYKMYNGSVPFEERILAVLQWLQLPKDERPHFYTLYLEEPDSSGHSYGPVSSEVIKALQRVDGMVGMLMDGLKELNLHRCLNLILISDHGMEQGSCKKYIYLNKYLGDVKNIKVIYGPAARLRPSDVPDKYYSFNYEGIARNLSCREPNQHFKPYLKHFLPKRLHFAKSDRIEPLTFYLDPQWQLALNPSERKYCGSGFHGSDNVFSNMQALFVGYGPGFKHGIEADTFENIEVYNLMCDLLNLTPAPNNGTHGSLNHLLKNPVYTPKHPKEVHPLVQCPFTRNPRDNLGCSCNPSILPIEDFQTQFNLTVAEEKIIKHETLPYGRPRVLQKENTICLLSQHQFMSGYSQDILMPLWTSYTVDRNDSFSTEDFSNCLYQDFRIPLSPVHKCSFYKNNTKVSYGFLSPPQLNKNSSGIYSEALLTTNIVPMYQSFQVIWRYFHDTLLRKYAEERNGVNVVSGPVFDFDYDGRCDSLENLRQKRRVIRNQEILIPTHFFIVLTSCKDTSQTPLHCENLDTLAFILPHRTDNSESCVHGKHDSSWVEELLMLHRARITDVEHITGLSFYQQRKEPVSDILKLKTHLPTFSQED

SEQ ID NO: 1287 - DNA, 438 bp, Homo sapien
ggcacgagggcccgtgccgccccagccgctgccgcctgcaccggacccggagccgccatgcccaagtgtcccaagtgcaacaaggaggtgtacttcgccgagagggtgacctctctgggcaaggactggcatcggccctgcctgaagtgcgagaaatgtgggaagacgctgacctctgggggccacgctgagcacgaaggcaaaccctactgcaaccacccctgctacgcagccatgtttgggcctaaaggctttgggcggggcggagccgagagccacactttcaagtaaaccaggtggtggagaccccatccttggctgcttgcagggccactgtccaggcaaatgccaggccttgtccccagatgcccagggctcccttgttgcccctaatgctctcagtaaacctgaacacttggaaaaaaaaaaaaaaaaaaa

SEQ ID NO: 1288 - protein, 77 aa, Homo sapien
MPKCPKCNKEVYFAERVTSLGKDWHRPCLKCEKCGKTLTSGGHAEHEGKPYCNHPCYAAMFGPKGFGRGGAESHTFK

SEQ ID NO: 1289 - DNA, 4599 bp, Homo sapien
ccctgtgtctaggtcgtttgggaaacgccttggagagtcaagaataaatttgcaggtcaaacaatggatgactggaaaagtcggcttgtaatcaagagcatgcttccccatttcgccatggtgggaaatcgtcaggagcccagaaagctccaggaatcgggaaagaagccctcgtggatggaggaagaagatttatcttttctctacaagagcagcccaggaagaaagcatcaggggaactgttaacaggagacaagaagaagaccacttccagtttccagacatggctgatgggggctaccctaataaaattaagaggccttgccttgaagatgtcacccttgcaatgggcccaggtgctcatcctagtactgcttgtgcagaactgcaggtccctccattgacaataaatcctagccctgcggctatgggagtggctggccagtcattactgctggagaataaccctatgaatggcaacatcatgggctcaccatttgtagtaccacagactacagaagtgggactgaaagggcccactgttccttactatgagaaaatcaacagcgtgccggctgtagaccaggagcttcaagagctgctagaggagctcaccaaaattcaagacccttctccaaatgagctagatcttgagaagatactggggacgaagccagaagagccactggttttagatcatccccaggcaaccctaagcacaactcccaagccttcggttcagatgtcacacttggagagcctggcttccagcaaggagtttgcttctagttgcagccaagttactggcatgtcacttcagatcccatcctcctccacagggatcagctattcgattccttccaccagtaagcagatagtgtcaccgagttcttcaatggcacagtccaagagccaggtccaggccatgctccctgtcgctctgccccccttaccagtgcctcagtggcatcacgcccaccagctgaaggcgttggcagccagcaagcaggggtctgctacaaagcagcaagggcccacccccagttggtctggtctgcctcctccaggactctctccaccttcccgcccagtgccatcactacagccaccaccgctgccactgccaccaccaccacccccattcagcccccagagcctcatggtgtcctgcatgtcgtccaataccttgtcgggtagcactctccgaggctctcccaatgccttactgtcaagcatgacgtccagcagcaatgctgccctggggcccgccatgccctatgctcctgagaagctccccagccctgctctcactcaacagccgcagttcggccctcagagctccattcttgccaacctcatgtcctctaccatcaaaacccctcaaggacacctgatgtctgctctgcctgccagcaaccctgggccgtccccaccctatcgcccagagaagctctctagcccaggcttgccacagcagtccttcaccccacagtgttccctgatccgaagcctcactcccaccagtaatcttctaagccagcaacagcagcagcagcagcagcagcagcaagcaaatgtgatctttaagcccataagcagcaactcatccaaaaccctgagcatgatcatgcagcaggggatggcaagctccagcccaggagccacggagccatttacttttggcaacaccaagcccttgtcccattttgtttctgagccgggtccccagaagatgccctccatgcctaccacctctaggcagccttccctgctccactacctgcagcagccgacaccaacgcaggcctcctcagccactgcctcctccacggccactgccaccttgcagctgcagcagcagcagcagcaacagcagcagcagcctgaccattcttcattccttctgcagcagatgatgcagcaaccccagcgttttcagcgatcagtggcctcagattccatgcctgctctgcccagacaggtctgttgccatctgtttgcatggacttctgcagctagctcggtgaagccccagcatcaacacgggaactctttcactagcaggcaagatcctcagcctggagacgtgtcaccgtctaacattactcatgtagacaaagcctgcaagcttggggaagccaggcacccccaggtcagcctcgggcgacagcccccgtcctgccaggccctggggagtgagtccttcctgcccggcagctcctttgctcatgagctggcccgagtcacctcctcgtacagcacctcagaggcagcgccctggggcagctgggatccgaaggcctggaggcaggtgcccgctccactactgcctagctgcgacgccacagcaagaggaacagagatcaggtcttatggcaatgacccctgaacggcagaatgcatatatctcccaacagatgagtccatttgaagccgtccaagaacaagtcacctccaagtgtagccggatcaaggcaagccccccatctagcaagcacttgatgccacccagaactgggcttcttcagaacaatctgagtccaggaatgatcccactcaccaggcaccagagctgcgagggcatgggagtgatctcaccaactctggggaagcggcaaggaattttcacctccagcccccagtgtcccatcctctcacactcaggccagactcccctgggcagacttgactctgtctgccagcatatgcagagccccaaggccaccccaccagaagtgcccctgcctgggttctgtcccagctccctgggcacccagtccttgagtccccaccagctcagacggcctagtgtgccaagaatgcccactgcgttcaacaatgctgcatgggtcacagcggcagcagctgtgaccacagcagtttcggggaaaacacccctcagccaagtggataatagcgttcagcagcactcaccttctggccaggcctgccttcagaggccatctgattgggaggcacaagtgcccgctgcgatgggaacacaagtgcccctggccaacaaccccagcttcagcctgctgggcagccagagcctcaggcagagcccggtacagggcccggtgcctgtagcaaacaccaccaagttcctccagcagggtatggccagctttagtcccctgagccccatacagggcatcgagccaccaagctatgtggctgctgctgccaccgctgctgctgcttctgccgttgctgccagccagttcccaggtccgttcgacagaacggatattccccctgagctgccacctgccgactttttgcgccagccccaacccccactaaatgatctgatttcgtcacctgactgcaatgaggtagatttcattgaagctctcttgaaaggctcctgtgtgagcccagatgaagactgggtgtgcaacttgaggctgatcgacgacattttggaacagcatgctgctgctcaaaatgccacagcccagaattctgggcaagtcacccaggatgctggggcactttaaatctgagcaggatgcccatagaaacccccatggtgacatcactctaggaagtggtgtcgatccatacccgcagttgtctcccgttacaatttgagtggtgttgtcagcccatgcttatccctctctctacctgtgacaaaatggaaagctggtgatttttcaagctacgtgtacatatttgaaaattttgtaaatggttttcctaaacattaatgacagaagtatttatacttcattttgtgactttgtaaataaagcgacggcttttgtttcagtagagttgtgtttactatgcattgttttgtgtttattatacaatgttacaaatatgcagaccgtgttgtttgctccagtgataccttgttaagctaggtggctgagtcgcttatggttttaatgcaatgagcaatgtggatatgaccaagagttgttgtgcaagttgacaaatgccaaatagaaaaccacttggccatttatttctatgttcactaaaaatcctattgccttgtgtgattcttaatctcttttgcgaacctttcagtctccgctagctctttcctaatgagctttacagcagaagctgttttatcgttaagtgccccacagagacactttaccaggaggctgggagagttctccagatttgggagaggcgcagagacagtgtgtgagccgagccctgtctcagcaatccacctggaggagctagagtatcctcctccctttaccattcagaccgagagaaaaagcccagcttgtgtgcaccctcgtggggttaaggcgagctgttcctggtttaaagcctttcagtatttgttttgatgtaaggctctgtggtttgggggggaacatctgtaaacattattagttgatttggggtttgtctttgatggtttctatctgcaattatcgtcatgtatatttaagtgtctgttatagaaaacccacacccactgtcctgtaaacttttctcagtgtccagactttctgtaatcacattttaattgccacctcgtatttcacctctacatttgaaatctggcgtctgtttcaagccagtgtgttttttcttcgttctgtaataaacagccaggag

SEQ ID NO: 1290 - protein, 701 aa, Homo sapien
MADGGYPNKIKRPCLEDVTLAMGPGAHPSTACAELQVPPLTINPSPAAMGVAGQSLLLENNPMNGNIMGSPFVVPQTTEVGLKGPTVPYYEKINSVPAVDQELQELLEELTKIQDPSPNELDLEKILGTKPEEPLVLDHPQATLSTTPKPSVQMSHLESLASSKEFASSCSQVTGMSLQIPSSSTGISYSIPSTSKQIVSPSSSMAQSKSQVQAMLPVALPPLPVPQWHHAHQLKALAASKQGSATKQQGPTPSWSGLPPPGLSPPSRPVPSLQPPPLPLPPPPPPFSPQSLMVSCMSSNTLSGSTLRGSPNALLSSMTSSSNAALGPAMPYAPEKLPSPALTQQPQFGPQSSILANLMSSTIKTPQGHLMSALPASNPGPSPPYRPEKLSSPGLPQQSFTPQCSLIRSLTPTSNLLSQQQQQQQQQQQANVIFKPISSNSSKTLSMIMQQGMASSSPGATEPFTFGNTKPLSHFVSEPGPQKMPSMPTTSRQPSLLHYLQQPTPTQASSATASSTATATLQLQQQQQQQQQQPDHSSFLLQQMMQQPQRFQRSVASDSMPALPRQVCCHLFAWTSAASSVKPQHQHGNSFTSRQDPQPGDVSPSNITHVDKACKLGEARHPQVSLGRQPPSCQALGSESFLPGSSFAHELARVTSSYSTSEAAPWGSWDPKAWRQVPAPLLPSCDATARGTEIRSYGNDP

SEQ ID NO: 1291 - DNA, 2772 bp, Homo sapien
  Unsure 2262: Unknown base
gtcattttgaaagactgtgaaactggagccaattctccatcatcacacaggaagctgagtacttcctacttggtcaggatcttgaaacttgaattcataaaaacccagaaagccccagaaacaaagacttcacggacaaagtcccttggaaccagagagaagccgggatggaaactccaaacaccacagaggactatgacacgaccacagagtttgactatggggatgcaactccgtgccagaaggtgaacgagagggcctttggggcccaactgctgccccctctgtactccttggtatttgtcattggcctggttggaaacatcctggtggtcctggtccttgtgcaatacaagaggctaaaaaacatgaccagcatctacctcctgaacctggccatttctgacctgctcttcctgttcacgcttcccttctggatcgactacaagttgaaggatgactgggtttttggtgatgccatgtgtaagatcctctctgggttttattacacaggcttgtacagcgagatctttttcatcatcctgctgacgattgacaggtacctggccatcgtccacgccgtgtttgccttgcgggcacggaccgtcacttttggtgtcatcaccagcatcatcatttgggccctggccatcttggcttccatgccaggcttatacttttccaagacccaatgggaattcactcaccacacctgcagccttcactttcctcacgaaagcctacgagagtggaagctgtttcaggctctgaaactgaacctctttgggctggtattgcctttgttggtcatgatcatctgctacacagggattataaagattctgctaagacgaccaaatgagaagaaatccaaagctgtccgtttgatttttgtcatcatgatcatcttttttctcttttggaccccctacaatttgactatacttatttctgttttccaagacttcctgttcacccatgagtgtgagcagagcagacatttggacctggctgtgcaagtgacggaggtgatcgcctacacgcactgctgtgtcaacccagtgatctacgccttcgttggtgagaggttccggaagtacctgcggcagttgttccacaggcgtgtggctgtgcacctggttaaatggctccccttcctctccgtggacaggctggagagggtcagctccacatctccctccacaggggagcatgaactctctgctgggttctgactcagaccataggaggccaacccaaaataagcaggcgtgacctgccaggcacactgagccagcagcctggctctcccagccaggttctgactcttggcacagcatggagtcacagccacttgggatagagagggaatgtaatggtggcctggggcttctgaggcttctggggcttcagtcttttccatgaacttctcccctggtagaaagaagatgaatgagcaaaaccaaatattccagagactgggactaagtgtaccagagaagggcttggactcaagcaagatttcagatttgtgaccattagcatttgtcaacaaagtcacccacttcccactattgcttgcacaaaccaattaaacccagtagtggtgactgtgggctccattcaaagtgagctcctaagccatgggagacactgatgtatgaggaatttctgttcttccatcacctccccccccccgccaccctcccactgccaaagaacttggaaatagtgatttccacagtgactccactctgagtcccagagccaatcagtagccagcatctgcctccccttcactcccaccgcaggatttgggctcttggaatcctggggaacatagaactcatgacggaagagttgagacctaacgagaaatagaaatggggaactactgctggcagtggaactaagaaagcccttaggaagaatttttatatccactaaaatcaaacaattcagggagtgggctaagcacgggccatatgaataacatggtgtgcttcttaaaatagccataaaggggagggactcatcatttccatttacccttcttttctgactatttttcagaatctctcttcttttcaagttgggtgatatgttggtagattctaatggctttattgcagcgattaataacaggcaaaaggaagcagggttggtttcccttctttttgttcttcatctaagccttctggttttatgggtcagagttccgactgccatcttggacttgtcagcaaaaaaaaaaaataatantaataataaggcctgctgtgtaagctgacagtatttgtagctgatagggggttgggaggaaagtgtctactaggagggtggggtgagattctgtgttgatgtaggaggccgagaaggcccttaactcaaagtagcttatttatccaaaatgttctggatgcatcatctccaaccaaggaccccttatttatcatgcctttgttctcttttccctcagatgtatatttctttaaaaataattttcctaataacaaaacttatttctaaaacagcttaaaaattcaaagaaaaaccccaaacactgacattacctacacttccactacccaaagacaaaatgtgcccactgtgtgcttttgagtgtattttcttttagtttgttttttgttgggtgcatatttatgataataacaatgatggacttcaattgtactcactgttctattgttggttttaattagcagcaagttgtgatcactttcccaggtgaataaatcatttcaaagcatt

SEQ ID NO: 1292 - protein, 355 aa, Homo sapien
  Unsure 2262: Unknown amino acid
METPNTTEDYDTTTEFDYGDATPCQKVNERAFGAQLLPPLYSLVFVIGLVGNILVVLVLVQYKRLKNMTSIYLLNLAISDLLFLFTLPFWIDYKLKDDWVFGDAMCKILSGFYYTGLYSEIFFIILLTIDRYLAIVHAVFALRARTVTFGVITSIIIWALAILASMPGLYFSKTQWEFTHHTCSLHFPHESLREWKLFQALKLNLFGLVLPLLVMIICYTGIIKILLRRPNEKKSKAVRLIFVIMIIFFLFWTPYNLTILISVFQDFLFTHECEQSRHLDLAVQVTEVIAYTHCCVNPVIYAFVGERFRKYLRQLFHRRVAVHLVKWLPFLSVDRLERVSSTSPSTGEHELSAGF

SEQ ID NO: 1293 - DNA, 2156 bp, Homo sapien
ggcacgagcccagaaacaaagacttcacggacaaagtcccttggaaccagagagaagccgggatggaaactccaaacaccacagaggactatgacacgaccacagagtttgactatggggatgcaactccgtgccagaaggtgaacgagagggcctttggggcccaactgctgccccctctgtactccttggtatttgtcattggcctggttggaaacatcctggtggtcctggtccttgtgcaatacaagaggctaaaaaacatgaccagcatctacctcctgaacctggccatttctgacctgctcttcctgttcacgcttcccttctggatcgactacaagttgaaggatgactgggtttttggtgatgccatgtgtaagatcctctctgggttttattacacaggcttgtacagcgagatctttttcatcatcctgctgacgattgacaggtacctggccatcgtccacgccgtgtttgccttgcgggcacggaccgtcacttttggtgtcatcaccagcatcatcatttgggccctggccatcttggcttccatgccaggcttatacttttccaagacccaatgggaattcactcaccacacctgcagccttcactttcctcacgaaagcctacgagagtggaagctgtttcaggctctgaaactgaacctctttgggctggtattgcctttgttggtcatgatcatctgctacacagggattataaagattctgctaagacgaccaaatgagaagaaatccaaagctgtccgtttgatttttgtcatcatgatcatcttttttctcttttggaccccctacaatttgactatacttatttctgttttccaagacttcctgttcacccatgagtgtgagcagagcagacatttggacctggctgtgcaagtgacggaggtgatcgcctacacgcactgctgtgtcaacccagtgatctacgccttcgttggtgagaggttccggaagtacctgcggcagttgttccacaggcgtgtggctgtgcacctggttaaatggctccccttcctctccgtggacaggctggagagggtcagctccacatctccctccacaggggagcatgaactctctgctgggttctgactcagaccataggaggccaacccaaaataagcaggcgtgacctgccaggcacactgagccagcagcctggctctcccagccaggttctgactcttggcacagcatggagtcacagccacttgggatagagagggaatgtaatggtggcctggggcttctgaggcttctggggcttcagtcttttccatgaacttctcccctggtagaaagaagatgaatgagcaaaaccaaatattccagagactgggactaagtgtaccagagaagggcttggactcaagcaagatttcagatttgtgaccattagcatttgtcaacaaagtcacccacttcccactattgcttgcacaaaccaattaaacccagtagtggtgactgtgggctccattcaaagtgagctcctaagccatgggagacactgatgtatgaggaatttctgttcttccatcacctccccccccccgccaccctcccactgccaagaacttggaaatagtgatttccacagtgactccactctgagtcccagagccaatcagtagccagcatctgcctccccttcactcccaccgcaggatttgggctcttggaatcctggggaacatagaactcatgacggaagagttgagacctaacgagaaatagaaatgggggaactactgctggcagtggaactaagaaagcccttaggaagaatttttatatccactaaaatcaaacaattcagggagtgggctaagcacgggccatatgaataacatggtgtgcttcttaaaatagccataaaggggagggactcatcatttccatttacccttcttttctgactatttttcagaatctctcttcttttcaagttgggtgatatgttggtagattctaatggctttattgcagcgattaataacaggcaaaaggaagcagggttggtttcccttctttttgttcttcatctaagccttctggttttatgggtcagagttccgactgccatcttggacttgtcagcaaaaaaaaaaaaaaaaa

SEQ ID NO: 1294 - protein, 355 aa, Homo sapien; identical to SEQ ID NO: 1292

SEQ ID NO: 1295 - DNA, 776 bp, Homo sapien
aaggacacgggcagcagacagtggtcagtcctttcttggctctgctgacactcgagcccacattccgtcacctgctcagaatcatgcaggtctccactgctgcccttgctgtcctcctctgcaccatggctctctgcaaccagttctctgcatcacttgctgctgacacgccgaccgcctgctgcttcagctacacctcccggcagattccacagaatttcatagctgactactttgagacgagcagccagtgctccaagcccggtgtcatcttcctaaccaagcgaagccggcaggtctgtgctgaccccagtgaggagtgggtccagaaatatgtcagcgacctagagctgagtgcctgaggggtccagaagcttcgaggcccagcgacctcggtgggccagtggggaggagcaggagcctgagccttgggaaacatgcgtgtgacctccacagctacctcttctatggactggttgttgccaaacagccacactgtgggactcttcttaacttaaattttaatttatttatactatttagtttttgtaatttattttcgatttcacagtgtgtttgtgattgtttgctctgagagttcccctgtcccctcccccttccctcacaccgcgtctggtgacaaccgagtggctgtcatcagcctgtgtaggcagtcatggcaccaaagccaccagactgacaaatgtgtatcggatgcttttgttcagggctgtgatcggcctggggaaataataaagcacgctcttttaaaaggt

SEQ ID NO: 1296 - protein, 92 aa, Homo sapien
MQVSTAALAVLLCTMALCNQFSASLAADTPTACCFSYTSRQIPQNFIADYFETSSQCSKPGVIFLTKRSRQVCADPSEEWVQKYVSDLELSA

SEQ ID NO: 1297 - DNA, 884 bp, Homo sapien
gctcttacagcatggccgccggtactgcagctgccttagcgtttttgagtcaggagagccgaacgcgggccgggggtgtcgggggcctacgggtcccggccccggtcactatggacagttttttcttcggctgtgagctctccggccacacccgctccttcacctttaaggtagaggaagaggatgatgcggagcacgtgctggcactaaccatgctctgcctcaccgagggagccaaagacgagtgtaatgtggtagaagttgtggcccggaaccatgaccatcaggagatcgcagtccctgtggccaacctcaagctgtcctgccaacccatgctcagtctggatgacttccagctccaaccacctgtaaccttccgcctgaagtcgggctctggccctgtgcggatcactgggcggcaccagattgttacgatgagcaatgatgtttctgaggaggagagcgaggaagaggaagaggacagtgatgaggaagaagttgagctgtgccccatccttcctgccaaaaagcaggggggcaggccctagccctcctaggtcagctccatgtgccatgcaccgccatgcaccctgttccctgacaaagtttcaacaattgtaaatatttcttccttgaagaggagagcttgggtgggggttgggtgggagggacttgggtctttggtgctaggagagggcctgtgctccacacagccgtggttttctgattttcaccatgcccggggcctcccttcccacctgcctgtgagaattggaggttagtgcctgaagctcagagctacacatttttaatagtttaaacatttttggataaaggttgaaataaagtggtgtggagtttttgcaaaaaaaaaaaaaaaaaaa

SEQ ID NO: 1298 - protein, 178 aa, Homo sapien
MAAGTAAALAFLSQESRTRAGGVGGLRVPAPVTMDSFFFGCELSGHTRSFTFKVEEEDDAEHVLALTMLCLTEGAKDECNVVEVVARNHDHQEIAVPVANLKLSCQPMLSLDDFQLQPPVTFRLKSGSGPVRITGRHQIVTMSNDVSEEESEEEEEDSDEEEVELCPILPAKKQGGRP

SEQ ID NO: 1299 - DNA, 538 bp, Homo sapien
gctacactagagcagagtacgagtctgaggcggagggagtaatggcaggacaagcgtttagaaagtttcttccactctttgaccgagtattggttgaaaggagtgctgctgaaactgtaaccaaaggaggcattatgcttccagaaaaatctcaaggaaaagtattgcaagcaacagtagtcgctgttggatcgggttctaaaggaaagggtggagagattcaaccagttagcgtgaaagttggagataaagttcttctcccagaatatggaggcaccaaagtagttctagatgacaaggattatttcctatttagagatggtgacattcttggaaagtacgtagactgaaataagtcactattgaaatggcatcaacatgatgctgcccattccactgaagttctgaaatctttcgtcatgtaaataatttccatatttctcttttataataaactaatgataactaatgacatccagtgtctccaaaattgtttccttgtactgatataaacacttccaaataaaaatatgtaaat

SEQ ID NO: 1300 - protein, 102 aa, Homo sapien
MAGQAFRKFLPLFDRVLVERSAAETVTKGGIMLPEKSQGKVLQATVVAVGSGSKGKGGEIQPVSVKVGDKVLLPEYGGTKVVLDDKDYFLFRDGDILGKYVD

SEQ ID NO: 1301 - DNA, 1421 bp, Homo sapien
gaagcaggcctgagcctccccaaaggcagctcctggggactcccaggaccacaggctgagacgagacgcagggtggctggaggaagtgagaggtgaactcagcctgggactggctgggcgagactctccacctgctccctgggaccatcgcccaccatggctgtggcccagcagctgcgggccgagagtgactttgaacagcttccggatgatgttgccatctcggccaacattgctgacatcgaggagaagagaggcttcaccagccactttgttttcgtcatcgaggtgaagacaaaaggaggatccaagtacctcatctaccgccgctaccgccagttccatgctttgcagagcaagctggaggagcgcttcgggccagacagcaagagcagtgccctggcctgtaccctgcccacactcccagccaaagtctacgtgggtgtgaaacaggagatcgccgagatgcggatacctgccctcaacgcctacatgaagagcctgctcagcctgccggtctgggtgctgatggatgaggacgtccggatcttcttttaccagtcgccctatgactcagagcaggtgccccaggcactccgccggctccgcccgcgcacccggaaagtcaagagcgtgtccccacagggcaacagcgttgaccgcatggcagctccgagagcagaggctctatttgacttcactggaaacagcaaactggagctgaatttcaaagctggagatgtgatcttcctcctcagtcggatcaacaaagactggctggagggcactgtccggggagccacgggcatcttccctctctccttcgtgaagatcctcaaagacttccctgaggaggacgaccccaccaactggctgcgttgctactactacgaagacaccatcagcaccatcaagtctgtggcctgggagggaggggcctgtccagccttcctgccatccctacgaccaccgcccctcacatcaccttctcatgggtccctctcccactccaaagcccccagtggctcccagatgagccacaatgctgtaacaagccatcaacgtccagggtggcctggccagcctcattcccctttcccccaccccacaccccacttccagcctgatgcctccttactccagcctgtcacccccttagggacatcgcggtggaggaagatctcagcagcactcccctattgaaagacctgctggagctcacaaggcgggagttccagagagaggacatagctctgaattaccgggacgctgagggggatctggttcggctgctgtcggatgaggacgtagcgctcatggtgcggcaggctcgtggcctcccctcccagaagcgcctcttcccctggaagctgcacatcacgcagaaggacaactacagggtctacaacacgatgccatga

SEQ ID NO: 1302 - protein, 348 aa, Homo sapien
MAVAQQLRAESDFEQLPDDVAISANIADIEEKRGFTSHFVFVIEVKTKGGSKYLIYRRYRQFHALQSKLEERFGPDSKSSALACTLPTLPAKVYVGVKQEIAEMRIPALNAYMKSLLSLPVWVLMDEDVRIFFYQSPYDSEQVPQALRRLRPRTRKVKSVSPQGNSVDRMAAPRAEALFDFTGNSKLELNFKAGDVIFLLSRINKDWLEGTVRGATGIFPLSFVKILKDFPEEDDPTNWLRCYYYEDTISTIKSVAWEGGACPAFLPSLRPPPLTSPSHGSLSHSKAPSGSQMSHNAVTSHQRPGWPGQPHSPFPHPTPHFQPDASLLQPVTPLGTSRWRKISAALPY

SEQ ID NO: 1303 - DNA, 3963 bp, Homo sapien
cctgcgtgtccctctgcgctccgactggtgcgacttctccctgcgctagcgaggcagggttttggcctcgcctctcgcgagatcgcctcctgttgctgccgccgccgctcctggccactgactggcggcgcctgcgcagccgccatgttcggttgctatgctgcggcctaggagagggggtgtgcttgagggaggaggaagagatagaggaggaggagggggaggaagaggaggtggagaaggaggggggtgactgagctcctcttgcactctcacacacaaacgctgcccaggattacccgccagctcacgccgcgcagtgcgcttttccgctcctcgcgccccaccaccaacattgttctctcaggactcctgggtcccaggggtcggaattgggcctgagcgggagaggaaagagacttggctttggccgcggggtcggaggattggggccaggccccctcccccacgcacttttgggggtgtggattatctcatccctgcagggaggtaggagaggtcgccggctgcccgcctccctgccacctccccagcggcgccggcccgcggctgcccagcagcatgaggtggtgctggcggctccgggtcgtggcgcgaccgctgcggcggcggctgctcggggggcgctgaggtagccccccggagcggcacggaggacgcgcttctcctctgcgcgccggggcctcgaggctttttttctccagccgagaggacgcggctgtgatatacgaagactttgtgtggacagtaatgacctcacgtttccgattgcctgctggcagaacctacaatgtacgagcatcagagttggcccgagacagacagcatactgaagtggtttgcaacatccttcttctggataacactgtacaagctttcaaagtcaataaacatgatcaggggcaagtcttgttggatgtcgtcttcaagcatctagatttgactgagcaggactattttggtttacagttggctgatgattccacagataacccaaggtggctggatccaaacaaaccaataaggaagcagctaaagagaggatctccttacagtttgaactttagagtcaaattttttgtaagtgaccccaacaagttacaagaagaatatacaaggtaccagtattttttgcaaattaaacaagacattcttactggaagattaccctgtccttctaatactgctgcccttttagcttcatttgctgttcagtctgaacttggagactacgatcagtcagagaacttgtcaggctacctctcagattattctttcattcctaatcaacctcaagattttgaaaaagaaattgcaaaattacatcagcaacacataggcttatctcctgcagaagcagaatttaattacctaaacacagcacgtaccttagaactctatggagttgaattccactatgcaagggatcagagtaacaatgaaattatgattggagtgatgtcaggaggaattctgatttataagaacagggtacgaatgaatacctttccatggttgaagattgtaaaaatttcttttaagtgcaaacagttttttattcaacttagaaaagaattgcatgaatctagagaaacattattgggatttaatatggtgaattacagagcatgtaaaaatttgtggaaagcatgtgtagaacatcacacattcttccgtttggacagaccacttccacctcaaaagaatttttttgcacattattttacattaggttcaaaattccggtactgtgggagaactgaagtccaatcagttcagtatggcaaagaaaaggcaaataaagacagggtatttgcaagatccccaagtaagcccttggcacggaaattaatggattgggaagtagtaagcagaaattcaatatctgatgacaggttagaaacacaaagtcttccatcacgatctccaccgggaactcctaatcatcgaaattctacattcacgcaggaaggaacccggttacgaccatcttcagttggtcatttggtagaccatatggttcatacttccccaagcgaagtgtttgtaaatcagagatctccgtcatcaacacaagctaatagcattgttctggaatcatcaccatcacaagagacccctggagatgggaagcctccagctttaccacccaaacagtcaaagaaaaacagttggaaccaaattcattattcacattcgcaacaagatctagaaagtcatattaatgaaacatttgatattccatcttctcctgaaaaacccactcctaatggtggtattccacatgataatcttgtcctaatcagaatgaaacctgatgaaaatgggaggtttggattcaatgtaaagggaggatatgatcagaagatgcctgtgattgtgtctcgagtagcaccaggaacacctgctgacctctgtgtccctagactgaatgaaggggaccaagttgtactgatcaatggtcgggacattgcagaacacactcatgatcaggttgtgctgtttattaaagctagttgtgagagacattctggggaactcatgcttctagttcgacctaatgctgtatatgatgtagtggaagaaaagctagaaaatgagccagatttccagtatattcctgagaaagccccactagatagtgtgcatcaggatgaccattccctgcgggagtcaatgatccagctagctgaggggcttatcactggaacagtcctgacacagtttgatcaactgtatcggaaaaaacctggaatgacaatgtcctgtgccaaattacctcagaatatttccaaaaatagatacagagatatttcgccttatgatgccacacgggtcattttaaaaggtaatgaagactacatcaatgcgaactatataaatatggaaattccttcttccagcattataaatcagtacattgcttgtcaagggccattaccacacacttgtacagatttttggcagatgacttgggaacaaggctcctctatggttgtaatgttgaccacacaagttgaacgtggcagagttaaatgtcaccaatattggccagaacccacaggcagttcatcttatggatgctaccaagttacctgccactctgaagaaggaaacactgcctatatcttcaggaagatgaccctatttaaccaagagaaaaatgaaagtcgtccactcactcagatccagtacatagcctggcctgaccatggagtccctgatgattcgagtgactttctagattttgtttgtcatgtacgaaacaagagggctggcaaggaagaacccgttgttgtccattgcagtgctggaatcggaagaactggggttcttattactatggaaacagccatgtgtctcattgaatgcaatcagccagtttatccactagatattgtaagaacaatgagagatcagcgagccatgatgatccaaacacctagtcaatacagatttgtatgtgaagctattttgaaagtttatgaagaaggctttgttaaacccttaacaacatcaacaaataaataagaaagcaaaaagatctgggatatgtgttggaaaactgctttcccttatgttcactgtgccataatgctgctcgcaggaaatggcattttacaaaaaaaaaatgaagaactcaaaaaaactttgaaaacttcagcactgttgcactttatgttttaaaaaatgtcactctttcaaaatctataactcatgtatttgaagactgtttcatgctttgctccgaacaaatagtaaataactgagtatgttcagggtaatttatgaaattttgtggtggtgccatgcaatccccttttggtagaattgccacaaacaaggctcaaaattctcatcatctctgttatacacctgtatcatgaaagcaaaaagaagtaaacatcaggagtcagctctgaaaaaaaaaaaaaaaaaaaa

SEQ ID NO: 1304 - protein, 926 aa, Homo sapien
MTSRFRLPAGRTYNVRASELARDRQHTEVVCNILLLDNTVQAFKVNKHDQGQVLLDVVFKHLDLTEQDYFGLQLADDSTDNPRWLDPNKPIRKQLKRGSPYSLNFRVKFFVSDPNKLQEEYTRYQYFLQIKQDILTGRLPCPSNTAALLASFAVQSELGDYDQSENLSGYLSDYSFIPNQPQDFEKEIAKLHQQHIGLSPAEAEFNYLNTARTLELYGVEFHYARDQSNNEIMIGVMSGGILIYKNRVRMNTFPWLKIVKISFKCKQFFIQLRKELHESRETLLGFNMVNYRACKNLWKACVEHHTFFRLDRPLPPQKNFFAHYFTLGSKFRYCGRTEVQSVQYGKEKANKDRVFARSPSKPLARKLMDWEVVSRNSISDDRLETQSLPSRSPPGTPNHRNSTFTQEGTRLRPSSVGHLVDHMVHTSPSEVFVNQRSPSSTQANSIVLESSPSQETPGDGKPPALPPKQSKKNSWNQIHYSHSQQDLESHINETFDIPSSPEKPTPNGGIPHDNLVLIRMKPDENGRFGFNVKGGYDQKMPVIVSRVAPGTPADLCVPRLNEGDQVVLINGRDIAEHTHDQVVLFIKASCERHSGELMLLVRPNAVYDVVEEKLENEPDFQYIPEKAPLDSVHQDDHSLRESMIQLAEGLITGTVLTQFDQLYRKKPGMTMSCAKLPQNISKNRYRDISPYDATRVILKGNEDYINANYINMEIPSSSIINQYIACQGPLPHTCTDFWQMTWEQGSSMVVMLTTQVERGRVKCHQYWPEPTGSSSYGCYQVTCHSEEGNTAYIFRKMTLFNQEKNESRPLTQIQYIAWPDHGVPDDSSDFLDFVCHVRNKRAGKEEPVVVHCSAGIGRTGVLITMETAMCLIECNQPVYPLDIVRTMRDQRAMMIQTPSQYRFVCEAILKVYEEGFVKPLTTSTNK

SEQ ID NO: 1305 - DNA, 1040 bp, Homo sapien
cgacgagccatggttgctgggagcgacgcggggcgggccctgggggtcctcagcgtggtctgcctgctgcactgctttggtttcatcagctgtttttcccaacaaatatatggtgttgtgtatgggaatgtaactttccatgtaccaagcaatgtgcctttaaaagaggtcctatggaaaaaacaaaaggataaagttgcagaactggaaaattctgaattcagagctttctcatcttttaaaaatagggtttatttagacactgtgtcaggtagcctcactatctacaacttaacatcatcagatgaagatgagtatgaaatggaatcgccaaatattactgataccatgaagttctttctttatgtgcttgagtctcttccatctcccacactaacttgtgcattgactaatggaagcattgaagtccaatgcatgataccagagcattacaacagccatcgaggacttataatgtactcatgggattgtcctatggagcaatgtaaacgtaactcaaccagtatatattttaagatggaaaatgatcttccacaaaaaatacagtgtactcttagcaatccattatttaatacaacatcatcaatcattttgacaacctgtatcccaagcagcggtcattcaagacacagatatgcacttatacccataccattagcagtaattacaacatgtattgtgctgtatatgaatggtattctgaaatgtgacagaaaaccagacagaaccaactccaattgattggtaacagaagatgaagacaacagcataactaaattattttaaaaactaaaaagccatctgatttctcatttgagtattacaatttttgaacaactgttggaaatgtaacttgaagcagctgctttaagaagaaatacccactaacaaagaacaagcattagttttggctgtcatcaacttattatatgactaggtgcttgctttttttgtcagtaaattgtttttactgatgatgtagatacttttgtaaataaatgtaaatatgtacacaagtg

SEQ ID NO: 1306 - protein, 250 aa, Homo sapien
MVAGSDAGRALGVLSVVCLLHCFGFISCFSQQIYGVVYGNVTFHVPSNVPLKEVLWKKQKDKVAELENSEFRAFSSFKNRVYLDTVSGSLTIYNLTSSDEDEYEMESPNITDTMKFFLYVLESLPSPTLTCALTNGSIEVQCMIPEHYNSHRGLIMYSWDCPMEQCKRNSTSIYFKMENDLPQKIQCTLSNPLFNTTSSIILTTCIPSSGHSRHRYALIPIPLAVITTCIVLYMNGILKCDRKPDRTNSN

SEQ ID NO: 1307 - DNA, 1734 bp, Homo sapien
cggtgccacagggacgaggcctggagagcagtcgctcctagaaccggggcgcgaagggcacccccgcctccagcacgcgccctccgccctcccggcctcgctccccccggagtgggggcctcgccggcccctggtccccgtcactcagcaacgtcgggtcagccttcgccgggttagtggcgacgcggccgcgcgaattcgcacaggggcagtagaatgaaagagggcatgtctaataacagcaccactagcatctcccaagccaggaaagctgtggagcagctaaagatggaagcctgtatggacagggtcaaggtctcccaggcagctgcggacctcctggcctactgtgaagctcacgtgcgggaagatcctctcatcattccagtgcctgcatcagaaaacccctttcgcgagaagaagttcttttgtaccattctctaactccgtgtgtgatgaaaacgcctccttttctgaccttcaaagtcccctgtagagaccatgcatgctctaaaccttagggagtgagaccaacacccatccctgcccagccagagtggccggggcttgtcttatgtttccatctgttttcttcgtggcattcaatttcatttttttccttttcattttcatgttattttcattattggcaaagaaaatcaaaatgtttatagccaaataacaaatgtgccatgtaaaagtaagtctggacttaagagtttaaaatttttaaacatcagtttccaagtttatatcatattaatacatttcagtggataatttatttaaaaaaaaaaactatgcctaaatatcccttatttgcaatattcagtatcaaattagagcattttgaccaactgaaacatataacgttttcatctcctttcctggagaaagcagctgcagaggttctgtatttcctgcatttccatcatcctagtaaaaagacaacaacccacaggattggaatggttttcttttgttttttttttgttgttgttgttgttttgagatggagtctcgctctgtcacccaggctggagtgcaatggcgtgacctcagctcactgcgacctccacctcctgggttcaagcgattctcctgcctcagcctcctgagtagctgggatcataggcacgcgccaccacacccagctaattttttgtatttttagtaaagacggggtttcaccatgttggtcaggctggtctcaaactcctgacctcgtgatccacccgcctcggcctcccaaagcgctgggattacaggcgtgagccaccacacccggccgtggaatggttttcttagcatatcctcctggggccgtggcgcccaggctgtgggccgtggtggatgtcccttgtttcagtggtcctacaaaggtagatggtgggcggacaccgaagtcaacttgactgtaaaagtaccccataccgttgacgcgctgtggcagacctgtgggtgcggtctcccctctccaaatgccacctcttcctgctccctcctcttttggctcctactcagtagttccattgtgggctgcagtaatataaggacctgttctggacacagcactgggcccgctggggttttagtagggcagccccttccctgcaggagtgaggcatggtgacagcagtcccctatgtgcccccaagtcatctgagcattggtgtgcattaaggtactcaatcttccaacaataaataccataagtgcaaaaaaaaaaaaaaa

SEQ ID NO: 1308 - protein, 75 aa, Homo sapien
MKEGMSNNSTTSISQARKAVEQLKMEACMDRVKVSQAAADLLAYCEAHVREDPLIIPVPASENPFREKKFFCTIL

SEQ ID NO: 1309 - DNA, 2494 bp, Homo sapien
ggggtgagagctcctcctaggacacccctttccccttggggaaagaattgtgcccccaggcccttccccgcggaggtccctctcctccttccccctcatctccccttcctgggacagaaagtgcctccacctgcatccccaggggcccggcctccagggcccgctggccccacagcaggcaagctgagatgacggtcaagctggatttcgaggagtgtctcaaggactcaccccgtttccgagcctctattgagctggtggaagccgaagtgtcagaattggagacccgtctggaaaagctcctgaaactgggcactggtctcctggaaagtgggcgccattaccttgctgccagccgcgccttcgttgtcggcatttgtgacctggcccgcctgggtccaccagagcccatgatggcggagtgtctggaaaaattcaccgtgagcctgaaccacaagctggacagccatgcggagcttctagatgccacccaacacacactgcagcagcagatccagaccctggtcaaggaaggtctgcggggtttccgagaggctcgccgggatttctggcggggggctgagagcctggaggctgccctgacccacaacgcagaggttcccaggcgccgggcccaggaggcagaagaggcaggagctgctttgaggacggctcgagctgggtaccggggacgggcactggattatgccctgcagatcaacgtgattgaggacaagaggaagtttgacatcatggagtttgtgctgcgtttggtggaggcccaggctacccatttccagcagggccatgaggagctgagccggctgtcccagtatcgaaaggagctgggcgcccagttgcaccagctggtcttgaattcagcacgagagaagagggacatggagcagagacacgtgctgctgaaacagaaggagctgggtggggaggagccagaaccaagcttaagagaggggcctggtggcctggtgatggaaggacatctcttcaaacgggccagcaacgcatttaagacctggagcagacgctggttcaccattcagagcaaccaactggtttaccagaagaagtacaaggaccctgtgactgtggtggtggatgaccttcgtctctgcacagtgaaactctgccctgactcagaaaggcggttctgctttgaggtggtgtccaccagcaagtcctgcctcctccaggctgactcagagcgcctcctgcagctgtgggtcagtgctgtgcagagcagcattgcttctgccttcagtcaggctcgccttgatgacagcccccggggtccaggccagggctcaggacacctggccataggctctgctgccaccctgggctctggtggaatggccaggggaagggagcctgggggagtcgggcacgtggtggcccaggtccagagtgtggatggcaatgcccagtgctgcgactgccgggagccagccccggagtgggccagcatcaaccttggtgtcaccctctgcattcagtgttccggcatccacaggagccttggtgttcacttctccaaagtccggtctctgacccttgactcatgggagccagaactagtgaagctcatgtgtgagctgggaaatgtcatcatcaaccagatctatgaggcccgcgtggaggccatggcagtgaagaaaccagggcccagctgctcccggcaggagaaggaggcctggattcacgctaaatacgtggagaagaagttcctgaccaagctgcctgagattcgagggcgaagaggtggccgggggcgcccaagggggcagcctcctgtgcccccaaagccttccatcaggccccggccagggagcttgagatccaagccagagcccccctctgaggacctgggaagcctgcaccctggggccctactgtttcgagcgtctgggcatcctccatctcttcccaccatggctgatgcccttgcccatggagctgatgtcaactgggtcaatgggggccaagataatgccacaccgctgatccaggccacagctgctaattctcttctggcctgtgagtttctcctccagaacggggcgaacgtgaaccaagcggacagtgcgggccggggcccgctgcaccacgcaaccattcttggccacacggggctcgcctgcctgttcctgaaacggggagctgatctgggggctcgagactctgaaggcagggaccctctgaccatcgccatggaaacagccaacgctgacatcgtcaccctgctacgactggcaaagatgagggaggctgaagcggcccaggggcaggcaggagatgagacgtatcttgacatcttccgcgacttctccctcatggcgtcagacgacccggagaagctgagccgtcgcagtcatgacctccacacgctgtgacccgaggcccacggggcccgcgcctgcctcccttccccgccaccgggccctctgccattaaagcctccgtgcttcgctcttcc

SEQ ID NO: 1310 - protein, 740 aa, Homo sapien
MTVKLDFEECLKDSPRFRASIELVEAEVSELETRLEKLLKLGTGLLESGRHYLAASRAFVVGICDLARLGPPEPMMAECLEKFTVSLNHKLDSHAELLDATQHTLQQQIQTLVKEGLRGFREARRDFWRGAESLEAALTHNAEVPRRRAQEAEEAGAALRTARAGYRGRALDYALQINVIEDKRKFDIMEFVLRLVEAQATHFQQGHEELSRLSQYRKELGAQLHQLVLNSAREKRDMEQRHVLLKQKELGGEEPEPSLREGPGGLVMEGHLFKRASNAFKTWSRRWFTIQSNQLVYQKKYKDPVTVVVDDLRLCTVKLCPDSERRFCFEVVSTSKSCLLQADSERLLQLWVSAVQSSIASAFSQARLDDSPRGPGQGSGHLAIGSAATLGSGGMARGREPGGVGHVVAQVQSVDGNAQCCDCREPAPEWASINLGVTLCIQCSGIHRSLGVHFSKVRSLTLDSWEPELVKLMCELGNVIINQIYEARVEAMAVKKPGPSCSRQEKEAWIHAKYVEKKFLTKLPEIRGRRGGRGRPRGQPPVPPKPSIRPRPGSLRSKPEPPSEDLGSLHPGALLFRASGHPPSLPTMADALAHGADVNWVNGGQDNATPLIQATAANSLLACEFLLQNGANVNQADSAGRGPLHHATILGHTGLACLFLKRGADLGARDSEGRDPLTIAMETANADIVTLLRLAKMREAEAAQGQAGDETYLDIFRDFSLMASDDPEKLSRRSHDLHTL

SEQ ID NO: 1311 - DNA, 1627 bp, Homo sapien
ctccgctgctgtcgccaggagtcacttcacgagaagccaggtcacaaccgtcggcccttgtctggaaaagtaaaagtggatcctgccacgttcggagctccctggcgcctcgcccggctggagctagagaactcgtcctgtggcggcccccggcgtggggcgggacagcggccccctggagggggcagtcccgggagaacctgcggcggccggagcggtaaaaataagtgactaaagaagcagacctgggaatcacctaacatgtcgaggaggagatttgattgccgaagtatttcaggcctactaactacaactcctcaaattccaataaaaatggaaaactttaataatttctatatacttacatctaaagagctagggagaggaaaatttgctgtggttagacaatgtatatcaaaatctactggccaagaatatgctgcaaaatttctaaaaaagagaagaagaggacaggattgtcgggcagaaattttacacgagattgctgtgcttgaattggcaaagtcttgtccccgtgttattaatcttcatgaggtctatgaaaatacaagtgaaatcattttgatattggaatatgctgcaggtggagaaattttcagcctgtgtttacctgagttggctgaaatggtttctgaaaatgatgttatcagactcattaaacaaatacttgaaggagtttattatctacatcagaataacattgtacaccttgatttaaagccacagaatatattactgagcagcatataccctctcggggacattaaaatagtagattttggaatgtctcgaaaaatagggcatgcgtgtgaacttcgggaaatcatgggaacaccagaatatttagctccagaaatcctgaactatgatcccattaccacagcaacagatatgtggaatattggtataatagcatatatgttgttaactcacacatcaccatttgtgggagaagataatcaagaaacatacctcaatatttctcaagttaatgtagattattcggaagaaactttttcatcagtttcacagctggccacagactttattcagagccttttagtaaaaaatccagagaaaagaccaacagcagagatatgcctttctcattcttggctacagcagtgggactttgaaaacttgtttcaccctgaagaaacttccagttcctctcaaactcaggatcattctgtaaggtcctctgaagacaagacttctaaatcctcctgtaatggaacctgtggtgatagagaagacaaagagaatatcccagaggatagcagcatggtttccaaaagatttcgtttcgatgactcattacccaatccccatgaacttgtttcagatttgctctgttagcacttttttctttgactcatttggactgaatttgaaattttatatccactccagtgagattatgatttgtagcttcatatatgacatgtttatattgtaaatgcacttttccatggaataatttagggaagtgttttaatgttaaattactagttgctagcatgttatgatttcatatcctgagatagctctgcagataagaaaatatttaaatatatgacaaaaagtaaaattgtacatgtgaaag

SEQ ID NO: 1312 - protein, 372 aa, Homo sapien
MSRRRFDCRSISGLLTTTPQIPIKMENFNNFYILTSKELGRGKFAVVRQCISKSTGQEYAAKFLKKRRRGQDCRAEILHEIAVLELAKSCPRVINLHEVYENTSEIILILEYAAGGEIFSLCLPELAEMVSENDVIRLIKQILEGVYYLHQNNIVHLDLKPQNILLSSIYPLGDIKIVDFGMSRKIGHACELREIMGTPEYLAPEILNYDPITTATDMWNIGIIAYMLLTHTSPFVGEDNQETYLNISQVNVDYSEETFSSVSQLATDFIQSLLVKNPEKRPTAEICLSHSWLQQWDFENLFHPEETSSSSQTQDHSVRSSEDKTSKSSCNGTCGDREDKENIPEDSSMVSKRFRFDDSLPNPHELVSDLLC

SEQ ID NO: 1313 - DNA, 1216 bp, Homo sapien
ttcggcacttgggagaagatgtttgaaaaaactgactctgctaatgagcctggactcagagctcaagtctgaactctacctccagacagaatgaagttcatctcgacatctctgcttctcatgctgctggtcagcagcctctctccagtccaaggtgttctggaggtctattacacaagcttgaggtgtagatgtgtccaagagagctcagtctttatccctagacgcttcattgatcgaattcaaatcttgccccgtgggaatggttgtccaagaaaagaaatcatagtctggaagaagaacaagtcaattgtgtgtgtggaccctcaagctgaatggatacaaagaatgatggaagtattgagaaaaagaagttcttcaactctaccagttccagtgtttaagagaaagattccctgatgctgatatttccactaagaacacctgcattcttcccttatccctgctctggattttagttttgtgcttagttaaatcttttccagggagaaagaacttccccatacaaataaggcatgaggactatgtgaaaaataaccttgcaggagctgatggggcaaactcaagcttcttcactcacagcaccctatatacacttggagtttgcattcttattcatcagggaggaaagtttctttgaaaatagttattcagttataagtaatacaggattattttgattatatacttgttgtttaatgtttaaaatttcttagaaaacaatggaatgagaatttaagcctcaaatttgaacatgtggcttgaattaagaagaaaattatggcatatattaaaagcaggcttctatgaaagactcaaaaagctgcctgggaggcagatggaacttgagcctgtcaagaggcaaaggaatccatgtagtagatatcctctgcttaaaaactcactacggaggagaattaagtcctacttttaaagaatttctttataaaatttactgtctaagattaatagcattcgaagatccccagacttcatagaatactcagggaaagcatttaaagggtgatgtacacatgtatcctttcacacatttgccttgacaaacttctttcactcacatctttttcactgactttttttgtgggggcggggccggggggactctggtatctaattctttaatgattcctataaatctaatgacattcaataaagttgagcaaacattttactt

SEQ ID NO: 1314 - protein, 109 aa, Homo sapien
MKFISTSLLLMLLVSSLSPVQGVLEVYYTSLRCRCVQESSVFIPRRFIDRIQILPRGNGCPRKEIIVWKKNKSIVCVDPQAEWIQRMMEVLRKRSSSTLPVPVFKRKIP

SEQ ID NO: 1315 - DNA, 2910 bp, Homo sapien
gcccaggtgactgactaatccgccgccttcaggagacagaattggccaaggcctgaaggccccggagtgcaccagcggcatgtacaaagagaccgtctactccgccttcaatctgctcatgcattacccacccccctcgggagcagggcagcacccccagccgcagcccccgctgcacaaggccaatcagcccccccacggtgtcccccaactctctctctacgaacatttcaacagcccacatcccacccctgcacctgcggacatcagccagaagcaagttcacaggcctctgcagacccctgacctctctggcttctactccctgacctcaggcagcatggggcagctcccccacactgtgagctggttcacccacccatccttgatgctaggttctggtgtacctggtcacccagcagccatcccccacccggccattgtgcccccctcagggaagcaggagctgcagcccttcgaccgcaacctgaagacacaagcagagtccaaggcagagaaggaggccaagaagccaaccatcaagaagcccctcaatgccttcatgctgtacatgaaggagatgagagccaaggtcattgcagagtgcacacttaaggagagcgctgccatcaaccagatcctgggccgcaggtggcacgcgctgtcgcgagaagagcaggccaagtactatgagctggcccgcaaggagaggcagctgcacatgcagctatacccaggctggtcagcgcgggacaactacgggaagaagaagaggcggtcgagggaaaagcaccaagaatccaccacagaccctggctcgcctaagaaatgccgtgctcgctttggcctcaaccagcagacggattggtgtggtccgtgcagataactctcttcactattcctaggaggaaaaagaaatgcattcggtacttacccggagaaggccgctgccccagccccgttccttccgatgacagtgctctaggctgccccgggtccccagctccccaggactcaccctcataccatctgctgccccgcttccccacagaactgcttactagccctgcggagcggcacctacatccccaggtctctccactgctctcagcctcccaaccccagggcccccacaggccccccgcagcaccctgcagagcacacaggtacagcaacaggaatctcagagacaggtggcctagcaggcacaggacacctggccgcctccaggagcctaccccctgaaaatgacagagacccagatctcatggaaactggcaggggtcctgttaacgtcatctcagggtccagaccctgaagatttcagaggctgcagaacttctgcctgaacctggggtcatcgattcaaactgctccaagtggtgggaatcagatctgtcttgatgtgtcatctaattaagggaatcccttgtacctatgactccgtcgatctattctttgtaccatctgtcttgccagccagaagcctctgcctccctagcttttctgctataggtcagagatgggctgaactgagcctagctaccttctctacccatctcccccatcccccactgccacaccctccccattcagacacttcatggaccaagaatgagctggtttgtcaaacaacatgtgagcatggtcacaagcacaaagctcaagatgacagctcttctaaggaaatggagaagctctgtttataaaaacaaaaacaaaaccagctgctactcataagttggaccagaggaagccccttactatgatctcaggagcttgcaagaagcaggaaggggaatggaataggttaagtttaggcctatcaacctaagcaacagaaataatctgacactaccttatcaggcaaattggggaggggagggtgtatctagctctagttcaaattatttggaagtgttccctgagaaacccaccagcctaagaagctctggccccaggcttgtcactagcagctgcagtcaacagttcaaagaagtcatggcccaaatccagtgtgcacccctccccattcacagagcctttttcacaattccatttccagttcatctatggcagtccagccagcttctgggcagcttgagagggcaaacccaaaacctcatgacagccagagcctgtctttcagcattcagtcgcctgggaagctccagtttccccatggggctgcgggacagaggaccattacaactagatcaaggagcccagaaaacctccagtagtggacaacaggttttcaccatagcctacgttaacccatttttgagccaagcttcaaccctcagccttgaaaaacaagtctttaatttaatttttgttttttgcctaaatccaaagaaaaagggctgccgggccaggcgcggtcgtcacgcctgtaatcccagcactttggcaggccgaggcaggtggatcacctgacgtcagtagtttgagaccagcctggccaacatggtgaaaccctgtatctactaaaaatacaaaaattagccggacgtggtggtgcgcgcatgtaatcccagctactcgggaggctgaggcggaagaatcacttgaacccgggaggcggaggttccagtgagccgagatggcgctattgcactccagtctgggtaacagggagactgcatctcaaaaaaaaaaaaaaaaaaaaagggctgtccatgtattcacacacccctcaaaaaaagcctttagttcctactttagccactggtttctcagaatccaaagatcacatattctagtgtaacactgcaagaagtcttgagaaaaagattattgtagtgttcaaaatatttttgtattgttaatgcatcatcatagaaaaacttttaaacatgagaataaagatactttttactgggtttgtttttcaaagcctgaaaaaaa

SEQ ID NO: 1316 - protein, 268 aa, Homo sapien
MYKETVYSAFNLLMHYPPPSGAGQHPQPQPPLHKANQPPHGVPQLSLYEHFNSPHPTPAPADISQKQVHRPLQTPDLSGFYSLTSGSMGQLPHTVSWFTHPSLMLGSGVPGHPAAIPHPAIVPPSGKQELQPFDRNLKTQAESKAEKEAKKPTIKKPLNAFMLYMKEMRAKVIAECTLKESAAINQILGRRWHALSREEQAKYYELARKERQLHMQLYPGWSARDNYGKKKRRSREKHQESTTDPGSPKKCRARFGLNQQTDWCGPCR

SEQ ID NO: 1317 - DNA, 2910 bp, Homo sapien; identical to SEQ ID NO: 1315

SEQ ID NO: 1318 - protein, 268 aa, Homo sapien; identical to SEQ ID NO: 1316

SEQ ID NO: 1319 - DNA, 3868 bp, Homo sapien
atgaacctctgaaaactgccggcatctgaggtttcctccaaggccctctgaagtgcagcccataatgaaggtcttggcggcaggagttgtgcccctgctgttggttctgcactggaaacatggggcggggagccccctccccatcacccctgtcaacgccacctgtgccatacgccacccatgtcacaacaacctcatgaaccagatcaggagccaactggcacagctcaatggcagtgccaatgccctctttattctctattacacagcccagggggagccgttccccaacaacctggacaagctatgtggccccaacgtgacggacttcccgcccttccacgccaacggcacggagaaggccaagctggtggagctgtaccgcatagtcgtgtaccttggcacctccctgggcaacatcacccgggaccagaagatcctcaaccccagtgccctcagcctccacagcaagctcaacgccaccgccgacatcctgcgaggcctccttagcaacgtgctgtgccgcctgtgcagcaagtaccacgtgggccatgtggacgtgacctacggccctgacacctcgggtaaggatgtcttccagaagaagaagctgggctgtcaactcctggggaagtataagcagatcatcgccgtgttggcccaggccttctagcaggaggtcttgaagtgtgctgtgaaccgagggatctcaggagttgggtccagatgtgggggcctgtccaagggtggctggggcccagggcatcgctaaacccaaatgggggctgctggcagaccccgagggtgcctggccagtccactccactctgggctgggctgtgatgaagctgagcagagtggaaacttccatagggagggagctagaagaaggtgccccttcctctgggagattgtggactggggagcgtgggctggacttctgcctctacttgtccctttggccccttgctcactttgtgcagtgaacaaactacacaagtcatctacaagagccctgaccacagggtgagacagcagggcccaggggagtggaccagcccccagcaaattatcaccatctgtgcctttgctgccccttaggttgggacttaggtgggccagaggggctaggatcccaaaggactccttgtcccctagaagtttgatgagtggaagatagagaggggcctctgggatggaaggctgtcttcttttgaggatgatcagagaacttgggcataggaacaatctggcagaagtttccagaaggaggtcacttggcattcaggctcttggggaggcagagaagccaccttcaggcctgggaaggaagacactgggaggaggagaggcctggaaagctttggtaggttcttcgttctcttccccgtgatcttccctgcagcctgggatggccagggtctgatggctggacctgcagcaggggtttgtggaggtgggtagggcaggggcaggttgctaagtcaggtgcagaggttctgagggacccaggctcttcctctgggtaaaggtctgtaagaaggggctggggtagctcagagtagcagctcacatctgaggccctgggaggtcttgtgaggtcacacagaggtacttgagggggactggaggccgtctctggtccccagggcaagggaacagcagaacttagggtcagggtctcagggaaccctgagctccaagcgtgctgtgcgtctgacctggcatgatttctatttattatgatatcctatttatattaacttattggtgctttcagtggccaagttaattcccctttccctggtccctactcaacaaaatatgatgatggctcccgacacaagcgccagggccagggcttagcagggcctggtctggaagtcgacaatgttacaagtggaataagcttacgggtgaagctcagagaagggtcggatctgagagaatggggaggcctgagtgggagtggggggccttgctccacccccatcccctactgtgacttgctttagcgtgtcagggtccaggctgcaggggctgggccaatttgtggagaggccgggtgcctttctgtcttgcttccagggggctggttcacactgttcttgggcgccccagcattgtgttgtgaggcgcactgttcctggcagatattgtgccccctggagcagtgggcaagacagtccttgtggcccaccctgtccttgtttctgtgtccccatgctgcctctgaaatagcgccctggaacaaccctgcccctgcacccagcatgctccgacacagcagggaagctcctcctgtggcccggacacccatagacggtgcggggggcctggctgggccagaccccaggaaggtggggtagactggggggatcagctgcccattgctcccaagaggaggagagggaggctgcagacgcctgggactcagaccaggaagctgtgggccctcctgctccacccccatcccactcccacccatgtctgggctcccaggcagggaacccgatctcttcctttgtgctggggccaggcgagtggagaaacgccctccagtctgagagcaggggagggaaggaggcagcagagttggggcagctgctcagagcagtgttctggcttcttctcaaaccctgagcgggctgccggcctccaagttcctccgacaagatgatggtactaattatggtacttttcactcactttgcacctttccctgtcgctctctaagcactttacctggatggcgcgtgggcagtgtgcaggcaggtcctgaggcctggggttggggtggagggtgcggcccggagttgtccatctgtccatcccaacagcaagacgaggatgtggctgttgagatgtgggccacactcacccttgtccaggatgcagggactgccttctccttcctgcttcatccggcttagcttggggctggctgcattcccccaggatgggcttcgagaaagacaaacttgtctggaaaccagagttgctgattccacccggggggcccggctgactcgcccatcacctcatctccctgtggacttgggagctctgtgccaggcccaccttgcggccctggctctgagtcgctctcccacccagcctggacttggccccatgggacccatcctcagtgctccctccagatcccgtccggcagcttggcgtccaccctgcacagcatcactgaatcacagagcctttgcgtgaaacagctctgccaggccgggagctgggtttctcttccctttttatctgctggtgtggaccacacctgggcctggccggaggaagagagagtttaccaagagagatgtctccgggcccttatttattatttaaacatttttttaaaaagcactgctagtttacttgtctctcctccccatcgtccccatcgtcctccttgtccctgacttggggcacttccaccctgacccagccagtccagctctgccttgccggctctccagagtagacatagtgtgtggggttggagctctggcacccggggaggtagcatttccctgcagatggtacagatgttcctgccttagagtcatctctagttccccacctcaatcccggcatccagccttcagtcccgcccacgtgctagctccgtgggcccaccgtgcggccttagaggtttccctccttcctttccactgaaaagcacatggccttgggtgacaaattcctctttgatgaatgtaccctgtggggatgtttcatactgacagattatttttatttattcaatgtcatatttaaaatatttattttttataccaaatgaatcacttttttttttaagaaaaaaaagagaaatgaataaagaatctactcttcg

SEQ ID NO: 1320 - protein, 202 aa, Homo sapien
MKVLAAGVVPLLLVLHWKHGAGSPLPITPVNATCAIRHPCHNNLMNQIRSQLAQLNGSANALFILYYTAQGEPFPNNLDKLCGPNVTDFPPFHANGTEKAKLVELYRIVVYLGTSLGNITRDQKILNPSALSLHSKLNATADILRGLLSNVLCRLCSKYHVGHVDVTYGPDTSGKDVFQKKKLGCQLLGKYKQIIAVLAQAF

SEQ ID NO: 1321 - DNA, 3314 bp, Homo sapien
gaattccggcaggcgcccatggcgggctgagtcctgcccatgccctggtggcctggaagcctgcatgggcgccgtgcaaagatcaacgttttccagaggagcttttgggctcatcactggcctggggagggcttgacacggggttcccacagcttgccccacaccaccttcacacccacacacagcaggtccccgcggggccggtgcaggctgtggctgcccgcgctgcgctgttgctctgtcccggctggctggctccgagtgtggggcgctctgggccggggccgctggggcgcgcacagtggggtgacaggcggcctggctgcagaaacgttgcaccggtgcctgaggtgggaggatgtgatgacgcggcccacgcagcgggaacccaggcctttaaaaagcccaggaaacagcctcagctcaagcggtggctccactggaggaaaacacaccccggtctcacattaaagaagccaaactgtcggcttcaaagagaaaaggcaacatcctgtcacaggccatgctctggcaaaaacccacagctccggagcaagccccagccccggcccggccataccagggcgtccgtgtgaaggagccagtgaaggaactgctgaggaggaagcgaggccacgccagcagtggggcagcacctgcacctacggcggtggtgctgccccatcagcccctggcgacctacaccacagtgggtccttcctgcctggacatggaaggttctgtgtctgcagtgacagaggaggctgccctgtgtgccggctggctctcccagcccaccccggccaccctgcagcccctggccccatggacaccttacaccgagtatgtgccccatgaagctgtcagctgcccctactcagctgacatgtatgtgcagcccgtgtgccccagctacacggtggtggggccctcctcagtgttggcctatgcctctccgccactcatcaccaatgtcacgacaagaagctccgccacgcccgcagtggggcccccgctggagggcccagagcaccaggcacccctcacctatttcccgtggcctcagcccctttccacactacccacctccaccctgcagtaccggcctccggccccagccctacctgggccccagtttgtccagctccccatctctatcccagagccagtccttcaggacatggaagaccccagaagagccgccagctcgttgaccatcgacaagctgcttttggaggaagaggatagcgacgcctatgcgcttaaccacactctctctgtggaaggcttttaggcgtggctcccacctgagtcctgttccctgaaactgggattttaaaatgagcctggaattgagccccaggttcatgcttgtttggagtagtcatttcatgactactctttctacgcacagctagaattgtagacctgtaaaccttccttcccttcttccttcccctccctccctcacttcctccctctcccccatccttccattcttcccctccctcccttcttcctttccaaccccttccttccttttcctccctcccttccttccctccttcccttctccctttccaaccccttccttccttttcctccctcccttccttccctccttcccttctccctttccttctttacctccctccctccctcgcttcttctctctttcttacttcttttttcaattctgttccattttgggaggtaattatagggattttagcaataacattttatgtcaaatgttgccaagtctgtggtccatgggctttcatttctgtcacatttcatttcttggaaaaggcctccttcctccagtgcctgctgaaccatcttagggtcactcacaccctctgtaattttaagatgtatgtggtggccggcgggaagaccagccccgacagcacctcctgagaaagtcagccaagggcctaccctgatgccagagtccttgagctgtcagttcccacagttgctcctttgtttgctcttctcagcctcggccagatttacagtccaggcagcaaaatctcaaggcctggggctcagagtagtaaggggtgggaagtgggtggcagggagaaaagaacatcagggtgggtggggacaggccagtgacgaagagagggacagaggagggatgggaacaggctgtgcatcttagttggagagaggggtgtgggaggaagcttgagtttgatgcagggaggaggaaggctgaggaatgacttggctccagattacttggttattaagaagaacaataaactaaaggaaagcattgcttgaagagatggttttgctgctctccttgaggatacgtgcaagggaagttgggctgttgtaaacagggtgaagggtgtgtttggtcggccatttctctctcacctctaggccctctgctggtgctgtggaggccaagaccccattaagcctaaaggtgatgggtcctcgcctaggcttagtgctaccatgtgggttttgtttctttccttccttccttccttccttccttccttccttccttccttccttccttccttccttccttccttctttccttccttccttccttccttccttcctctctctttctttcttttttttggttttttttgggacggagtctcactccattgcccaggctggagtacaatggtgcgatcttggctcactgcacctctgtctcccaagttcaagtgattctcctgcctgagcctcccgagtagctgggattacaggtgcatgccaccatgcctggctaatttttgtatttttagtagagacggggtttcaccatgttggccaggctggtctcgaactcctgaccttgtgatccgcgcgcctcagcctctcagagtgctgggatcacaggcgtgagccaccgcacccagccttttaccatgtgggtttctttagtgtcttaaaagcgtccataagccaccattctgtggaaccaaggccccctccacgcaaacaccctccctcctggggacctctggagcctcagccagaagtaccattaggtttaattttaatttgttttgctggagaaacatcaggtttgtaggagactgagttgttagcaggtgtgcttagctcttgatagtgaacgtgtaccttgggaactggctcacccacctgctaatagcaccatcgtcactattaagcagacatttcagttggtagaatccatgtagaagtcatggacttttctgggaaatgacttttctgggaaatgacagtttctttgacatattttctttgcccactttaaataaaaactctggagaaaaaaaaaaaaa

SEQ ID NO: 1322 - protein, 256 aa, Homo sapien
MLWQKPTAPEQAPAPARPYQGVRVKEPVKELLRRKRGHASSGAAPAPTAVVLPHQPLATYTTVGPSCLDMEGSVSAVTEEAALCAGWLSQPTPATLQPLAPWTPYTEYVPHEAVSCPYSADMYVQPVCPSYTVVGPSSVLAYASPPLITNVTTRSSATPAVGPPLEGPEHQAPLTYFPWPQPLSTLPTSTLQYRPPAPALPGPQFVQLPISIPEPVLQDMEDPRRAASSLTIDKLLLEEEDSDAYALNHTLSVEGF

SEQ ID NO: 1323 - DNA, 2400 bp, Homo sapien
taggatggaaaggcagatgtaaagtccctcatggcgaaatataacacggggggcaacccgacagaggatgtctcagtcaatagccgacccttcagagtcacagggccaaactcatcttcaggaatacaagcaagaaagaacttattcaacaaccaaggaaatgccagccctcctgcaggacccagcaatgtacctaagtttgggtccccaaagccacctgtggcagtcaaaccttcttctgaggaaaagcctgacaaggaacccaagcccccgtttctaaagcccactggagcaggccaaagattcggaacaccagccagcttgaccaccagagaccccgaggcgaaagtgggatttctgaaacctgtaggccccaagcccatcaacttgcccaaagaagattccaaacctacatttccctggcctcctggaaacaagccatctcttcacagtgtaaaccaagaccatgacttaaagccactaggcccgaaatctgggcctactcctccaacctcagaaaatgaacagaagcaagcgtttcccaaattgactggggttaaagggaaatttatgtcagcatcacaagatcttgaacccaagcccctcttccccaaacccgcctttggccagaagccgcccctaagtaccgagaactcccatgaagacgaaagccccatgaagaatgtgtcttcatcaaaagggtccccagctcccctgggagtcaggtccaaaagcggccctttaaaaccagcaagggaagactcagaaaataaagaccatgcaggggagatttcaagtttgccctttcctggagtggttttgaaacctgctgcgagcaggggaggcctaggtctctccaaaaatggtgaagaaaaaaaggaagataggaagatagatgctgctaagaacaccttccagagcaaaataaatcaggaagagttggcctcagggactcctcctgccaggttccctaaggccccttctaagctgacagtgggggggccatggggccaaagtcaggaaaaggaaaagggagacaagaattcagccaccccgaaacagaagccattgcctcccttgtttaccttgggtccacctccaccaaaacccaacagaccaccaaatgttgacctgacgaaattccacaaaacctcttctggaaacagtactagcaaaggccagacgtcttactcaacaacttccctgccaccacctccaccatcccatccggccagccaaccaccattgccagcatctcacccatcacaaccaccagtcccaagcctacctcccagaaacattaaacctccgtttgacctaaaaagccctgtcaatgaagacaatcaagatggtgtcacgcactctgatggtgctggaaatctagatgaggaacaagacagtgaaggagaaacatatgaagacatagaagcatccaaagaaagagagaagaaaagggaaaaggaagaaaagaagaggttagagctggagaaaaaggaacagaaagagaaagaaaagaaagaacaagaaataaagaagaaatttaaactaacaggccctattcaagtcatccatcttgcaaaagcttgttgtgatgtcaaaggaggaaagaatgaactgagcttcaagcaaggagagcaaattgaaatcatccgcatcacagacaacccagaaggaaaatggttgggcagaacagcaaggggttcatatggctatattaaaacaactgctgtagagattgactatgattctttgaaactgaaaaaagactctcttggtgccccttcaagacctattgaagatgaccaagaagtatatgatgatgttgcagagcaggatgatattagcagccacagtcagagtggaagtggagggatattccctccaccaccagatgatgacatttatgatgggattgaagaggaagatgctgatgatggtttccctgctcctcctaaacaattggacatgggagatgaagtttacgatgatgtggatacctctgatttccctgtttcatcagcagagatgagtcaaggaactaattttggaaaagctaagacagaagaaaaggaccttaagaagctaaaaaagcaggaaaaagaagaaaaagacttcaggaaaaaatttaaatatgatggtgaaattagagtcctatattcaactaaagttacaacttccataacttctaaaaagtggggaaccagagatctacaggtaaaacctggtgaatctctagaagttatacaaaccacagatgacacaaaagttctctgcagaaatgaagaagggaaatatggttatgtccttcggagttacctagcggacaatgatggagagatctatgatgatattgctgatggctgcatctatgacaatgactagcactcaactttggtcatt

SEQ ID NO: 1324 - protein, 783 aa, Homo sapien
MAKYNTGGNPTEDVSVNSRPFRVTGPNSSSGIQARKNLFNNQGNASPPAGPSNVPKFGSPKPPVAVKPSSEEKPDKEPKPPFLKPTGAGQRFGTPASLTTRDPEAKVGFLKPVGPKPINLPKEDSKPTFPWPPGNKPSLHSVNQDHDLKPLGPKSGPTPPTSENEQKQAFPKLTGVKGKFMSASQDLEPKPLFPKPAFGQKPPLSTENSHEDESPMKNVSSSKGSPAPLGVRSKSGPLKPAREDSENKDHAGEISSLPFPGVVLKPAASRGGLGLSKNGEEKKEDRKIDAAKNTFQSKINQEELASGTPPARFPKAPSKLTVGGPWGQSQEKEKGDKNSATPKQKPLPPLFTLGPPPPKPNRPPNVDLTKFHKTSSGNSTSKGQTSYSTTSLPPPPPSHPASQPPLPASHPSQPPVPSLPPRNIKPPFDLKSPVNEDNQDGVTHSDGAGNLDEEQDSEGETYEDIEASKEREKKREKEEKKRLELEKKEQKEKEKKEQEIKKKFKLTGPIQVIHLAKACCDVKGGKNELSFKQGEQIEIIRITDNPEGKWLGRTARGSYGYIKTTAVEIDYDSLKLKKDSLGAPSRPIEDDQEVYDDVAEQDDISSHSQSGSGGIFPPPPDDDIYDGIEEEDADDGFPAPPKQLDMGDEVYDDVDTSDFPVSSAEMSQGTNFGKAKTEEKDLKKLKKQEKEEKDFRKKFKYDGEIRVLYSTKVTTSITSKKWGTRDLQVKPGESLEVIQTTDDTKVLCRNEEGKYGYVLRSYLADNDGEIYDDIADGCIYDND

SEQ ID NO: 1325 - DNA, 4262 bp, Homo sapien
cgaagaggatccggagcagctgctgccagcccgcgggcactgaagtcctcccggctgccgctcgagtagccacgggcgcgatcgggaccagaagtctcctcctccatgatcactttggaagccgggggggaagactttgccctgccctgagagctggtctgcgtttcccaggcgcggcggcggcggagcagcagctgcagcagccgagtccaaataggagcggccacagccaggggcgtgtgcgccccgcgcggagcgagctcgggttcccctcggaatgtccccggggcgcccggcgcgctgaccccgaagccgcctccgccttcggcgcctgctgcctccctcggccaggcttgttgttcgggactgtgagcttcctggctcctgggcagtggggaagcccccgggggcgagtgacctcagctggccacgacccagccctcccccgtgcgtatctcgcttaagatggcagcggagtcaggggaactaatcggggcttgtgagttcatgaaagatcggttatattttgctactttaaggaatagaccaaaaagcacagtaaatacccactatttctccatcgatgaggagctggtctatgaaaatttctatgcagattttggaccgctgaacttggcaatggtgtacagatattgctgcaaactaaacaagaaactaaaatcatacagtttgtcaagaaagaaaatagtgcactacacctgttttgaccaacggaaaagagcaaatgcagcatttttgataggtgcctatgcagtaatctatttaaagaagacaccagaagaagcctacagagcactcctgtctggctcaaaccccccctatcttccattcagggatgcttcctttggaaattgcacttacaatctcaccattctcgactgtttgcagggaatcagaaagggattacaacatggattttttgactttgagacatttgatgtggatgaatatgaacattatgagcgagttgaaaatggtgacttcaactggattgttccaggaaaatttttagcatttagtggaccacatcctaaaagcaaaattgagaatggttatcctcttcacgcccctgaagcctactttccttatttcaaaaagcataatgtgactgcagttgtgaggctaaacaaaaagatttatgaggcaaagcgcttcacagacgctggcttcgagcactatgacctcttcttcatagatggcagcacacccagtgacaacatcgtgcgaaggttcctgaacatctgtgagaacaccgaaggggccatcgccgttcactgcaaagctggtcttggaagaacagggacattgatagcctgttatgtaatgaaacactacaggtttacacatgctgaaataattgcttggattagaatatgccggccaggctctattataggaccccagcagcacttcctggaagaaaaacaagcatcgttgtgggtccaaggagacattttccgatccaaactgaaaaatcgaccatccagtgaaggaagtattaataaaattctttctggcctagatgatatgtctattggtggaaatctttcaaaaacacaaaacatggaacgatttggagaggataacttagaagatgatgatgtggaaatgaaaaatggtataacccagggagacaaactacgtgccttaaaaagtcagagacagccacgtacctcaccatcctgtgcatttaggtcagatgatacaaaaggacatccaagagcagtgtcccagcctttcagattaagttcatccctgcaaggatctgcagttactttgaagacatcaaaaatggcactgtccccttcagcaacggccaagaggatcaacagaacttctttgtcttcgggtgccactgtaagaagcttttccataaactcccggctagccagttctctagggaacttgaatgctgcaacagatgatccagagaacaaaaagacctcctcatcctctaaggcaggcttcacagccagcccgtttaccaacctcttgaatggcagctcccagccaactaccagaaattaccctgagctcaacaataatcagtacaacagaagcagcaacagcaacgggggcaacctgaacagccccccaggcccccacagcgccaagacagaggagcacaccaccatcctccgaccctcctacaccgggctttcttcttcttcagcgagattcctgagccgttctatcccttcccttcagtctgaatatgttcattactaaggccttgccactccagtgaaagctgttcttctcttagacacaatttcttcatctggacgagcagtggagagggaaagcaacttcttgctggaagaatatctctgccttcttaccttaaattaaaaagagcactaagataacaccttcaagagacttgaaaacagaaaactggttaatgactactataaatgcactgaaactatgttatggagatttccatacttttaaagacagttttaatgttgaatttggtattttgaagggttatttttaatgtattttggtaatacatttattattatatttacatgtacagtgttacattatatatgtattgtgaactttaaaagactattttgataaatttataaatatataaaattatgtaaaaactacactatattttgatttagattttcctgctgtttgctaccaaaaatttgtattttaaatctgtttagttttagtatggttttgtctctaatgaataaataattccttcttattaagaagaagtaagggagaaagtttttagaaagtgatttttatgctcgcactataaatatggcaggtcagttcattcttttgggaagtcagtttagttacactgagtttatccaagtttatctctaccaagagtataatggcatgggatggcttatttaggacaattccctttcctattgtttttgttgctgagccaatttgagttagttttgcatcctggggggctttaaaatacagcatgcagtgaaagatcagaattcactgaatatttcttctgagagcatggtttcatggtttttctctatgaaatgactcaatattccaaatgtttttttttccttcctcctttcaaaagagttcttaacccaattaggatatcctgctttgggtatgaggttgttgttgcctgtaatcacacatggtttgacatcagttttaaatcaatggagagaaaaaactgaaaaagatgctgctaagtagttctctgtattaaaggagatatttttaaaacagggtacaaccccctgctgcacacgctagcatatctggaacctactatgaaaatgaaaggacccttataggtactcacagccctttcatgtaagtatgatctgatatttaggtcttcagaagcctgtaggtttcatttctatgaggaatcgaggagcgttacatcctgatatccttccaggctgcttaagaatggactgcttcgacactgaaagtgctagttaaatggattcatatgaagtgctttactcccaaccattgagttatttataatgtatttattaggggagggtaccttgagtctattatatatgcttcatcaaaacatcttgttcatgttttatgtttttaaaaaaggcatttgaatgaatgtttgactcaggtttgttaaattaacttcagtaactgcagtaccaaaaattacactcaactgatgaaaaaaacgaattgtatgatttaggaatcaaaaactaaaataagtggaattatgtatcttttctaaagttaaaaaagtaaaatattttattatgagttattataaaaattggttaattgtataggaagatgacagtatttttttcaagttatcataaaaagtaattcagatgacatttgagaagtaggggaaagggaatcatgttgacagttttagttctgtgaacactaatttgtgtgaagctattaaaatgattgtaaagttgactactgtaaatttcccataattatgtgtgtatatgtgtcatatgtatgtacatgtatatgtctaaaaattactttacacatgtgcctacatagacacaccaagaagtggatgtatataatatagaaagtatatagcaaagtaattttactctgataataaaaattgtttgacatgtattttgttatgaatagtttatcttccaaaagatattttgctctattttaaagtgtagaagaatacactgctaataaataataaaagttttattcaatttaaaaaaaaaaaaaaaaaa

SEQ ID NO: 1326 - protein, 594 aa, Homo sapien
MAAESGELIGACEFMKDRLYFATLRNRPKSTVNTHYFSIDEELVYENFYADFGPLNLAMVYRYCCKLNKKLKSYSLSRKKIVHYTCFDQRKRANAAFLIGAYAVIYLKKTPEEAYRALLSGSNPPYLPFRDASFGNCTYNLTILDCLQGIRKGLQHGFFDFETFDVDEYEHYERVENGDFNWIVPGKFLAFSGPHPKSKIENGYPLHAPEAYFPYFKKHNVTAVVRLNKKIYEAKRFTDAGFEHYDLFFIDGSTPSDNIVRRFLNICENTEGAIAVHCKAGLGRTGTLIACYVMKHYRFTHAEIIAWIRICRPGSIIGPQQHFLEEKQASLWVQGDIFRSKLKNRPSSEGSINKILSGLDDMSIGGNLSKTQNMERFGEDNLEDDDVEMKNGITQGDKLRALKSQRQPRTSPSCAFRSDDTKGHPRAVSQPFRLSSSLQGSAVTLKTSKMALSPSATAKRINRTSLSSGATVRSFSINSRLASSLGNLNAATDDPENKKTSSSSKAGFTASPFTNLLNGSSQPTTRNYPELNNNQYNRSSNSNGGNLNSPPGPHSAKTEEHTTILRPSYTGLSSSSARFLSRSIPSLQSEYVHY

SEQ ID NO: 1327 - DNA, 2154 bp, Homo sapien
gtcctttgaccagagtttttccatgtggacgctctttcaatggacgtgtccccgcgtgcttcttagacggactgcggtctcctaaaggtcgaccatggtggccgggacccgctgtcttctagcgttgctgcttccccaggtcctcctgggcggcgcggctggcctcgttccggagctgggccgcaggaagttcgcggcggcgtcgtcgggccgcccctcatcccagccctctgacgaggtcctgagcgagttcgagttgcggctgctcagcatgttcggcctgaaacagagacccacccccagcagggacgccgtggtgcccccctacatgctagacctgtatcgcaggcactcgggtcagccgggctcacccgccccagaccaccggttggagagggcagccagccgagccaacactgtgcgcagcttccaccatgaagaatctttggaagaactaccagaaacgagtgggaaaacaacccggagattcttctttaatttaagttctatccccacggaggagtttatcacctcagcagagcttcaggttttccgagaacagatgcaagatgctttaggaaacaatagcagtttccatcaccgaattaatatttatgaaatcataaaacctgcaacagccaactcgaaattccccgtgaccagtcttttggacaccaggttggtgaatcagaatgcaagcaggtgggaaagttttgatgtcacccccgctgtgatgcggtggactgcacagggacacgccaaccatggattcgtggtggaagtggcccacttggaggagaaacaaggtgtctccaagagacatgttaggataagcaggtctttgcaccaagatgaacacagctggtcacagataaggccattgctagtaacttttggccatgatggaaaagggcatcctctccacaaaagagaaaaacgtcaagccaaacacaaacagcggaaacgccttaagtccagctgtaagagacaccctttgtacgtggacttcagtgacgtggggtggaatgactggattgtggctcccccggggtatcacgccttttactgccacggagaatgcccttttcctctggctgatcatctgaactccactaatcatgccattgttcagacgttggtcaactctgttaactctaagattcctaaggcatgctgtgtcccgacagaactcagtgctatctcgatgctgtaccttgacgagaatgaaaaggttgtattaaagaactatcaggacatggttgtggagggttgtgggtgtcgctagtacagcaaaattaaatacataaatatatatatatatatatattctagaaaaaagaaaaaaacaaacaaacaaaaaaaccccaccccagttgacactttaatatttcccaatgaagactttatttatggaatggaatggaaaaaaaaacagctattttgaaaatatatttatatctacgaaaagaagttgggaaaacaaatattttaatcagagaattattccttaaagatttaaaatgtatttagttgtacattttatatgggttcaaccccagcacatgaagtataatggtcagatttattttgtatttatttactattataaccactttttaggaaaaaaatagctaatttgtatttatatgtaatcaaaagaagtatcgggtttgtacataattttccaaaaattgtagttgttttcagttgtgtgtatttaagatgaaaagtctacatggaaggttactctggcaaagtgcttagcacgtttgcttttttgcagtgctactgttgagttcacaagttcaagtccagaaaaaaaaagtggataatccactctgctgactttcaagattattatattattcaattctcaggaatgttgcagagtgattgtccaatccatgagaatttacatccttattaggtggaatatttggataagaaccagacattgctgatctattatagaaactctcctcctgccccttaatttacagaaagaataaagcaggatccatagaaataattaggaaaacgatgaacctgcaggaaagtgaatgatggtttgttgttcttctttcctaaattagtgatcccttcaaaggggctgatctggccaaagtattcaataaaacgtaagatttcttcatt

SEQ ID NO: 1328 - protein, 396 aa, Homo sapien [sequence omitted]

SEQ ID NO: 1329 - DNA, 1547 bp, Homo sapien
ggggacttcttgaacttgcagggagaataacttgcgcaccccactttgcgccggtgcctttgccccagcggagcctgcttcgccatctccgagccccaccgcccctccactcctcggccttgcccgacactgagacgctgttcccagcgtgaaaagagagactgcgcggccggcacccgggagaaggaggaggcaaagaaaaggaacggacattcggtccttgcgccaggtcctttgaccagagtttttccatgtggacgctctttcaatggacgtgtccccgcgtgcttcttagacggactgcggtctcctaaaggtcgaccatggtggccgggacccgctgtcttctagcgttgctgcttccccaggtcctcctgggcggcgcggctggcctcgttccggagctgggccgcaggaagttcgcggcggcgtcgtcgggccgcccctcatcccagccctctgacgaggtcctgagcgagttcgagttgcggctgctcagcatgttcggcctgaaacagagacccacccccagcagggacgccgtggtgcccccctacatgctagacctgtatcgcaggcactcaggtcagccgggctcacccgccccagaccaccggttggagagggcagccagccgagccaacactgtgcgcagcttccaccatgaagaatctttggaagaactaccagaaacgagtgggaaaacaacccggagattcttctttaatttaagttctatccccacggaggagtttatcacctcagcagagcttcaggttttccgagaacagatgcaagatgctttaggaaacaatagcagtttccatcaccgaattaatatttatgaaatcataaaacctgcaacagccaactcgaaattccccgtgaccagacttttggacaccaggttggtgaatcagaatgcaagcaggtgggaaagttttgatgtcacccccgctgtgatgcggtggactgcacagggacacgccaaccatggattcgtggtggaagtggcccacttggaggagaaacaaggtgtctccaagagacatgttaggataagcaggtctttgcaccaagatgaacacagctggtcacagataaggccattgctagtaacttttggccatgatggaaaagggcatcctctccacaaaagagaaaaacgtcaagccaaacacaaacagcggaaacgccttaagtccagctgtaagagacaccctttgtacgtggacttcagtgacgtggggtggaatgactggattgtggctcccccggggtatcacgccttttactgccacggagaatgcccttttcctctggctgatcatctgaactccactaatcatgccattgttcagacgttggtcaactctgttaactctaagattcctaaggcatgctgtgtcccgacagaactcagtgctatctcgatgctgtaccttgacgagaatgaaaaggttgtattaaagaactatcaggacatggttgtggagggttgtgggtgtcgctagtacagcaaaattaaatacataaatatatatata

SEQ ID NO: 1330 - protein, 396 aa, Homo sapien
MVAGTRCLLALLLPQVLLGGAAGLVPELGRRKFAAASSGRPSSQPSDEVLSEFELRLLSMFGLKQRPTPSRDAVVPPYMLDLYRRHSGQPGSPAPDHRLERAASRANTVRSFHHEESLEELPETSGKTTRRFFFNLSSIPTEEFITSAELQVFREQMQDALGNNSSFHHRINIYEIIKPATANSKFPVTRLLDTRLVNQNASRWESFDVTPAVMRWTAQGHANHGFVVEVAHLEEKQGVSKRHVRISRSLHQDEHSWSQIRPLLVTFGHDGKGHPLHKREKRQAKHKQRKRLKSSCKRHPLYVDFSDVGWNDWIVAPPGYHAFYCHGECPFPLADHLNSTNHAIVQTLVNSVNSKIPKACCVPTELSAISMLYLDENEKVVLKNYQDMVVEGCGCR

SEQ ID NO: 1331 - DNA, 4045 bp, Homo sapien
gcagccagagctcagcagggccctggagagatggccacggtcccagcaccggggaggactggagagcgcgcgctgccaccgccccatgtctcagccagggcttccttcctcggctccaccctgtggatgtaatggcggcccctgctctgtcctggcgtctgcccctcctcatcctcctcctgcccctggctacctcttgggcatctgcagcggtgaatggcacttcccagttcacatgcttctacaactcgagagccaacatctcctgtgtctggagccaagatggggctctgcaggacacttcctgccaagtccatgcctggccggacagacggcggtggaaccaaacctgtgagctgctccccgtgagtcaagcatcctgggcctgcaacctgatcctcggagccccagattctcagaaactgaccacagttgacatcgtcaccctgagggtgctgtgccgtgagggggtgcgatggagggtgatggccatccaggacttcaagccctttgagaaccttcgcctgatggcccccatctccctccaagttgtccacgtggagacccacagatgcaacataagctgggaaatctcccaagcctcccactactttgaaagacacctggagttcgaggcccggacgctgtccccaggccacacctgggaggaggcccccctgctgactctcaagcagaagcaggaatggatctgcctggagacgctcaccccagacacccagtatgagtttcaggtgcgggtcaagcctctgcaaggcgagttcacgacctggagcccctggagccagcccctggccttcaggacaaagcctgcagcccttgggaaggacaccattccgtggctcggccacctcctcgtgggcctcagcggggcttttggcttcatcatcttagtgtacttgctgatcaactgcaggaacaccgggccatggctgaagaaggtcctgaagtgtaacaccccagacccctcgaagttcttttcccagctgagctcagagcatggaggagacgtccagaagtggctctcttcgcccttcccctcatcgtccttcagccctggcggcctggcacctgagatctcgccactagaagtgctggagagggacaaggtgacgcagctgctcctgcagcaggacaaggtgcctgagcccgcatccttaagcagcaaccactcgctgaccagctgcttcaccaaccagggttacttcttcttccacctcccggatgccttggagatagaggcctgccaggtgtactttacttacgacccctactcagaggaagaccctgatgagggtgtggccggggcacccacagggtcttccccccaacccctgcagcctctgtcaggggaggacgacgcctactgcaccttcccctccagggatgacctgctgctcttctcccccagtctcctcggtggccccagccccccaagcactgcccctgggggcagtggggccggtgaagagaggatgcccccttctttgcaagaaagagtccccagagactgggacccccagcccctggggcctcccaccccaggagtcccagacctggtggattttcagccaccccctgagctggtgctgcgagaggctggggaggaggtccctgacgctggccccagggagggagtcagtttcccctggtccaggcctcctgggcagggggagttcagggcccttaatgctcgcctgcccctgaacactgatgcctacttgtccctccaagaactccagggtcaggacccaactcacttggtgtagacagatggccagggtgggaggcaggcagctgcctgctctgcgccgagcctcagaaggaccctgttgagggtcctcagtccactgctgaggacactcagtgtccagttgcagctggacttctccacccggatggcccccacccagtcctgcacacttggtccatccatttccaaacctccactgctgctcccgggtcctgctgcccgagccaggaactgtgtgtgttgcaggggggcagtaactccccaactccctcgttaatcacaggatcccacgaatttaggctcagaagcatcgctcctctccagccctgcagctattcaccaatatcagtcctcgcggctctccagggctccctgccctgacctcttccctgggttttctgccccagcctcctccttccctcccctccccgtccacagggcagcctgagcgtgctttccaaaacccaaatatggccacgctccccctcggttcaaaaccttgcacaggtcccactgccctcagccccacttctcagcctggtacttgtacctccggtgtcgtgtggggacatccccttctgcaatcctccctaccgtcctcctgagccactcagagctccctcacaccccctctgttgcacatgctattccctggggctgctgtgcgctccccctcatctaggtgacaaacttccctgactcttcaagtgccggttttgcttctcctggagggaagcactgcctcccttaatctgccagaaacttctagcgtcagtgctggagggagaagctgtcagggacccagggcgcctggagaaagaggccctgttactattcctttgggatctctgaggcctcagagtgcttggctgctgtatctttaatgctggggcccaagtaagggcacagatccccccacaaagtggatgcctgctgcatcttcccacagtggcttcacagacccacaagagaagctgatggggagtaaaccctggagtccgaggcccaggcagcagccccgcctagtggtgggccctgatgctgccaggcctgggacctcccactgccccctccactggaggggtctcctctgcagctcagggactggcacactggcctccagaagggcagctccacagggcagggcctcattatttttcactgccccagacacagtgcccaacaccccgtcgtataccctggatgaacgaattaattacctggcaccacctcgtctgggctccctgcgcctgacattcacacagagaggcagagtcccgtgcccattaggtctggcatgccccctcctgcaaggggctcaaccccctaccccgacccctccacgtatctttcctaggcagatcacgttgcaatggctcaaacaacattccaccccagcaggacagtgaccccagtcccagctaactctgacctgggagccctcaggcacctgcacttacaggccttgctcacagctgattgggcacctgaccacacgcccccacaggctctgaccagcagcctatgagggggtttggcaccaagctctgtccaatcaggtaggctgggcctgaactagccaatcagatcaactctgtcttgggcgtttgaactcagggagggaggcccttgggagcaggtgcttgtggacaaggctccacaagcgttgagccttggaaaggtagacaagcgttgagccactaagcagaggaccttgggttcccaatacaaaaatacctactgctgagagggctgctgaccatttggtcaggattcctgttgcctttatatccaaaataaactcccctttcttgaggttgtctgagtcttgggtctatgccttgaaaaaagctgaattattggacagtctcacctcctgccatagggtcctgaatgtttcagaccacaaggggctccacacctttgctgtgtgttctggggcaacctactaatcctctctgcaagtcggtctccttatccccccaaatggaaattgtatttgccttctccactttgggaggctcccacttcttgggagggttacattttttaagtcttaatcatttgtgacatatgtatctatacatccgtatcttttaatgatccgtgtgtaccatctttgtgattatttccttaatattttttctttaagtcagttcattttcgttgaaatacatttatttaaagaaaaatctttgttactctgtaaatgaaaaaacccattttcgctataaataaaaggtaactgtacaaaataagtacaatgcaacaaaa

SEQ ID NO: 1332 - protein, 551 aa, Homo sapien
MAAPALSWRLPLLILLLPLATSWASAAVNGTSQFTCFYNSRANISCVWSQDGALQDTSCQVHAWPDRRRWNQTCELLPVSQASWACNLILGAPDSQKLTTVDIVTLRVLCREGVRWRVMAIQDFKPFENLRLMAPISLQVVHVETHRCNISWEISQASHYFERHLEFEARTLSPGHTWEEAPLLTLKQKQEWICLETLTPDTQYEFQVRVKPLQGEFTTWSPWSQPLAFRTKPAALGKDTIPWLGHLLVGLSGAFGFIILVYLLINCRNTGPWLKKVLKCNTPDPSKFFSQLSSEHGGDVQKWLSSPFPSSSFSPGGLAPEISPLEVLERDKVTQLLLQQDKVPEPASLSSNHSLTSCFTNQGYFFFHLPDALEIEACQVYFTYDPYSEEDPDEGVAGAPTGSSPQPLQPLSGEDDAYCTFPSRDDLLLFSPSLLGGPSPPSTAPGGSGAGEERMPPSLQERVPRDWDPQPLGPPTPGVPDLVDFQPPPELVLREAGEEVPDAGPREGVSFPWSRPPGQGEFRALNARLPLNTDAYLSLQELQGQDPTHLV

SEQ ID NO: 1333 - DNA, 2646 bp, Homo sapien
tttccttcctcttttggcaacatggcgggcggagaagctggagtgactctagggcagccgcatctttcgcgtcaggatctcaccaccttggatgttaccaagttgacgccactttcacacgaagttatcagcagacaagccacaattaacataggtacaattggtcatgtagctcatgggaaatccacagtcgtcaaagctatttctggagttcatactgtcaggttcaaaaatgaactagaaagaaatattacaatcaagcttggatatgctaatgctaagatttataagcttgatgacccaagttgccctcggccagaatgttatagatcttgtgggagcagtacacctgacgagtttcctacggacattccagggaccaaagggaacttcaaattagtcagacatgtttcctttgttgactgtcctggccacgatattttgatggctactatgctgaacggtgcagcagtgatggatgcagctcttctgttgatagctggtaatgaatcttgccctcagcctcagacatcggaacacctggctgctatagagatcatgaaactgaagcatattttgattctacaaaataaaattgatttggtaaaagaaagtcaggctaaagaacaatacgagcagatccttgcatttgtccaaggtacagtagcagagggagctcccattattccaatttcagctcagctgaaatacaatattgaagttgtttgtgagtacatagtaaagaaaattccagtacccccaagagactttacttcagagccccggcttattgttattagatcttttgatgtcaacaaacctggctgtgaagttgatgaccttaagggaggtgtagctggtggtagtatcctaaaaggagtattaaaggtgggccaggagatagaagtaagacctggtattgtttccaaagatagtgaaggaaaactcatgtgtaaaccaatcttttccaaaattgtatcactttttgcggagcataatgatctgcaatatgctgctccaggcggtcttattggagttggaacaaaaattgaccccactttgtgccgggctgacagaatggtggggcaagtacttggtgcagtcggagctttacctgagatattcacagaattggaaatttcctatttcctgcttagacggcttctaggtgtacgcactgaaggagacaagaaagcagcaaaggttcaaaagctgtctaagaatgaagtgctcatggtgaacataggatccctgtcaacaggagggagagttagtgctgtcaaggccgatttgggtaaaattgttttgaccaatccagtgtgcacagaggtaggagaaaaaattgcccttagccgaagagttgaaaaacactggcgtttaattggttggggtcagataagaagaggagtgacaatcaagccaacagtagatgatgactgaagaataccagttaaataatacattcggatggatttggaagttggaattcctcttaacaaccaaggggtttattttcaaagcaatattggggaattgatttcacagttcgttaccttagtaggtaacggtaaggttattctctttttttttttttttggttatgaaaacttagggactaaaattaatataaaaattggcataatgttggattgaatctacattttggcagaagttaaacattcccacataatgtcaaaattatacatcatgcagttctgtttttttgtttgtttaattttgttttgtttttgagtctggctctgtcacccaggctggagtgcagtggcgtgatctgcaacctctgccccccgggttcaagcgattctcctgcctcagcctcccgagtagctgagattacaggtgcgcgccaccacacttggctaatttttgtattattagtagagacggggtttcagcatgttggctaggccggtctctcctgacctcagggtgatcagcccacctcggcctcacaaagtgctgggattacaggcgtgagccaccttgcccagcccacatcatacagtttgaaatgaaactttgccacaaccagcctttgctgtagcacacacatatatcactgaacctgtttgaaataaagttttttttctttttcatgattcgtctttgagtacctccaggctgaaagactgttgtaccagtaaaaacttaaaggcacaaattctccttgaagaccttctcccttttatgtggccccatattttatgttgctttatctttgaaattttgcatgaaaaggaaatgaatggattcgaatgaaattgtcctttagagcatgattacttgttcccatggacaaatatttttctccccttgctcttcctggcctgaaacacgggaaaccagagtcaaaagttatctccctctccctgtgatgccttgagatttttttctgcgttgtttaatgcctgaaatccaagtcttcctccatgggaaaatactgttataccaaataattctagatgagtaacaaagatctttttaggccttcattttatgttttttcttaactgttatattatgattgtgacatagattatactactactaatttttggatgtttcaaaaggtcaagaagtaaaagatgttagaaagcaaaaaaaaaaaaaaaaaaaaaaaaaaaa

SEQ ID NO: 1334 - protein, 472 aa, Homo sapien
MAGGEAGVTLGQPHLSRQDLTTLDVTKLTPLSHEVISRQATINIGTIGHVAHGKSTVVKAISGVHTVRFKNELERNITIKLGYANAKIYKLDDPSCPRPECYRSCGSSTPDEFPTDIPGTKGNFKLVRHVSFVDCPGHDILMATMLNGAAVMDAALLLIAGNESCPQPQTSEHLAAIEIMKLKHILILQNKIDLVKESQAKEQYEQILAFVQGTVAEGAPIIPISAQLKYNIEVVCEYIVKKIPVPPRDFTSEPRLIVIRSFDVNKPGCEVDDLKGGVAGGSILKGVLKVGQEIEVRPGIVSKDSEGKLMCKPIFSKIVSLFAEHNDLQYAAPGGLIGVGTKIDPTLCRADRMVGQVLGAVGALPEIFTELEISYFLLRRLLGVRTEGDKKAAKVQKLSKNEVLMVNIGSLSTGGRVSAVKADLGKIVLTNPVCTEVGEKIALSRRVEKHWRLIGWGQIRRGVTIKPTVDDD

SEQ ID NO: 1335 - DNA, 5597 bp, Homo sapien
cgcgcttccgggttggctgtggctgtggctgcggcggcggcgcaggagcagaaaccggtgcggcgcagaagccccagaggcgggcggggcggagcggagggccagcgggccccggcgtgggtctcccgccaggccgccggatttaacccttagtggcttctgaagaaaatggcagaaacatcgccagagccttctgggcagcttgttgtacactcagacgctcacagtgacactgtgctggccagttttgaggatcagaggaagaaaggcttcctctgtgacattactttaatcgtggagaatgtacatttccgggcccacaaagccttacttgctgccagtagtgaatacttctcaatgatgtttgcagaagagggggaaatcggccaatccatttatatgctggaaggcatggttgcagacacctttggtatcctgctggaatttatctacacaggttatctccatgccagtgagaaaagtacagaacaaatcctggctactgctcagttcttaaaagtctatgacctggtaaaggcttacacagacttccaaaataatcatagctccccaaagccaacaactttgaacactgctggtgccccagtggttgttatccctaataagaaaaacgatcctccaaagcggaaacggggaagaccaaaaaaagtcaatacattgcaggaggagaaatcagaactggctgcagaggaagaaatacagttaagagtgaacaattcagttcagaatagacaaaactttgtggttaaaggagacagtggtgtactgaatgagcaaattgcagcaaaagaaaaggaagaatcggagcctacttgtgagccaagtagagaggaggaaatgccagttgaaaaagatgagaactatgatcccaagaccgaggatggccaggcaagccagagtcgatacagcaagcggaggatttggagatccgtcaaacttaaagattacaaacttgttggggatcaagaggaccatggttcagccaagaggatctgtggaaggagaaagcgccctggaggccctgaggcccgctgtaaagactgtggcaaggtctttaagtacaatcactttttagcaatccaccagaggagccacacaggggagcgacctttcaaatgtaatgagtgtggaaaaggctttgcccagaagcactcgctacaggtccacaccaggatgcacacaggcgagcggccgtacacctgcaccgtgtgcagcaaggctctgaccaccaagcactcactgctggagcacatgagcctgcactcaggacagaagtcttttacctgtgatcaatgcggaaaatatttcagccagaacagacagctaaagagccattaccgagttcatacaggccactcattaccggaatgcaaagactgccatcgcaaattcatggatgtgtctcagctaaagaaacatctgcgaacacacacaggtgagaagccatttacttgtgaaatctgtggcaaatctttcacagcaaagagttctcttcagacccacatcagaatccatcgaggagaaaagccatactcctgtggcatttgtggcaaatccttctctgactccagtgccaaaaggagacactgcattctacacactggcaagaagcctttctcctgccctgagtgtaacttacagtttgctcgcttagacaacttgaaggctcacttgaaaattcatagcaaggagaagcatgcttcagatgccagcagcatttctggcagtagtaatacagaagaggtcaggaatattcttcagctacagccatatcaactctctacctcgggagagcaggaaattcagcttctcgtaaccgattctgtacataacatcaatttcatgcccggtcctagccagggaatcagcattgtgactgcagagagttcccaaaacatgactgcagaccaggctgctaatcttaccctgctcacgcagcagccagagcaactgcagaatttaattctttcagctcaacaggagcaaacagaacacattcagagcctcaatatgattgaaagccagatggggccctcacaaacagagccagtgcacgtgatcactctgtccaaggaaacactggaacatcttcatgcccatcaagagcaaacagaggagctccatttagctacaagtacttcagatccagctcagcacctgcagctgacacaggagcctggtccgccaccacccactcaccacgtgccccagccaacgccacttggccaggagcagagctgacctgtaaacacgtttgactgcttgattgggctcttcttataagccagctctgactggattttgaacgcttgaaatcaggctctccacaccattgacttgcagatgcttctgtgagagctgtgatggctaactgatgtttataatgccctccatccaggtagcaagatgtgtgtatgtcttgtctaaggtactgatttgtattgagcatttcaatattattgaatggttttcattttaatctgcaatgtctcataaagactcgggtagtttttctttgggggcattgatctcagtttttctgtaaggtttaaatgttcacagccataggttatggtcttgccaacctccccagttatgtttttttgttttctaggacaaagggagtcattttggttgaactgggcagaatggtttgttctattttcttatttttcttaggcaacacagttgttaccacaagacaagtcagggctaaatatgacagatcacaatgtatggggaatttgcccttttaataatttccagtcccctaagacaaagtaaccctcaacgttttatctttatgcagtacagtgggcttattgtgttaacacttcagaaagattcaaactcataaactcagtattttaactcaaaattcatgtaacaagatagccaaaagcataggatttcttaaaattctgaattcgtcttttctgagaaacataaatttacatatttttcaacagaaggctatcaaaattttaattaagtttaaaatacaaaattggatcaagacattcaccctaaattctgaatttttgtcagaaaagagatttgattttcatgaaggtaaagctttcttcactattctggaacataaaactttattcagtgtaatttaagtcttatatatactctactgaattctaactgatctcctgaaaatgttgatctacgtgttgtgtctgataactttctggagatggaagcttataattcatttttattgcagactagttaaatcccacaaagtgaatatcttctcctaatctttccttttttagagacggggtctcactgtatcacccaggccagagtgtagtggcacaatcattgctcactgtagcctcgaattcctgggctcaagcaaccctcccaccttagcctccctagtagctgggactacagggatgtaccaccacacccagctaatcttcatctaatcttaaaactttgagcctcagagactttgtagccagcatgtgtctgtaattgtatgatttttaaatcatcatcaaaagattaaattatgtttgggttaggttttcaagctaagcttattgaattcttttaccactttcatgtaagctggtaggggatttttgagaaaagaaggtgggcactagtatatctaaattaacaatgctgatggggagtagggggtaatctactctaaaattaatagagcctttccatcaattgttttgttttagacatccttgatttctccctaaatcaaataagttatttggaggttagagtaatagagaattcttcaggtttgagagaagataaaaacattttggttgcatatttgctaagctatattttattatatgtaattcacaaaacttccaaaatgatatatatcttatatgtatcaaccaaactaatgttaaatcaggcctgactagagcaaagataacaattttttacaaacactgttaagccctaagtattatttcaggttctcgtttaaactgtttaattttattcttaaaacacaaagtttttaccaacttttcaaagcccaccaatccacattttctccaggaaattaaatatttaagtaagtgagtgtttactcactctggatagctaggtgattattcagaaaatacggttacatagctatttataagtcaagtttcactggctctataacagtctacctctacactaagagaactataacatgaacaacataggtcactttaaatgttctagtagcaacttttaaaaacataaaaagaagcaggtgaaaatgttaataaaagtttatttaatccaacatttgccaaatatttcaacatataaaaatatattagtgagacattttacattctctttttcatactaagctttcgaaatctggtgtgtattttacactttctgcacatctccatttggatgctaatgttcattggacatacttgatctgtatttagatttcatacaacttacagttgaaaacagattctcatatcaagtagctaagacaaaagtttttttcaagaattgaaataagtatcagtttaaaaatttatattaaatttattaaaattaaaatccagttccttgttgcatgggacacagtgcaaatgcttgataagcacatgtggctagtggctgctatattggacagcatgggccacctgtttctaacttgagcatcagtcctagctatgcctgaattatttgaccagctgtcaaagagaaacaaggaaatgatagctttgttaatctagcctctttctttgtcccacatatacattctacccctttgaataaaaaagttcaatgacgccgggcgtggaggctcatgcctgtaatcccagcactttgggaggccaaggtgggcggatcacgaggtcaggagttcgagggcagcctgaccaacatagtgaaaccccatctctactaaaaatacaaaaattagctgggcgtggtggtgtacccctgtaatcccagctactcgggaggctgagacaggagaatcacttgagcccaggaggcggaggctgcagtgagctgagatcacgccattgcactcaagcctggcgacagagcgagactccgtctcaaaaaaaaaagttaaatgacttgagtacccaaaagaaatgtcgtgaacatgaaagtacttctcatgtgtccttgagaaatgatgttgctagtgcagtgtttcacaattcattttctactaaatgtgtaccattttttaaattgttttaacagaaatatagagtgtgtttcttaggaaatagaatgttatgctttggggctcctgaaacacctcgttttgaaggtgaatctttggttttctcccagaagagggtctgccttgagatgattggagctcttaccatcaaaatcagttattcaagtgcttgcccagtgcttcttgaaactcacctctactctgtattttctacagttggttcttgtgttataaatgttgtgagcaacagattaaatgatgctgaggaatgaaaaaagattctcattataaatgcttacctaggattctcattatagatgcttatctaggttttcataaatgggaatgtaacaat

SEQ ID NO: 1336 - protein, 697 aa, Homo sapien
MAETSPEPSGQLVVHSDAHSDTVLASFEDQRKKGFLCDITLIVENVHFRAHKALLAASSEYFSMMFAEEGEIGQSIYMLEGMVADTFGILLEFIYTGYLHASEKSTEQILATAQFLKVYDLVKAYTDFQNNHSSPKPTTLNTAGAPVVVIPNKKNDPPKRKRGRPKKVNTLQEEKSELAAEEEIQLRVNNSVQNRQNFVVKGDSGVLNEQIAAKEKEESEPTCEPSREEEMPVEKDENYDPKTEDGQASQSRYSKRRIWRSVKLKDYKLVGDQEDHGSAKRICGRRKRPGGPEARCKDCGKVFKYNHFLAIHQRSHTGERPFKCNECGKGFAQKHSLQVHTRMHTGERPYTCTVCSKALTTKHSLLEHMSLHSGQKSFTCDQCGKYFSQNRQLKSHYRVHTGHSLPECKDCHRKFMDVSQLKKHLRTHTGEKPFTCEICGKSFTAKSSLQTHIRIHRGEKPYSCGICGKSFSDSSAKRRHCILHTGKKPFSCPECNLQFARLDNLKAHLKIHSKEKHASDASSISGSSNTEEVRNILQLQPYQLSTSGEQEIQLLVTDSVHNINFMPGPSQGISIVTAESSQNMTADQAANLTLLTQQPEQLQNLILSAQQEQTEHIQSLNMIESQMGPSQTEPVHVITLSKETLEHLHAHQEQTEELHLATSTSDPAQHLQLTQEPGPPPPTHHVPQPTPLGQEQS

SEQ ID NO: 1337 - DNA, 1086 bp, Homo sapien
ccccggcccacaagcccctgcagggagcgggcccgggcggcgcgcgatcgaggtcgggtcgccgtccagcctgcagcatgagcgcccccagcgcgacccccatcttcgcgcccggcgagaactgcagccccgcgtggggggcggcgcccgcggcctacgacgcagcggacacgcacctgcgcatcctgggcaagccggtgatggagcgctgggagaccccctatatgcacgcgctggccgccgccgcctcctccaaagggggccgggtcctggaggtgggctttggcatggccatcgcagcgtcaaaggtgcaggaggcgcccattgatgagcattggatcatcgagtgcaatgacggcgtcttccagcggctccgggactgggccccacggcagacacacaaggtcatccccttgaaaggcctgtgggaggatgtggcacccaccctgcctgacggtcactttgatgggatcctgtacgacacgtacccactctcggaggagacctggcacacacaccagttcaacttcatcaagaaccacgcctttcgcctgctgaagccggggggcgtcctcacctactgcaacctcacctcctggggggagctgatgaagtccaagtactcagacatcaccatcatgtttgaggagacgcaggtgcccgcgctgctggaggccggcttccggagggagaacatccgtacggaggtgatggcgctggtcccaccggccgactgccgctactacgccttcccacagatgatcacgcccctggtgaccaaaggctgagcccccaccccggcccggccacacccatgccctcctccgtgccttcctggccgggagtccagggtgtcgcaccagccctgggctgatcccagctgtgtgtcaccagaagctttcccggcttctctgtgaggggtcccaccagcccagggctgatcccagctgtgtgtcaccagcagctttcccagcttctctgtgagggtcactgctgcccactgcagggtccctgaggtgaagtaaacgccggcgctgggcttggccagtcggcagtgaaaaaaaaaaaaaaaaaaaaaaaaaaaaa

SEQ ID NO: 1338 - protein, 236 aa, Homo sapien
MSAPSATPIFAPGENCSPAWGAAPAAYDAADTHLRILGKPVMERWETPYMHALAAAASSKGGRVLEVGFGMAIAASKVQEAPIDEHWIIECNDGVFQRLRDWAPRQTHKVIPLKGLWEDVAPTLPDGHFDGILYDTYPLSEETWHTHQFNFIKNHAFRLLKPGGVLTYCNLTSWGELMKSKYSDITIMFEETQVPALLEAGFRRENIRTEVMALVPPADCRYYAFPQMITPLVTKG

SEQ ID NO: 1339 - DNA, 2937 bp, Homo sapien
caatttcagagtgggatatcagatctttagtgtgaagatacatctacattaaaccaggaatcactagaactgacatttggacaagaaaatttggaaaattttaaaactgtgaaggttgatcatggaaattaaagaggaaggggcatcagaagaagggcagcactttcttcctacagcccaggccaatgatcccggggactgtcagttcacaagtatccagaagactccaaatgaaccgcagttggaattcatccttgcatgcaaggatctcgtggctcctgtccgtgatcgtaaactgaatacactggtgcagatctccgtaatccaccccgtggagcagagtctgacaagatactccagcaccgaaattgtggagggaacaagggacccactgtttttgactggtgtcacattcccatctgagtatcccatctatgaggagaccaaaataaaactaacagtctatgatgtcaaggataagtctcatgacaccgttcgaaccagtgtcctaccagaacataaggatcccccgccagaagttggccgaagtttcttgggctatgccagttttaaagtgggagagctgctgaagtcaaaggagcaattgctggtcctgagcctgagaacttcagatggtggcaaagtggttggcaccatagaagtcagtgtcgtgaagatgggggagattgaggatggggaagccgaccacatcaccacagatgtacagggacaaaagtgtgccctggtatgtgaatgtacagccccggaaagtgtgagcggaaaagataacttaccttttttgaattcagtgttaaagaacccagtatgtaaattatatagatttcccacatctgacaataagtggatgcgaattcgagagcagatgtcagagagcattctttcctttcatattcctaaggaattgatttcccttcacattaaagaagatttgtgcagaaaccaggagataaaagaacttggtgagctttctccacattgggacaatctgcgaaaaaatgtccttacgcactgtgatcaaatggtgaatatgttccaagacattctgacagaacttgccaaggaaacagggtcctctttcaaatcaagcagcagcaaaggagagaaaacattagaatttgttccaataaatctacatctgcaaagaatgcaggtacacagccctcacttgaaagatgctctctacgatgtcatcactgtgggagccccagctgcccattttcagggatttaagaatggtggtcttcggaagctactccatagatttgaaacagaaagaagaaataccggataccagtttatttactattcacctgaaaacacagccaaagcaaaggaagttctcagcaacatcaatcaactacaacctcttatagcaacccatgcagacctactgcttaattctgcaagccagcattctccagacagcttgaagaattctttaaagatgctttcagaaaaaacagagctttttgtacatgccttcaaggatcaacttgtcaggagtgctcttttagcactctacactgcaaggccaggaggcattcttaagaagccaccctctcctaagagcagcacagaggagagcagtccccaagaccaacccccagtgatgagagggcaggactccataccacatcattcagactatgatgaggaagagtgggacagggtgtgggccaatgtggggaagagcctgaactgcattattgctatggtggacaaactgattgaaagagatggtggcagtgaaggcagtggtggcaacaatgatggagaaaaggaaccttcattaacagatgccattccctctcacccaagagaggactggtatgaacagttgtatcccctcatccttaccctgaaggactgcatgggagaagtggtgaaccgagccaagcagtccctgacatttgtgctccttcaggaacttgcgtacagcttgccccagtgtctgatgctgacgctaagaagagacatcgtcttcagccaagcacttgctggattggtttgtggttttatcatcaaattacagacaagtctgtatgacccaggcttcctacagcagcttcacacagtggggttgatagtacaatatgaaggattgttaagtacatacagcgatgaaattggaatgttagaggacatgcccgttggcatttccgatttaaagaaagttgcatttaaaataattgaagccaaatccaatgatgtattgccagttataacaggaagacgagaacattacgtggtagaggtcaagcttccagccagaatgtttgagtcactacctctacagattaaagaaggacagttgcttcatgtgtatccagtactttttaatgttggaatcaatgaacagcaaactctggctgaaaggtttggagatgtctctttgcaagaaagtattaatcaggaaaacttcgaacttctacaagaatattacaagatatttatggaaaagatgcctcctgattatatttcacattttcaggaacaaaatgatttaaaagcattgctagaaaatctccttcaaaatatccaatccaaaaaaagaaagaatgtagaaattatgtggctggctgcaacgatttgccgcaaactgaatggtattcgtttcacctgttgtaaaagtgccaaagacaggacatcgatgtcagtgacacttgaacaatgctcaatcttgagagatgagcaccagttacacaaggacttctttatccgagcgctggattgcatgagaagagaaggatgccgcatagagaatgtactgaagaatatcaaatgcagaaagtatgctttcaacatgctacagctgatggctttccccaagtactacagacctccagaggggacttatggaaaagctgacacctaagtttaccaacatgttaataaacaggaacacaaatacatttc

SEQ ID NO: 1340 - protein, 924 aa, Homo sapien
MEIKEEGASEEGQHFLPTAQANDPGDCQFTSIQKTPNEPQLEFILACKDLVAPVRDRKLNTLVQISVIHPVEQSLTRYSSTEIVEGTRDPLFLTGVTFPSEYPIYEETKIKLTVYDVKDKSHDTVRTSVLPEHKDPPPEVGRSFLGYASFKVGELLKSKEQLLVLSLRTSDGGKVVGTIEVSVVKMGEIEDGEADHITTDVQGQKCALVCECTAPESVSGKDNLPFLNSVLKNPVCKLYRFPTSDNKWMRIREQMSESILSFHIPKELISLHIKEDLCRNQEIKELGELSPHWDNLRKNVLTHCDQMVNMFQDILTELAKETGSSFKSSSSKGEKTLEFVPINLHLQRMQVHSPHLKDALYDVITVGAPAAHFQGFKNGGLRKLLHRFETERRNTGYQFIYYSPENTAKAKEVLSNINQLQPLIATHADLLLNSASQHSPDSLKNSLKMLSEKTELFVHAFKDQLVRSALLALYTARPGGILKKPPSPKSSTEESSPQDQPPVMRGQDSIPHHSDYDEEEWDRVWANVGKSLNCIIAMVDKLIERDGGSEGSGGNNDGEKEPSLTDAIPSHPREDWYEQLYPLILTLKDCMGEVVNRAKQSLTFVLLQELAYSLPQCLMLTLRRDIVFSQALAGLVCGFIIKLQTSLYDPGFLQQLHTVGLIVQYEGLLSTYSDEIGMLEDMPVGISDLKKVAFKIIEAKSNDVLPVITGRREHYVVEVKLPARMFESLPLQIKEGQLLHVYPVLFNVGINEQQTLAERFGDVSLQESINQENFELLQEYYKIFMEKMPPDYISHFQEQNDLKALLENLLQNIQSKKRKNVEIMWLAATICRKLNGIRFTCCKSAKDRTSMSVTLEQCSILRDEHQLHKDFFIRALDCMRREGCRIENVLKNIKCRKYAFNMLQLMAFPKYYRPPEGTYGKADT

SEQ ID NO: 1341 - DNA, 8220 bp, Homo sapien
agaggctgcggtgagtccgccagccccagctgctcctcctcaagcccccaaggcccttcggcgggcccctgctgaaagaccggcatgccctattctgtgggcttccgcgaagccgatgctgctaccagctttctgagagcagcaagatcaggtaacttggacaaagctttggatcacctgcggaatggggtagatattaacacctgtaaccagaatgggttgaatggcttgcatctggcttctaaggaaggccatgtgaaaatggtggttgaacttctgcacaaagaaatcattctagaaacgacaaccaagaaggggaacacggccctgcacatcgctgctctagccgggcaggatgaggtggtccgggagcttgtcaactatggagccaacgtcaatgcccagtcacagaaaggttttacacccctgtacatggcagcacaagagaaccacttggaagtggttaagtttttactggaaaatggagctaaccagaatgtagccacagaagacggcttcacgcctctggcggtagccctgcagcagggccatgagaacgtcgtcgcgcacctcatcaactacggcaccaaggggaaggtgcgcctcccggccctgcacatcgcggcccgcaacgacgacacgcgcacggctgcggtgctgctgcagaacgaccccaacccggacgtgctttccaagacgggattcacgcccctgcacattgcggctcactacgagaacctcaacgtggcccagttgctcctcaacagaggagccagcgtcaatttcacaccacagaacggcatcacgccactgcacatcgcctcccgcaggggcaacgtgatcatggtgcggctgctgctggatcggggagcccagatagaaaccaagaccaaggacgaattgacacctctccactgtgcagctcgaaatgggcacgtgcgaatctcagagatcctgctggaccacggggcaccaatccaagccaaaaccaagaacggcctgtccccaattcacatggcggctcagggagaccacctcgactgtgtccggctcctgttgcaatacgacgcagagatagacgacatcaccctggaccacctgaccccactccacgtggctgcccactgtggacaccacagggtggctaaggtccttctggataaaggggccaaacccaactccagagccctgaatggctttacccccttacacatcgcctgcaaaaagaaccacgtccgtgtcatggagctgctgctgaagacgggagcctcgatcgacgcggtcaccgagtctggcctgacacctctccacgtggcctccttcatggggcaccttcccatcgtgaagaacctcctgcagcggggggcgtcgcccaacgtctccaacgtgaaagtggagaccccgctacacatggcagccagagccgggcacacggaagtggccaaatatttactccagaacaaagccaaagtcaatgccaaggccaaggatgaccagaccccacttcactgtgcagctcgcatcggccacacaaacatggtgaagctcctgctggaaaataacgccaaccccaacctggccaccaccgccgggcacacccccctgcacattgcagcccgtgagggccatgtggaaacagtcctggcccttctggaaaaggaagcatcccaggcctgcatgaccaagaaaggatttacccctctgcacgtggcggccaagtacgggaaggtgcgggtggcagagctgctgctggagcgggacgcacacccgaatgctgccggaaaaaatggcctgacccccctgcacgtggccgtccatcacaacaacctggacatcgtcaagctgctgcttccccggggcggctccccgcacagccctgcctggaatggctacacccctttgcacatcgctgccaagcagaaccaggtggaggtggcccgtagtctgctgcagtatgggggctcagcaaacgccgagtcggtgcaaggtgtgacgccccttcacctggccgcccaggagggccacgcagagatggtggctctgctgctctcgaaacaagccaatggcaacctggggaacaagagcggactcactcccctccatctggtagcacaagaaggccacgttccagtggcagatgtgctgatcaaacacggtgtcatggtggacgccaccacccggatgggctacactcccctccatgtggccagtcactatggaaacatcaagctggtgaagtttctgctgcagcaccaggcagatgtcaatgccaagaccaagctaggatacagccccctgcaccaggcagcccagcagggacacacagacatcgtgactctgcttctgaaaaacggtgcttccccaaacgaggtcagctcggatggaaccacacctctggccatagccaagcgcttgggctacatttctgtcaccgacgtgctcaaggtcgtcacggatgaaaccagtttcgtgttagtcagtgataagcatcgaatgagtttccctgagacagttgatgagatcctggatgtctcggaagatgaaggggaagaactcatcagcttcaaggctgagaggcgggattccagggatgttgatgaagagaaggagctgctggattttgtgccgaagctagaccaagtggtggaatctccagccatccccaggattccctgtgccatgcctgagacagtggtgatcaggtcagaagagcaggagcaggcatctaaagagtatgatgaggactccctcatccccagcagcccggccaccgagacctcagacaacatcagcccggtggccagcccggtgcatacagggtttctggtgagcttcatggttgacgcccggggtggttccatgagaggaagtcgccacaacggcctgcgagtggtgatcccgccacggacgtgcgcagcgcccacccgcatcacctgccgcctggtcaagccccagaagctcagcacgccgcccccactggccgaggaggagggcctggccagcaggatcatagcactggggcccacgggggcacagttcctgagccctgtaatcgtggagatcccgcactttgcctcccatggccgtggagaccgcgagctcgtggttctgaggagcgaaaacggctccgtgtggaaggagcacaggagccgctatggagagagctacctggatcagatcctcaacgggatggacgaagagctggggagcctggaggagctagagaagaagagggtgtgccgaatcatcaccaccgacttcccgctgtacttcgtgatcatgtcacggctctgccaggactacgacatcatcggtcccgaagggggctccctgaagagcaagctggtgcccctggtacaggcaacgttcccggagaatgccgtcaccaagagagtgaagctggctctgcaggcccagcctgtcccggatgagcttgtcactaagctcctgggcaaccaggccacattcagccccattgtcaccgtggagccccggcgccggaagttccaccgccccattgggcttcggatcccactacctccttcctggaccgacaacccgagggacagtggggagggagacaccaccagcctgcgcctgctttgcagcgtcattggaggaacagaccaagcccagtgggaagacataacaggaaccaccaaacttgtatatgccaacgagtgcgccaacttcaccaccaatgtctctgccaggttttggctgtcggactgtcctcggactgctgaggctgtgaactttgccaccctgctgtacaaagagctcactgcagtgccctacatggccaaattcgtcatctttgccaagatgaatgacccccgagaggggcgcctgcgctgctactgcatgacagatgataaagtggacaagaccctggagcagcatgagaacttcgtggaggtggcccggagcagggacatagaggtgttggaaggaatgtccctgtttgcagaactctctgggaacctggtgcctgtgaagaaagctgcccagcagcggagcttccacttccagtcatttcgggagaaccgtctggccatgcctgtaaaggtgagggacagcagtcgagagccgggagggtccctgtcgtttctgcgcaaggcgatgaagtacgaggacacccagcacattctctgccacctgaacatcaccatgcccccctgcgctaagggaagtggagccgaagataggagaaggaccccgacgcccctggccctgcgatacagcattctcagtgagtccacaccaggttctctcagtgggacagagcaggcagagatgaagatggctgttatctcagagcacctcggtctcagctgggcagagttggcccgggagctgcagttcagtgtggaagacatcaacaggatccgagtggaaaatcccaactccctgttggagcagagtgtggccttgctgaacctctgggtcatccgtgaaggccaaaacgcaaacatggagaatctgtacacagccctgcagagcattgaccgtggcgagatcgtgaacatgctggagggttccggccgacagagccgcaacttgaagccagacaggcggcacaccgaccgcgactactcgctgtcaccctcccagatgaatggttactcctcactgcaggacgagctgctgtcccctgcctccctgggctgtgcactttcctctccgctacgtgcagaccagtactggaatgaggtggccgtcctagacgccatccccttggcggccacggagcatgacaccatgctggagatgtctgacatgcaggtgtggtctgcgggcctcacgccttctctggtcactgctgaggactcctctctggagtgtagcaaggctgaggactctgatgccacaggtcacgagtggaagttggagggggcactctcagaggaaccgcggggccccgagttgggctctctggaacttgtggaggacgacacagtggattcagatgccacaaatggccttatcgatttgcttgaacaggaggaaggtcagaggtcagaagagaagctgccaggttctaagaggcaggatgacgcgacaggtgcagggcaggactcagagaatgaagtgtctcttgtttcaggccatcagagggggcaagcccgaatcacacattcccccaccgtgagtcaggtgacggagaggagtcaggacagactgcaggactgggatgcagacggctcgattgtctcatacctgcaagatgctgcacaaggttcctggcaagaggaggtcacgcaaggtccacactcattccagggaacaagtaccatgactgaagggctagagcccggtggatctcaggagtacgagaaggtcctggtgtctgtaagtgagcacacgtggacagaacagcccgaggctgagagctcccaggccgacagggaccggaggcagcaaggccaagaagagcaggtgcaggaggccaagaacaccttcacccaagtggtgcaggggaatgagtttcagaatattccaggggagcaggtgacagaggagcaattcacggatgagcagggcaacattgtcaccaagaagatcattcgcaaggtggttcgacagatagacttgtccagcgccgatgccgcccaggagcacgaggaggtgactgtagaggggcccctggaggatcccagtgagctggaggtcgatattgattactttatgaaacactccaaggatcacacctcgacacccaacccctgaaccccacacactctgccatgcacacaggaggagagctggacctgagggccaccgcagcggtgcacacattcctctgggctgacggcatgacctctgtaagggactcctgctagtcccctcttggcatgaatgactgactgtagacgcatgacctccaggcttcaatcctgcctcttgcaatgacagctgatctgtcggaaccaggacacaaaagcagcaagaagcggggagagagagggatagaaaacaagcgcaggagagcctgcgaacgcaaaagtgaatgagggctttttgtggctggggatgggttttggttttggggttttttttttaaattgttttgacttcgtacagggtactttttcccaacctcatctgtcagaaatccatgtgggcttcctggaaagaaaaaaaaaaaaaagaaaactaggcatgaaatcagtttaacaccttaatcttaagccatgtcctcatctgcccaccctccccaacccacatacctccattccacttgtgacaccccctcgactccctggtgacgctcctcccagatcgctctacatgacattcaggacacacacacacacacacacacacacaccactcgcctccactgaatctacacacagattttactgtgacttctgaagctgtggataaattggaattttttatgttgtctctctctctgccaatttcaatacgaatcatcttccaatggaaaatcattaccttgaagagtgcattcggggttccttgtgttagggacttaagaatctgaggcgcgaggacccccaggcttacctgtaggactcaaagggagccaggaccccatctgaaagggtctcctctctcagttgggggacaggccggtggctgacccaggattgcaccagcatgtccatagagaagaggttttctatgtcttcaagcactatatcatagtccgtgttcaaagtgtaaactgtacagtaatcagccttgtgtatatgaaaaacaataaatactatgcaaaccaatagaaacatttagcagtacgtacagagcctgacagcgcagctcctgaggacttctgcggctgcaggagaaggagctgtggcctgtctttcagtgaaagaggaaggaaaggagtagggctagtgaatgtatctgccaggtcttagaagtcaggaccacccagggtctcccagagtgaacttggtgctctaagtccaggcagcctgcaggctggggaccctgggtgcaggtgccaggctcgaggctgttccctgtcctgcctcagtgcctcccctctgcccagcccctgtggcctcttggagaggcgagccagggggctccccggaccgcatggccggtgagagtagagtcggaggcggagagcctggacgcccagaggccggggccaggctctgggtcaaggcaggaaggagacagacagctggcagttcctcgcctcggtgccatcagggaggagccttaagttccactagagcctccggcccagggaggccagaatcagcacaatcccggccccgccctcgcggcgggcgcccccagggccaggagagagagacagggctggctcctctcgcccctggagccgcggtgtggacggcccggccccgtccgccccgccgctctgcgggagtgtccttcgggacacacttaaaccttccaagtagcacagaagccccctccacgtcagagccccctggccgcggggcctgtgagcggagaggggccctgcttcccacacaaatccgccccggtgcacccccggccaggcaggccccggggcggcctaggcgccttgtcggccgggggtggggctgcttttgcttcctttagaggggcgggcagggagaggaagctctagctccgggcctgagtttccccgaggctgcgtcggaggagctgcagggcgagcccggacggctgccgtctccgccagaggccaccccggcccggcctccaggcagaggcgcccccctccatcctcccccatcccgggggccacggcaggggggccgcacagcgcggctgggaccgattcggtgacggcccaaggaagctgggcgcagggctcgcctctcccgcctcgatcctgcaccttcctctcccaggtcgctgctgcagccaacccagtagcccccttagcgcccccgcggaccccgcagctccagactccgctttggcacctctgctccggctggcatggctgcacgctccggctgctagtaggagccgttaggggaggagtttggggtctccacacgatgcctagagaatgctgcagtctgcacattagacgctttttagaagttttgaaattaccttgatttttttaattgttatgaaaatggatcttttcttgactctcccacatgctctgttatgggagagaatcccctaccctactctgatgtatagaccattctcccttcaccagccgaaccaatgtcaaaattaataaagaaatggactaaggca

SEQ ID NO: 1342 - protein, 1881 aa, Homo sapien
MPYSVGFREADAATSFLRAARSGNLDKALDHLRNGVDINTCNQNGLNGLHLASKEGHVKMVVELLHKEIILETTTKKGNTALHIAALAGQDEVVRELVNYGANVNAQSQKGFTPLYMAAQENHLEVVKFLLENGANQNVATEDGFTPLAVALQQGHENVVAHLINYGTKGKVRLPALHIAARNDDTRTAAVLLQNDPNPDVLSKTGFTPLHIAAHYENLNVAQLLLNRGASVNFTPQNGITPLHIASRRGNVIMVRLLLDRGAQIETKTKDELTPLHCAARNGHVRISEILLDHGAPIQAKTKNGLSPIHMAAQGDHLDCVRLLLQYDAEIDDITLDHLTPLHVAAHCGHHRVAKVLLDKGAKPNSRALNGFTPLHIACKKNHVRVMELLLKTGASIDAVTESGLTPLHVASFMGHLPIVKNLLQRGASPNVSNVKVETPLHMAARAGHTEVAKYLLQNKAKVNAKAKDDQTPLHCAARIGHTNMVKLLLENNANPNLATTAGHTPLHIAAREGHVETVLALLEKEASQACMTKKGFTPLHVAAKYGKVRVAELLLERDAHPNAAGKNGLTPLHVAVHHNNLDIVKLLLPRGGSPHSPAWNGYTPLHIAAKQNQVEVARSLLQYGGSANAESVQGVTPLHLAAQEGHAEMVALLLSKQANGNLGNKSGLTPLHLVAQEGHVPVADVLIKHGVMVDATTRMGYTPLHVASHYGNIKLVKFLLQHQADVNAKTKLGYSPLHQAAQQGHTDIVTLLLKNGASPNEVSSDGTTPLAIAKRLGYISVTDVLKVVTDETSFVLVSDKHRMSFPETVDEILDVSEDEGEELISFKAERRDSRDVDEEKELLDFVPKLDQVVESPAIPRIPCAMPETVVIRSEEQEQASKEYDEDSLIPSSPATETSDNISPVASPVHTGFLVSFMVDARGGSMRGSRHNGLRVVIPPRTCAAPTRITCRLVKPQKLSTPPPLAEEEGLASRIIALGPTGAQFLSPVIVEIPHFASHGRGDRELVVLRSENGSVWKEHRSRYGESYLDQILNGMDEELGSLEELEKKRVCRIITTDFPLYFVIMSRLCQDYDIIGPEGGSLKSKLVPLVQATFPENAVTKRVKLALQAQPVPDELVTKLLGNQATFSPIVTVEPRRRKFHRPIGLRIPLPPSWTDNPRDSGEGDTTSLRLLCSVIGGTDQAQWEDITGTTKLVYANECANFTTNVSARFWLSDCPRTAEAVNFATLLYKELTAVPYMAKFVIFAKMNDPREGRLRCYCMTDDKVDKTLEQHENFVEVARSRDIEVLEGMSLFAELSGNLVPVKKAAQQRSFHFQSFRENRLAMPVKVRDSSREPGGSLSFLRKAMKYEDTQHILCHLNITMPPCAKGSGAEDRRRTPTPLALRYSILSESTPGSLSGTEQAEMKMAVISEHLGLSWAELARELQFSVEDINRIRVENPNSLLEQSVALLNLWVIREGQNANMENLYTALQSIDRGEIVNMLEGSGRQSRNLKPDRRHTDRDYSLSPSQMNGYSSLQDELLSPASLGCALSSPLRADQYWNEVAVLDAIPLAATEHDTMLEMSDMQVWSAGLTPSLVTAEDSSLECSKAEDSDATGHEWKLEGALSEEPRGPELGSLELVEDDTVDSDATNGLIDLLEQEEGQRSEEKLPGSKRQDDATGAGQDSENEVSLVSGHQRGQARITHSPTVSQVTERSQDRLQDWDADGSIVSYLQDAAQGSWQEEVTQGPHSFQGTSTMTEGLEPGGSQEYEKVLVSVSEHTWTEQPEAESSQADRDRRQQGQEEQVQEAKNTFTQVVQGNEFQNIPGEQVTEEQFTDEQGNIVTKKIIRKVVRQIDLSSADAAQEHEEVTVEGPLEDPSELEVDIDYFMKHSKDHTSTPNP

SEQ ID NO: 1343 - DNA, 2042 bp, Homo sapien
ggggccagtcgttcgccggaaagcatttgtctcccacctcatcataacaacaattaatttcctctggggcctgaggagggcagaatttcaaccttcggtgtgcttgggagtggcgattgtgatttacacgacaaaatgccgaggtgctcggtggagtcatggcagtgccctttgtggaagactgggacttggtgcaaaccctgggagaaggtgcctatggagaagttcaacttgctgtgaatagagtaactgaagaagcagtcgcagtgaagattgtagatatgaagcgtgccgtagactgtccagaaaatattaagaaagagatctgtatcaataaaatgctaaatcatgaaaatgtagtaaaattctatggtcacaggagagaaggcaatatccaatatttatttctggagtactgtagtggaggagagctttttgacagaatagagccagacataggcatgcctgaaccagatgctcagagattcttccatcaactcatggcaggggtggtttatctgcatggtattggaataactcacagggatattaaaccagaaaatcttctgttggatgaaagggataacctcaaaatctcagactttggcttggcaacagtatttcggtataataatcgtgagcgtttgttgaacaagatgtgtggtactttaccatatgttgctccagaacttctgaagagaagagaatttcatgcagaaccagttgatgtttggtcctgtggaatagtacttactgcaatgctcgctggagaattgccatgggaccaacccagtgacagctgtcaggagtattctgactggaaagaaaaaaaaacatacctcaacccttggaaaaaaatcgattctgctcctctagctctgctgcataaaatcttagttgagaatccatcagcaagaattaccattccagacatcaaaaaagatagatggtacaacaaacccctcaagaaaggggcaaaaaggccccgagtcacttcaggtggtgtgtcagagtctcccagtggattttctaagcacattcaatccaatttggacttctctccagtaaacagtgcttctagtgaagaaaatgtgaagtactccagttctcagccagaaccccgcacaggtctttccttatgggataccagcccctcatacattgataaattggtacaagggatcagcttttcccagcccacatgtcctgatcatatgcttttgaatagtcagttacttggcaccccaggatcctcacagaacccctggcagcggttggtcaaaagaatgacacgattctttaccaaattggatgcagacaaatcttatcaatgcctgaaagagacttgtgagaagttgggctatcaatggaagaaaagttgtatgaatcaggttactatatcaacaactgataggagaaacaataaactcattttcaaagtgaatttgttagaaatggatgataaaatattggttgacttccggctttctaagggtgatggattggagttcaagagacacttcctgaagattaaagggaagctgattgatattgtgagcagccagaaggtttggcttcctgccacatgatcggaccatcggctctggggaatcctggtgaatatagtgctgctatgttgacattattcttcctagagaagattatcctgtcctgcaaactgcaaatagtagttcctgaagtgttcacttccctgtttatccaaacatcttccaatttattttgtttgttcggcatacaaataatacctatatcttaattgtaagcaaaactttggggaaaggatgaatagaattcatttgattatttcttcatgtgtgtttagtatctgaatttgaaactcatctggtggaaaccaagtttcaggggacatgagttttccagcttttatacacacgtatctcatttttatcaaaacattttgtttaattcaaaaagtacatatttcttccatgttgatttaattctaagatgaaccaataaagacataattcttgcaaaaaaaaaaaaaaaaaaaaaaaaaa

SEQ ID NO: 1344 - protein, 476 aa, Homo sapien
MAVPFVEDWDLVQTLGEGAYGEVQLAVNRVTEEAVAVKIVDMKRAVDCPENIKKEICINKMLNHENVVKFYGHRREGNIQYLFLEYCSGGELFDRIEPDIGMPEPDAQRFFHQLMAGVVYLHGIGITHRDIKPENLLLDERDNLKISDFGLATVFRYNNRERLLNKMCGTLPYVAPELLKRREFHAEPVDVWSCGIVLTAMLAGELPWDQPSDSCQEYSDWKEKKTYLNPWKKIDSAPLALLHKILVENPSARITIPDIKKDRWYNKPLKKGAKRPRVTSGGVSESPSGFSKHIQSNLDFSPVNSASSEENVKYSSSQPEPRTGLSLWDTSPSYIDKLVQGISFSQPTCPDHMLLNSQLLGTPGSSQNPWQRLVKRMTRFFTKLDADKSYQCLKETCEKLGYQWKKSCMNQVTISTTDRRNNKLIFKVNLLEMDDKILVDFRLSKGDGLEFKRHFLKIKGKLIDIVSSQKVWLPAT

SEQ ID NO: 1345 - DNA, 2042 bp, Homo sapien; identical to SEQ ID NO: 1343

SEQ ID NO: 1346 - protein, 476 aa, Homo sapien; identical to SEQ ID NO: 1344

SEQ ID NO: 1347 - DNA, 2303 bp, Homo sapien
cccggcgtcccgtcgagcccagccccgccgggggcgctcctcgccgcccgcacgccctccccagccatgtcgtccatcctgcctttcactcccccgatcgtgaagcgcctgctgggctggaagaagggcgagcagaacgggcaggaggagaaatggtgcgagaaggcggtcaagagcctggtcaagaaactcaagaagacggggcagctggacgagctggagaaggccatcaccacgcagaacgtcaacaccaagtgcatcaccatccccaggtccctggatggccggttgcaggtgtcccatcggaaggggctccctcatgtcatctactgccgcctgtggcgatggccagacctgcacagccaccacgagctgcgggccatggagctgtgtgagttcgccttcaatatgaagaaggacgaggtctgcgtgaatccctaccactaccagagagtagagacaccagttctacctcctgtgttggtgccacgccacacagagatcccggccgagttccccccactggacgactacagccattccatccccgaaaacactaacttccccgcaggcatcgagccccagagcaatattccagagaccccaccccctggctacctgagtgaagatggagaaaccagtgaccaccagatgaaccacagcatggacgcaggttctccaaacctatccccgaatccgatgtccccagcacataataacttggacctgcagccagttacctactgcgagccggccttctggtgctccatctcctactacgagctgaaccagcgcgtcggggagacattccacgcctcgcagccatccatgactgtggatggcttcaccgacccctccaattcggagcgcttctgcctagggctgctctccaatgtcaacaggaatgcagcagtggagctgacacggagacacatcggaagaggcgtgcggctctactacatcggaggggaggtcttcgcagagtgcctcagtgacagcgctatttttgtccagtctcccaactgtaaccagcgctatggctggcacccggccaccgtctgcaagatcccaccaggatgcaacctgaagatcttcaacaaccaggagttcgctgccctcctggcccagtcggtcaaccagggctttgaggctgtctaccagttgacccgaatgtgcaccatccgcatgagcttcgtcaaaggctggggagcggagtacaggagacagactgtgaccagtaccccctgctggattgagctgcacctgaatgggcctttgcagtggcttgacaaggtcctcacccagatgggctccccaagcatccgctgttccagtgtgtcttagagacatcaagtatggtaggggagggcaggcttggggaaaatggccatacaggaggtggagaaaattggaactctactcaacccattgttgtcaaggaagaagaaatctttctccctcaactgaaggggtgcacccacctgttttctgaaacacacgagcaaacccagaggtggatgttatgaacagctgtgtctgccaaacacatttaccctttggccccactttgaagggcaagaaatggcgtctgctctggtggcttaagtgagcagaacaggtagtattacaccaccggcaccctccccccagactctttttttgagtgacagctttctgggatgtcacagtccaaccagaaacgcccctctgtctaggactgcagtgtggagttcaccttggaagggcgttctaggtaggaagagcccgcacgatgcagacctcatgcccagctctctgacgcttgtgacagtgcctcttccagtgaacattcccagcccagccccgccccgttgtgagctggatagacttgggatggggagggagggagttttgtctgtctccctcccctctcagaacatactgattgggaggtgcgtgttcagcagaacctgcacacaggacagcgggaaaaatcgatgagcgccacctctttaaaaactcacttacgttgtcctttttcactttgaaaagttggaaggactgctgaggcccagtgcatatgcaatgtatagtgtctattatcacattaatctcaaagagattcgaatgacggtaagtgttctcatgaagcaggaggcccttgtcgtgggatggcatttggtctcaggcagcaccacactgggtgcgtctccagtcatctgtaagagcttgctccagattctgatgcatacggctatattggtttatgtagtcagttgcattcattaaatcaactttatcatatgctcaaaaaaaaaaaaaag

SEQ ID NO: 1348 - protein, 425 aa, Homo sapien
MSSILPFTPPIVKRLLGWKKGEQNGQEEKWCEKAVKSLVKKLKKTGQLDELEKAITTQNVNTKCITIPRSLDGRLQVSHRKGLPHVIYCRLWRWPDLHSHHELRAMELCEFAFNMKKDEVCVNPYHYQRVETPVLPPVLVPRHTEIPAEFPPLDDYSHSIPENTNFPAGIEPQSNIPETPPPGYLSEDGETSDHQMNHSMDAGSPNLSPNPMSPAHNNLDLQPVTYCEPAFWCSISYYELNQRVGETFHASQPSMTVDGFTDPSNSERFCLGLLSNVNRNAAVELTRRHIGRGVRLYYIGGEVFAECLSDSAIFVQSPNCNQRYGWHPATVCKIPPGCNLKIFNNQEFAALLAQSVNQGFEAVYQLTRMCTIRMSFVKGWGAEYRRQTVTSTPCWIELHLNGPLQWLDKVLTQMGSPSIRCSSVS

SEQ ID NO: 1349 - DNA, 2303 bp, Homo sapien; identical to SEQ ID NO: 1347

SEQ ID NO: 1350 - protein, 425 aa, Homo sapien; identical to SEQ ID NO: 1348

SEQ ID NO: 1351 - DNA, 1638 bp, Homo sapien
ggaattccctgatatacacctggaccaccaccaatggatatacaaatggcaaacaattttactccgccctctgcaactcctcagggaaatgactgtgacctctatgcacatcacagcacggccaggatagtaatgcctctgcattacagcctcgtcttcatcattgggctcgtgggaaacttactagccttggtcgtcattgttcaaaacaggaaaaaaatcaactctaccaccctctattcaacaaatttggtgatttctgatatactttttaccaccgctttgcctacacgaatagcctactatgcaatgggctttgactggagaatcggagatgccttgtgtaggataactgcgctagtgttttacatcaacacatatgcaggtgtgaactttatgacctgcctgagtattgaccgcttcattgctgtggtgcaccctctacgctacaacaagataaaaaggattgaacatgcaaaaggcgtgtgcatatttgtctggattctagtatttgctcagacactcccactcctcatcaaccctatgtcaaagcaggaggctgaaaggattacatgcatggagtatccaaactttgaagaaactaaatctcttccctggattctgcttggggcatgtttcataggatatgtacttccacttataatcattctcatctgctattctcagatctgctgcaaactcttcagaactgccaaacaaaacccactcactgagaaatctggtgtaaacaaaaaggctctcaacacaattattcttattattgttgtgtttgttctctgtttcacaccttaccatgttgcaattattcaacatatgattaagaagcttcgtttctctaatttcctggaatgtagccaaagacattcgttccagatttctctgcactttacagtatgcctgatgaacttcaattgctgcatggacccttttatctacttctttgcatgtaaagggtataagagaaaggttatgaggatgctgaaacggcaagtcagtgtatcgatttctagtgctgtgaagtcagcccctgaagaaaattcacgtgaaatgacagaaacgcagatgatgatacattccaagtcttcaaatggaaagtgaaatggattgtattttggtttatagtgacgtaaactgtatgacaaactttgcaggacttcccttataaagcaaaataattgttcagcttccaattagtattcttttatatttctttcattgggcactttcccatctccaactcggaagtaagcccaagagaacaacataaagcaaacaacataaagcacaataaaaatgcaaataaatattttcatttttatttgtaaacgaatacaccaaaaggaggcgctcttaataactcccaatgtaaaaagttttgttttaataaaaaatttaattattatttcttgccaacaaatggctagaaaggactgaatagattatatattgccagatgttaatactgtaacatactttttaaataacatatttcttaaatccaaatttctctcaatgttagatttaattccctcaataacaccaatgttttgttttgtttcgttctgggtcataaaactttgttaaggaactcttttggaataaagagcaggatgctgc

SEQ ID NO: 1352 - protein, 361 aa, Homo sapien [sequence omitted]

SEQ ID NO: 1353 - DNA, 2201 bp, Homo sapien
caactacgagccacgagtttgcagatggggctgctcggcggcgcctgtggctgagggagagcagcggcggcggggagcgaccgggagcggcggcagcggcggcgcggaggcggctgaggtgcgagccggactaaatcattttgctactttaaaaaaatcacgaaagtacattatttgaagtttggagaagaaagggatttggtaacaaaggacagccatttccattttaagcagctaaacagcaggagagatttctgtaagaaggtaccagctcagattccattgttcatcattttgcaatgcagcaagtcttggaaaaccttacggagctgccctcgtctactggagcagaagaaatagacctaattttcctcaagggaattatggagaatcctattgtaaaatcacttgctaaggctcatgagaggctagaagattccaaactagaagctgtcagtgacaataacttggaattagtcaatgaaattcttgaagacatcactcctctaataaatgtggatgaaaatgtggcagaattggttggtatactcaaagaacctcacttccagtcactgttggaggcccatgatattgtggcatcaaagtgttatgattcacctccatcaagcccagaaatgaataattcttctatcaataatcagttattaccagtagatgccattcgtattcttggtattcacaaaagagctggggaaccactgggtgtgacatttagggttgaaaataatgatctggtaattgcccgaatcctccatgggggaatgatagatcgacaaggtctacttcatgtgggagatataattaaagaagtcaatggccatgaggttggaaataatccaaaggaattacaagaattactgaaaaatattagtggaagtgtcaccctaaaaatcttaccaagttatagagataccattactcctcaacaggtatttgtgaagtgtcattttgattataatccatacaatgacaacctaataccttgcaaagaagcaggattgaagttttccaaaggagaaattcttcagattgtaaatagagaagatccaaattggtggcaggctagccatgtaaaagagggaggaagcgctggtctcattccaagccagttcctggaagagaagagaaaggcatttgttagaagagactgggacaattcaggacctttttgtggaactataagtagcaaaaaaaagaaaaagatgatgtatctcacaaccagaaatgcagaatttgatcgtcatgaaatccagatatatgaggaggtagccaaaatgcctcccttccagagaaaaacattagtattgataggagctcaaggtgtaggccgaagaagcttgaaaaacaggttcatagtattgaatcccactagatttggaactacggtgccatttacttcacggaaaccaagggaagatgaaaaagatggccaggcatataagtttgtgtcacgatctgagatggaagcagatattaaagctggaaagtatttggaacatggggaatatgaaggaaatctctatggaaccaaaattgattctattcttgaggttgtccaaactggacggacttgcattctggatgtcaacccacaagcactgaaagtattgaggacatcagagtttatgccctatgtggtatttattgcggctccggagctagagacgttacgtgccatgcacaaggctgtggtggatgcaggaatcactaccaagcttctgaccgactctgacttgaagaaaacagtggatgaaagtgcacggattcagagagcatacaaccactattttgatttgatcatcataaatgataatctagacaaagcctttgaaaaactgcaaactgccatagagaaactgagaatggaaccacagtgggtcccaatcagctgggtttactgatgattcagtaaggttaacaatgaaaattaaactcttaaaaagtgactgcaacaaataaaccttctactgagaaaatacatcacagatagaagattatctgctaagtccaggcatttttatggtgtagattgaaataatagtacacttctgaatttttatataaaatgtggttggaaggtgtactaatatataatttatcttaatttttctaactttgtatggataatctttctattcatatcacataaagaaatgcgttgaagcaaaaaaaaaaaaaaa

SEQ ID NO: 1354 - protein, 540 aa, Homo sapien
MQQVLENLTELPSSTGAEEIDLIFLKGIMENPIVKSLAKAHERLEDSKLEAVSDNNLELVNEILEDITPLINVDENVAELVGILKEPHFQSLLEAHDIVASKCYDSPPSSPEMNNSSINNQLLPVDAIRILGIHKRAGEPLGVTFRVENNDLVIARILHGGMIDRQGLLHVGDIIKEVNGHEVGNNPKELQELLKNISGSVTLKILPSYRDTITPQQVFVKCHFDYNPYNDNLIPCKEAGLKFSKGEILQIVNREDPNWWQASHVKEGGSAGLIPSQFLEEKRKAFVRRDWDNSGPFCGTISSKKKKKMMYLTTRNAEFDRHEIQIYEEVAKMPPFQRKTLVLIGAQGVGRRSLKNRFIVLNPTRFGTTVPFTSRKPREDEKDGQAYKFVSRSEMEADIKAGKYLEHGEYEGNLYGTKIDSILEVVQTGRTCILDVNPQALKVLRTSEFMPYVVFIAAPELETLRAMHKAVVDAGITTKLLTDSDLKKTVDESARIQRAYNHYFDLIIINDNLDKAFEKLQTAIEKLRMEPQWVPISWVY

SEQ ID NO: 1355 - DNA, 1585 bp, Homo sapien
acagcagttacactgcggcgggcgtctgttctagtgtttgagccgtcgtgcttcaccggtctacctcgctagcatgtcgggccgcggcaagactggcggcaaggcccgcgccaaggccaagtcgcgctcgtcgcgcgccggcctccagttcccagtgggccgtgtacaccggctgctgcggaagggccactacgccgagcgcgttggcgccggcgcgccagtgtacctggcggcagtgctggagtacctcaccgctgagatcctggagctggcgggcaatgcggcccgcgacaacaagaagacgcgaatcatcccccgccacctgcagctggccatccgcaacgacgaggagctcaacaagctgctgggcggcgtgacgatcgcccagggaggcgtcctgcccaacatccaggccgtgctgctgcccaagaagaccagcgccaccgtggggccgaaggcgccctcgggcggcaagaaggccacccaggcctcccaggagtactaagagggcccgcgccgcggccggccgccccagctccccatgccaccacaaaggcccttttaagggccaccaccgccctcatggaaagagctgagccgcttcagactgcggggcaagcgggccgcggctcccttcccctcccctcccctcgcccgccttcgccgcccggcctcgagtccccgcccgcccccgctcccgtcccgcaccgcctgccgcgtcggcctcgggcctgccctgtccgccgtccgccctccggtagggttcgggccttccggatgcggcttgggcgctcttcggggacctccgtggcgcggaagacccgagcctgccggggggaggccggcggcgccgcacctgcccgcctcggcgttcgtgactcagccgccccatcccgagtcgctaaggggctgcggggaggccgcagcaccttctggaagacttggccttccgctctgacgcagggccgaggtgggcagtccaggccgagagccggcggccctgaaggtgagtgaggccctcggcagctgcagccggggtgtctggtacccccccggcgtggtgcttagcccaggactttcagacggccgctggccgggaggctttggtgggagagacgcgatcgccgatttcggtctggcgccccttctgcggccgggacccaggcctttcacatcagctctccctccatcttcattcataggtctgcgctggggccgggacgaagcacttggtaacaggcacatcttcctcccgagtgactgcctcctaggaggacatttaggggagggcagaggcctgcagtttggcttcacggctggctatgtggacagcaagagtcgttttgcggaacgcgactggcagccaggcctgtcgggcccccgacgccgccccatttcccttccagcaaactcaactcggcaatccaagcacctagataccagcacaagtcggttaatccctgtctggactgagcctccgttggcttctgaactggaattctgcagctaacccttccacgactagaaccttaggcattggggagttttagatggactaattttattaaaggattgtttttttttt

SEQ ID NO: 1356 - protein, 143 aa, Homo sapien
MSGRGKTGGKARAKAKSRSSRAGLQFPVGRVHRLLRKGHYAERVGAGAPVYLAAVLEYLTAEILELAGNAARDNKKTRIIPRHLQLAIRNDEELNKLLGGVTIAQGGVLPNIQAVLLPKKTSATVGPKAPSGGKKATQASQEY

SEQ ID NO: 1357 - DNA, 1579 bp, Homo sapien
aaaacactaaggggagcgcgcgaagctgaacttggcgctcgatgggggccgttagccgccctagagcgcgcggagccgcagaggcgtagctggactacaacgcagtgcatctcgggaggccaactcgactggactgggtgagaggacagaggtggctcgatgggcggcccgaaggccggggatcatggcgggaaggcgggcccagccaggttcagccccgccccgacccgccgctccccacccccggccggcctcgcgtgccttcccgcagcactgccgtccccgggatgctgagcgcccaccgtctccccgcagccccctcatgcccggctgcgagctgcccgtgggcacctgcccggacatgtgcccggccgccgagcgcgcccagcgcgaaagggagcaccgcctgcaccgcttggaggtggtgccgggttgccgccaggacccgccccgcgcggatccgcagcgcgcggtgaaggagtacagccgacccgccgccggcaagccccggcccccgcccagccagttgcgtccgccctccgtgctgctggccaccgtgcgctacctggccggtgaggtggcggagagcgccgacatcgcccgcgccgaggtggccagcttcgtggcagaccgcttgcgagctgtgcgcctggacctggcgctgcagggagcgggcgacgccgaggcagcggtggtgctggaggcggcgctggccacgctgctggccgtagtggcgcggctcgggcccgacgcggcgcggggacccgcggacccggtgctgctgcaggcccaggtgcaggagggcttcggctcgctgcggcgctgctacgcgcggggcgccgggccgcacccccgccaacccgccttccagggcctctttctgctctataacctgggtgagtcgggatcctggcggctgggcagagcgtggggacaggagcccaccatgacagtggaggctcggtggaagccctgcatgaggttctacagctgcctgctgccctgcgcgcctgcccgcccctccgcaaggccttggcggtagatgctgccttccgagagggcaatgctgcccgcctgttccgtctgctccagaccctgccctacctgccaagttgcgctgtgcagtgccatgtgggccatgcccgccgggaagccctggcccgcttcgctcgtgcctttagcacccccaagggccagaccttgcctctgggcttcatggtcaacctcttggccctggatggactcagggaagcacgggacctgtgccaggcccacgggctgcccttggacggagaggagagagttgtgttcctgaggggtcgctacgtggaggaagggctaccgcctgccagtacgtgcaaggtgttagtggagagcaaacttcgaggacgtaccctggaggaggtggtcatggcagaggaggaagatgagggcacggacagacctgggtccccagcctgaggagggagcgtgagcctcccagagccccaggactgggccagagcacttaggtttctttttccatggtttccaggtaataaaaggaacttgttttgttggtaaaaaaaaaaaaaaaaaa

SEQ ID NO: 1358 - protein, 285 aa, Homo sapien
MAGRRAQPGSAPPRPAAPHPRPASRAFPQHCRPRDAERPPSPRSPLMPGCELPVGTCPDMCPAAERAQREREHRLHRLEVVPGCRQDPPRADPQRAVKEYSRPAAGKPRPPPSQLRPPSVLLATVRYLAGEVAESADIARAEVASFVADRLRAVRLDLALQGAGDAEAAVVLEAALATLLAVVARLGPDAARGPADPVLLQAQVQEGFGSLRRCYARGAGPHPRQPAFQGLFLLYNLGESGSWRLGRAWGQEPTMTVEARWKPCMRFYSCLLPCAPARPSARPWR

SEQ ID NO: 1359 - DNA, 1311 bp, Homo sapien
gtaagtctgctggcctccgccatcttagtaaagtaacagtcccatgaaacaaagatgcagtcgggcactcactggagagttctgggcctctgcctcttatcagttggcgtttgggggcaagatggtaatgaagaaatgggtggtattacacagacaccatataaagtctccatctctggaaccacagtaatattgacatgccctcagtatcctggatctgaaatactatggcaacacaatgataaaaacataggcggtgatgaggatgataaaaacataggcagtgatgaggatcacctgtcactgaaggaattttcagaattggagcaaagtggttattatgtctgctaccccagaggaagcaaaccagaagatgcgaacttttatctctacctgagggcaagagtgtgtgagaactgcatggagatggatgtgatgtcggtggccacaattgtcatagtggacatctgcatcactgggggcttgctgctgctggtttactactggagcaagaatagaaaggccaaggccaagcctgtgacacgaggagcgggtgctggcggcaggcaaaggggacaaaacaaggagaggccaccacctgttcccaacccagactatgagcccatccggaaaggccagcgggacctgtattctggcctgaatcagagacgcatctgaccctctggagaacactgcctcccgctggcccaggtctcctctccagtccccctgcgactccctgtttcctgggctagtcttggaccccacgagagagaatcgttcctcagcctcatggtgaactcgcgccctccagcctgatcccccgctccctcctccctgccttctctgctggtacccagtcctaaaatattgctgcttcctcttcctttgaagcatcatcagtagtcacaccctcacagctggcctgccctcttgccaggatatttatttgtgctattcactcccttccctttggatgtaacttctccgttcagttccctccttttcttgcatgtaagttgtcccccatcccaaagtattccatctacttttctatcgccgtccccttttgcagccctctctggggatggactgggtaaatgttgacagaggccctgccccgttcacagatcctggccctgagccagccctgtgctcctccctcccccaacactccctaccaaccccctaatcccctactccctccaaccccccctcccactgtaggccactggatggtcatttggcatctccgtatatgtgctctggctcctcagctgagagagaaaaaaataaactgtatttggctgc

SEQ ID NO: 1360 - protein, 207 aa, Homo sapien
MQSGTHWRVLGLCLLSVGVWGQDGNEEMGGITQTPYKVSISGTTVILTCPQYPGSEILWQHNDKNIGGDEDDKNIGSDEDHLSLKEFSELEQSGYYVCYPRGSKPEDANFYLYLRARVCENCMEMDVMSVATIVIVDICITGGLLLLVYYWSKNRKAKAKPVTRGAGAGGRQRGQNKERPPPVPNPDYEPIRKGQRDLYSGLNQRRI

SEQ ID NO: 1361 - DNA, 799 bp, Homo sapien
cactcccaaagaactgggtactcaacactgagcagatctgttctttgagctaaaaaccatgtgctgtaccaagagtttgctcctggctgctttgatgtcagtgctgctactccacctctgcggcgaatcagaagcagcaagcaactttgactgctgtcttggatacacagaccgtattcttcatcctaaatttattgtgggcttcacacggcagctggccaatgaaggctgtgacatcaatgctatcatctttcacacaaagaaaaagttgtctgtgtgcgcaaatccaaaacagacttgggtgaaatatattgtgcgtctcctcagtaaaaaagtcaagaacatgtaaaaactgtggcttttctggaatggaattggacatagcccaagaacagaaagaaccttgctggggttggaggtttcacttgcacatcatggagggtttagtgcttatctaatttgtgcctcactggacttgtccaattaatgaagttgattcatattgcatcatagtttgctttgtttaagcatcacattaaagttaaactgtattttatgttatttatagctgtaggttttctgtgtttagctatttaatactaattttccataagctattttggtttagtgcaaagtataaaattatatttgggggggaataagattatatggactttcttgcaagcaacaagctattttttaaaaaaactatttaacattcttttgtttatattgttttgtctcctaaattgttgtaattgcattataaaataagaaaaacattaataagacaaatatt

SEQ ID NO: 1362 - protein, 96 aa, Homo sapien
MCCTKSLLLAALMSVLLLHLCGESEAASNFDCCLGYTDRILHPKFIVGFTRQLANEGCDINAIIFHTKKKLSVCANPKQTWVKYIVRLLSKKVKNM

SEQ ID NO: 1363 - DNA, 634 bp, Homo sapien
cggctgagaggcagcgaactcatctttgccagtacaggagcttgtgccgtggcccacagcccacagcccacagccatgggctgggacctgacggtgaagatgctggcgggcaacgaattccaggtgtccctgagcagctccatgtcggtgtcagagctgaaggcgcagatcacccagaagattggcgtgcacgccttccagcagcgtctggctgtccacccgagcggtgtggcgctgcaggacagggtcccccttgccagccagggcctgggccctggcagcacggtcctgctggtggtggacaaatgcgacgaacctctgagcatcctggtgaggaataacaagggccgcagcagcacctacgaggtccggctgacgcagaccgtggcccacctgaagcagcaagtgagcgggctggagggtgtgcaggacgacctgttctggctgaccttcgaggggaagcccctggaggaccagctcccgctgggggagtacggcctcaagcccctgagcaccgtgttcatgaatctgcgcctgcggggaggcggcacagagcctggcgggcggagctaagggcctccaccagcatccgagcaggatcaagggccggaaataaaggctgttgtaagagaat

SEQ ID NO: 1364 - protein, 165 aa, Homo sapien
MGWDLTVKMLAGNEFQVSLSSSMSVSELKAQITQKIGVHAFQQRLAVHPSGVALQDRVPLASQGLGPGSTVLLVVDKCDEPLSILVRNNKGRSSTYEVRLTQTVAHLKQQVSGLEGVQDDLFWLTFEGKPLEDQLPLGEYGLKPLSTVFMNLRLRGGGTEPGGRS

SEQ ID NO: 1365 - DNA, 1232 bp, Homo sapien
gccaccaccagtattggggatgctgagctgcggggtacgggcctgaggagggatgggagtaagaagtgctgtggaaaccgtcaggccatgaaccaggctgaccctcggctcagagcagtgtgcttgtggactctcacatctgcagccatgagcagaggcgacaactgcacggatctactcgcactgggaatcccctccataacccaggcctggggactgtgggtcctcttaggggctgtgacgctgctatttctcatctcgctggctgcacacttgtcccagtggaccaggggccggagcaggagccatccggggcagggacgctctggagagtctgtggaagaggtcccgctgtatgggaacctgcattatctacagacaggacggctgtctcaagacccagagccagaccagcaggatccaactcttggaggccctgccagggctgcagaggaggtgatgtgctataccagcctgcagctgcggcctcctcagggtcggatccccggtcctggaacccccgtcaagtactcggaggtggtgctggactctgagccaaagtcccaggcctcgggccccgagccggagctctatgcctcagtatgtgcccagacccgcagggcccgggcctccttcccggatcaggcctatgccaacagccagcctgcagccagctgagatggagggcctggcacagcggggcgtgcactgccccagccccccgtagcaggggcatgactgtttcccaaccagcacccaaagacgggctgccattgccaagtcacaggatgtgatctaccccggacttcctatctgagcttcaagggagacatctcagggcaaagctttcgtgatggaggaggcaaagacagtagccccctccttatttcttttttctatctgttcctcttagcccccaaactcccaggttctcacttccttcttctggagtttaaccagatcctccccacccccgctccctcatagtctacccccacgcctcagtgtctcctcaggcacaggaagtgggcggtgggggaggggtaagggcctgacagtgggtgggtgggtatattcctcaggagtccacagactggagtggacctggaacttagagacgggagggacccgagcctggcttttgacctaagaaccctagcaggagaatacagtctccatcctgctgtctctgtcctgtcccaagttttcaaataaaactttccaaaaaagtg

SEQ ID NO: 1366 - protein, 196 aa, Homo sapien
MNQADPRLRAVCLWTLTSAAMSRGDNCTDLLALGIPSITQAWGLWVLLGAVTLLFLISLAAHLSQWTRGRSRSHPGQGRSGESVEEVPLYGNLHYLQTGRLSQDPEPDQQDPTLGGPARAAEEVMCYTSLQLRPPQGRIPGPGTPVKYSEVVLDSEPKSQASGPEPELYASVCAQTRRARASFPDQAYANSQPAAS

SEQ ID NO: 1367 - DNA, 15359 bp, Homo sapien
tctacctcgcgggtgcctctggtgtctccagaggtctccgaccccagcccgcccccagccctcccgcccagcccgcagccccctccctctgttccccgacctcagaccctgggcttccgacctcgacatcatgggtgacgcagaaggcgaagacgaggtccagttcctgcggacggacgatgaggtggtcctgcagtgcagcgctaccgtgctcaaggagcagctcaagctctgcctggccgccgagggcttcggcaaccgcctgtgcttcctggagcccactagcaacgcgcagaatgtgccccccgatctggccatctgttgcttcgtcctggagcagtccctgtctgtgcgagccctgcaggagatgctggctaacacggtggaggctggcgtggagtcatcccagggcgggggacacaggacgctcctgtatggccatgccatcctgctccggcatgcacacagccgcatgtatctgagctgcctcaccacctcccgctccatgactgacaagctggccttcgatgtgggactgcaggaggacgcaacaggagaggcttgctggtggaccatgcacccagcctccaagcagaggtctgaaggagaaaaggtccgcgttggggatgacatcatccttgtcagtgtctcctccgagcgctacctgcacctgtcgaccgccagtggggagctccaggttgacgcttccttcatgcagacactgtggaacatgaaccccatctgctcccgctgcgaagagggcttcgtgacgggaggtcacgtcctccgcctctttcatggacatatggatgagtgtctgaccatttcccctgctgacagtgatgaccagcgcagacttgtctactatgaggggggagctgtgtgcactcatgcccgctccctctggaggctggagccactgagaatcagctggagtgggagccacctgcgctggggccagccactccgagtccggcatgtcactaccgggcagtacctagcgctcaccgaggaccagggcctggtggtggttgacgccagcaaggctcacaccaaggctacctccttctgcttccgcatctccaaggagaagctggatgtggcccccaagcgggatgtggagggcatgggcccccctgagatcaagtacggggagtcactgtgcttcgtgcagcatgtggcctcaggactgtggctcacctatgccgctccagaccccaaggccctgcggctcggcgtgctcaagaagaaggccatgctgcaccaggagggccacatggacgacgcactgtcgctgacccgctgccagcaggaggagtcccaggccgcccgcatgatccacagcaccaatggcctatacaaccagttcatcaagagcctggacagcttcagcgggaagccacggggctcggggccacccgctggcacggcgctgcccatcgagggcgttatcctgagcctgcaggacctcatcatctacttcgagcctccctccgaggacttgcagcacgaggagaagcagagcaagctgcgaagcctgcgcaaccgccagagcctcttccaggaggaggggatgctctccatggtcctgaattgcatagaccgcctaaatgtctacaccactgctgcccactttgctgagtttgcaggggaggaggcagccgagtcctggaaagagattgtgaatcttctctatgaactcctagcttctctaatccgtggcaatcgtagcaactgtgccctcttctccacaaacttggactggctggtcagcaagctggatcggctggaggcctcgtctggcatcctggaggtcctgtactgtgtcctcattgagagtccagaggttctgaacatcatccaggagaatcacatcaagtccatcatctccctcctggacaagcatgggaggaaccacaaggtcctggacgtgctatgctccctgtgtgtgtgtaatggtgtggctgtacgctccaaccaagatcttattactgagaacttgctgcctggccgtgagcttctgctgcagacaaacctcatcaactatgtcaccagcatccgccccaacatctttgtgggccgagcggaaggcaccacgcagtacagcaaatggtactttgaggtgatggtggacgaggtgactccatttctgacagctcaggccacccacttgcgggtgggctgggccctcaccgagggctacaccccctaccctggggccggcgagggctggggcggcaacggggtcggcgatgacctctattcctacggctttgatggactgcatctctggacaggacacgtggcacgcccagtgacttccccagggcagcacctcctggcccctgaagacgtgatcagctgctgcctggacctcagcgtgccgtccatctccttccgcatcaacggctgccctgtgcagggtgtctttgagtccttcaacctggacgggctcttcttccctgttgtcagcttctcggctggtgtcaaggtgcggttcctccttggtggccgccatggtgaattcaagttcctgcccccacctggctatgctccatgccatgaggctgtgctccctcgagagcgactccatcttgaacccatcaaggagtatcgacgggaggggccccgggggcctcacctggtgggccccagtcgctgcctctcacacaccgacttcgtgccctgccctgtggacactgtccagattgtcctgccgccccatctggagcgcattcgggagaagctggcggagaacatccacgagctctgggcgctaacccgcatcgagcagggctggacctacggcccggttcgggatgacaacaagaggctgcacccgtgtcttgtggacttccacagccttccagagcctgagaggaactacaacctgcagatgtctggggagacgctcaagactctgctggctctgggctgccacgtgggcatggcggatgagaaggcggaggacaacctgaagaagacaaaactccccaagacgtatatgatgagcaatgggtacaagccggctccgctggacctgagccacgtgcggctgacgccggcgcagacaacactggtggaccgtctggcagaaaatgggcacaacgtgtgggcccgagaccgcgtgggccagggctggagctacagcgcagtgcaggacatcccagcgcgccgaaaccctcggctggtgccctaccgcctgctggatgaagccaccaagcgcagcaaccgggacagcctctgccaggccgtgcgcaccctcctgggctacggctacaacatcgagcctcctgaccaggagcccagtcaggtggagaaccagtctcgttgtgaccgggtgcgcatcttccgggcagagaaatcctatacagtgcagagcggccgctggtacttcgagtttgaagcagtcaccacaggcgagatgcgcgtgggctgggcgaggcccgagctgaggcctgatgtagagctgggagctgacgagctggcctatgtcttcaatgggcaccgcggccagcgctggcacttgggcagtgaaccatttgggcgcccctggcagccgggcgatgtcgttggctgtatgatcgacctcacagagaacaccattatcttcaccctcaatggcgaggtcctcatgtctgactcaggctccgaaacagccttccgggagattgagattggggacggcttcctgcccgtctgcagcttgggacctggccaggtgggtcatctgaacctgggccaggacgtgagctctctgaggttctttgccatctgtggcctccaggaaggcttcgagccatttgccatcaacatgcagcgcccagtcaccacctggttcagcaaaggcctgccccagtttgagccagtgccccttgaacaccctcactatgaggtatcccgagtggacggcactgtggacacgcccccctgcctgcgcctgacccaccgcacctggggctcccagaacagcctggtggagatgcttttcctgcggctgagcctcccagtccagttccaccagcacttccgctgcactgcaggggccaccccgctggcacctcctggcctgcagccccccgccgaggacgaggcccgggcggcggaacccgaccctgactacgaaaacctgcgccgctcagctgggggctggagcgaggcagagaacggcaaagaagggactgcgaaggagggcgcccccgggggcaccccgcaggcggggggagaggcgcagcccgccagggcggagaatgagaaggatgccaccaccgagaagaacaagaagagaggcttcttattcaaggccaagaaggtcgccatgatgacccagccaccggccacccccacgctgccccgactccctcacgacgtggtgcctgcagacaaccgcgatgaccccgagatcatcctcaacaccaccacgtactattactccgtgagggtctttgctggacaggagcccagctgcgtgtgggcgggctgggtcacccctgactaccatcagcacgacatgagcttcgacctcagcaaggtccgggtcgtgacggtgaccatgggggatgaacaaggcaacgtccacagcagcctcaagtgtagcaactgctacatggtgtggggcggagactttgtgagtcccgggcagcagggccggatcagccacacggaccttgtcattgggtgcctggtggacttggccactggcttaatgacctttacagccaatggcaaagagagcaacacctttttccaggtggaacccaacactaagctatttcctgccgtcttcgtcctgcccacccaccagaacgtcatccagtttgagctggggaagcagaagaacatcatgccgttgtcagccgccatgttccaaagcgagcgcaagaacccggccccgcagtgcccaccgcggctggagatgcagatgctgatgccagtgtcctggagccgcatgcccaaccacttcctgcaggtggagacgaggcgtgccggcgagcggctgggctgggccgtgcagtgccaggagccgctgaccatgatggcgctgcacatccccgaggagaaccggtgcatggacatcctggagctgtcggagcgcctggacctgcagcgcttccactcgcacaccctgcgcctctaccgcgctgtgtgcgccctgggcaacaatcgcgtggcgcacgctctgtgcagccacgtagaccaagctcagctgctgcacgccctggaggacgcgcacctgccaggcccactgcgcgcaggctactatgacctcctcatcagcatccacctcgaaagtgcctgccgcagccgccgctccatgctctctgaatacatcgtgcccctcacgcctgagacccgcgccatcacgctcttccctcctggaaggagcacagaaaatggtcacccccggcatggcctgccgggagttggagtcaccacttcgctgaggcccccgcatcatttctcgcccccctgtttcgtggccgctctgccagctgctggggcagcagaggccccggcccgcctcagccctgccatcccgctggaggccctgcgggacaaggcactgaggatgctgggggaggcggtgcgcgacggtgggcagcacgctcgcgaccccgtcggggcctccgtggagttccagtttgtgcctgtgctcaagctcgtgtccaccctgctggtgatgggcatctttggcgatgaggatgtgaaacagatcttgaagatgattgagcctgaggtcttcactgaggaagaggaggaggaggacgaggaggaagagggtgaagaggaagatgaggaggagaaggaggaggatgaggaggaaacagcacaggaaaaggaagatgaggaaaaagaggaagaggaggcagcagaaggggagaaagaagaaggcttggaggaagggctgctccagatgaagttgccagagtctgtgaagttacagatgtgccacctgctggagtatttctgtgaccaagagctgcagcaccgtgtggagtccctggcagcctttgcggagcgctatgtggacaagctccaggccaaccagcggagccgctatggcctcctcataaaagccttcagcatgaccgcagcagagactgcaagacgtacccgtgagttccgctccccaccccaggaacagatcaatatgctattgcaattcaaagatggtacagatgaggaagactgtcctctccctgaagagattcgacaggatttgcttgactttcatcaagacctgctggcacactgtggaattcagctagatggagaggaggaggaaccagaggaagagaccaccctgggcagccgcctcatgagcctgttggagaaagtgcggctggtgaagaagaaggaagagaaacctgaggaggagcggtcagcagaggagagcaaaccccggtccctgcaggagctggtgtcccacatggtggtgcgctgggcccaagaggacttcgtgcagagccccgagctggtgcgggccatgttcagcctcctgcaccggcagtacgacgggctgggtgagctgctgcgtgccctgccgcgggcgtacaccatctcaccgtcctccgtggaagacaccatgagcctgctcgagtgcctcggccagatccgctcgctgctcatcgtgcagatgggcccccaggaggagaacctcatgatccagagcatcgggaacatcatgaacaacaaagtcttctaccaacacccgaacctgatgagggcgctgggcatgcacgagacggtcatggaggtcatggtcaacgtcctcgggggcggcgagtccaaggagatccgcttccccaagatggtgacaagctgctgccgcttcctctgctatttctgccgaatcagccggcagaaccagcgctccatgtttgaccacctgagctacctgctggagaacagtggcatcggcctgggcatgcagggctccacgcccctggacgtggctgctgcctccgtcattgacaacaatgagctggccttggcattgcaggagcaggacctggaaaaggttgtgtcctacctggcaggctgtggcctccagagctgccccatgcttgtggccaaagggtacccagacattggctggaacccctgtggtggagagcgctacctggacttcctgcgctttgctgtcttcgtcaacggcgagagcgtggaggagaacgccaatgtggtggtgcggctgctcatccggaagcctgagtgcttcggacccgccctgcggggtgagggtggctcagggctgctggctgccatcgaagaggccatccgcatctccgaggaccctgcgagggatggcccaggcatccgcagggaccggcggcgcgagcactttggtgaggaaccgcctgaagaaaaccgggtgcacctgggacacgccatcatgtccttctatgccgccttgatcgacctgctcggacgctgtgcaccagagatgcatctaatccaagccggcaagggtgaggccctgcggatccgcgccatcctccgctcccttgtgcccttggaggaccttgtgggcatcatcagcctcccactgcagattcccaccctgggcaaagatggggctctggtgcagccaaagatgtcagcatccttcgtgccggaccacaaggcgtccatggtgctcttcctggaccgtgtgtatggcatcgagaaccaggacttcttgctgcacgtgctggacgtggggttcctgcccgacatgagggcagccgcctcgctggacacggccactttcagcaccaccgagatggcgctggccgtgaaccgctacctgtgcctggccgtgctgccgctcatcaccaagtgtgcgccgctctttgcgggcacagaacaccgcgccatcatggtggactctatgctgcataccgtgtaccgcctgtctcggggtcgttcgctcaccaaggcgcagcgtgacgtcatcgaggactgcctcatgtcgctctgcaggtacatccgcccgtcgatgctgcagcacctgttgcgccgcctggtgttcgacgtgcccatcctcaacgagttcgccaagatgccactcaagctcctcaccaaccactatgagcgctgttggaagtactactgcctacccacgggctgggccaacttcggggtcacctcagaggaggagctgcacctcacacggaaactcttctggggcatctttgactctctggcccataagaaatacgacccggagctgtaccgcatggccatgccttgtctgtgcgccattgccggggctctgccccccgactatgtggatgcctcatactcatctaaggcagagaaaaaggccacagtggatgctgaaggcaactttgatccccggcctgtggagaccctcaatgtgatcatcccggagaagctggactccttcattaacaagtttgcggagtacacacacgagaagtgggccttcgacaagatccagaacaactggtcctatggagagaacatagacgaggagctgaagacccaccccatgctgaggccctacaagaccttttcagagaaggacaaagagatttaccgctggcccatcaaggagtccctgaaggccatgattgcctgggaatggacgatagagaaggccagggagggtgaggaggagaagacggaaaagaaaaaaacgcggaagatatcacaaagtgcccagacctatgatcctcgagaaggctacaaccctcagccccccgaccttagtgctgttaccctgtcccgggagctgcaggccatggcagaacaactggcagaaaattaccacaacacgtggggacggaagaagaagcaggagctggaagccaaaggcggtgggacccaccccctgctggtcccctacgacacgctcacggccaaggagaaggcacgagatcgagagaaggcccaggagctactgaaattcctgcagatgaatggctacgcggttacaagaggccttaaggacatggaactggactcgtcttccattgaaaagcggtttgcctttggcttcctgcagcagctgctgcgctggatggacatttctcaggagttcattgcccacctggaggctgtggtcagcagtgggcgagtggaaaagtccccacatgaacaggagattaaattctttgccaagatcctgctccctttgatcaaccagtacttcaccaaccactgcctctatttcttgtccactccggctaaagtgctgggcagcggtggccacgcctctaacaaggagaaggaaatgatcaccagcctcttctgcaaacttgctgctctcgtccgccaccgagtctctctctttgggacagacgccccagctgtggtcaactgtcttcacatcctggcccgctccctggatgccaggacagtgatgaagtcaggccctgagatcgtgaaggctggcctccgctccttcttcgagagtgcctcggaggacatcgagaagatggtggagaacctgcggctgggcaaggtgtcgcaggcgcgcacccaggtgaaaggcgtgggccagaacctcacctacaccactgtggcactgctgccggtcctcaccaccctcttccagcacatcgcccagcaccagttcggagatgacgtcatcctggacgacgtccaggtctcttgctaccgaacgctgtgcagtatctactccctgggaaccaccaagaacacttatgtggaaaagcttcggccagccctcggggagtgcctggcccgtctggcagcagccatgccggtggcgttcctggagccgcagctgaacgagtacaacgcctgctccgtgtacaccaccaagtctccgcgggagcgggccatcctggggctccccaacagtgtggaggagatgtgtcccgacatcccggtgctggagcggctcatggcagacattggggggctggccgagtcaggtgcccgctacacagagatgccgcatgtcatcgagatcacgctgcccatgctatgcagctacctgccccgatggtgggagcgcgggcccgaggcacccccttccgccctgcccgccggcgcccccccaccctgcacagctgtcacctctgaccacctcaactccctgctggggaatatcctgagaatcatcgtcaacaacctgggcattgacgaggcctcctggatgaagcggctggctgtgttcgcacagcccattgtgagccgtgcacggccggagctcctgcagtcccacttcatcccaactatcgggcggctgcgcaagagggcagggaaggtggtgtccgaggaggagcagctgcgcctggaggccaaggcggaggcccaggagggcgagctgctggtgcgggacgagttctctgtgctctgccgggacctctacgccctgtatccgctgctcatccgctacgtggacaacaacagggcgcagtggctgacggagccgaatcccagcgcggaggagctgttcaggatggtgggcgagatcttcatctactggtccaagtcccacaacttcaagcgcgaggagcagaactttgtggtccagaatgagatcaacaacatgtccttcctgactgctgacaacaaaagcaaaatggctaaggcgggagatatacagtccggtggctcggaccaggaacgcaccaagaagaagcgccggggggaccggtactctgtgcagacgtcactgatcgtggccacactgaagaagatgctgcccatcggcctgaatatgtgtgcgcccaccgaccaagacctcatcacgctggccaagacccgttacgccctgaaagacacagatgaggaggtccgggaatttctgcacaacaaccttcaccttcagggaaaggtcgaaggctccccgtctctgcgctggcagatggctctgtaccggggcgtcccgggtcgcgaggaggacgccgatgaccccgagaaaatcgtgcgcagagtccaggaagtgtcagccgtgctctactacctggaccagaccgagcacccttacaagtctaagaaggccgtgtggcacaagcttttgtccaaacagcgccggcgggcagtcgtggcctgtttccgtatgacgcccctgtacaacctgcccacgcaccgggcatgtaacatgttcctggagagctacaaggctgcatggatcctgactgaagaccacagttttgaggaccgcatgatagatgacctttcaaaagctggggagcaggaggaggaggaggaagaggtggaagagaagaagccagaccccctgcaccagttggtcctgcacttcagccgcactgccctgacggaaaagagcaaactggatgaggattacctgtacatggcctatgctgatatcatggcaaagagctgccacctggaggagggaggggagaacggtgaagctgaagaggaggttgaggtctcctttgaggagaaacagatggagaagcagaggctcttgtaccagcaagcacggctgcacacccggggggcggccgagatggtgctgcagatgatcagtgcctgcaaaggagagacaggtgccatggtgtcctccaccctgaagctgggcatctccatcctcaatggaggcaatgctgaggtccagcagaaaatgctggattatcttaaggacaagaaggaagttggcttcttccagagtatccaggcactgatgcaaacatgcagcgtcctggatctcaatgcctttgagagacaaaacaaggccgaggggctgggcatggtgaatgaggatggcactgtcatcaatcgccagaacggagagaaggtcatggcggatgatgaattcacacaagacctgttccgattcctacaattgctctgtgaggggcacaataatgatttccagaactacctacggacacagacagggaacacgaccactattaacatcatcatttgcactgtggactacctcctgcggctgcaggaatccatcagcgacttctactggtactactcgggcaaggatgtcattgaagagcagggcaagaggaacttctccaaagccatgtcggtggctaagcaggtgttcaacagcctcactgagtacatccagggtccctgcaccgggaaccagcagagcctggcgcacagtcgcctatgggacgcagtggtgggattcctgcacgtgttcgcccacatgatgatgaagctcgctcaggactcaagccagatcgagctgctgaaggagctgctggatctgcagaaggacatggtggtgatgttgctgtcgctactagaagggaacgtggtgaacggcatgatcgcccggcagatggtggacatgctcgtggaatcctcatccaatgtggagatgatcctcaagttcttcgacatgttcctgaaactcaaggacattgtgggctctgaagccttccaggactacgtaacggatccccgtggcctcatctccaagaaggacttccagaaggccatggacagccagaagcagttcagcggtccagaaatccagttcctgctttcgtgctccgaagcggatgagaacgaaatgatcaactgcgaagagttcgccaaccgcttccaggagccagcacgcgacatcggcttcaacgtggcggtgctgctgaccaacctgtcggagcatgtgccgcatgaccctcgcctgcacaacttcctggagctggccgagagcatccttgagtacttccgcccctacctgggccgcatcgagatcatgggcgcgtcacgccgcatcgagcgcatctacttcgagatctcagagaccaaccgcgcccagtgggagatgccccaggtgaaggagtccaagcgccagttcatcttcgacgtggtgaacgagggcggcgaggctgagaagatggagctcttcgtgagtttctgcgaggacaccatcttcgagatgcagatcgccgcgcagatctcggagcccgagggcgagccggagaccgacgaggacgagggcgcgggcgcggcggaggcgggcgcggaaggcgcggaggagggcgcggcggggctcgagggcacggcggccacggcggcggcgggggcgacggcgcgggttgtggcggccgcaggccgggccctgcgaggcctcagctaccgcagcctgcggcggcgcgtgcggcggctgcggcggcttacggcccgcgaggcggccaccgcagtggcggcgctgctctgggcagcagtgacgcgcgctggggccgctggcgcgggggcggcggcgggcgcgctgggcctgctctggggctcgctgttcggcggcggcctggtggagggcgccaagaaggtgacggtgaccgagctcctggcaggcatgcccgaccccaccagcgacgaggtgcacggcgagcagccggccgggccgggcggagacgcagacggcgagggtgccagcgagggcgctggagacgccgcggagggcgctggagacgaggaggaggcggtgcacgaggccgggccgggcggtgccgacggggcggtggccgtgaccgatgggggccccttccggcccgaaggggctggcggtctcggggacatgggggacacgacgcctgcggaaccgcccacacccgagggctctcccatcctcaagaggaaattgggggtggatggagtggaggaggagctcccgccagagccagagcccgagccggaaccagagctggagccggagaaagccgatgccgagaatggggagaaggaagaagttcccgagcccacaccagagccccccaagaagcaagcacctccctcaccccctccaaagaaggaggaagctggaggcgaattctggggagaactggaggtgcagagggtgaagttcctgaactacctgtcccggaacttttacaccctgcggttccttgccctcttcttggcatttgccatcaacttcatcttgctgttttataaggtctcagactctccaccaggggaggacgacatggaaggctcagctgctggggatgtgtcaggtgcaggctctggtggcagctctggctggggcttgggggccggagaggaggcagagggcgatgaggatgagaacatggtgtactacttcctggaggaaagcacaggctacatggaacccgccctgcggtgtctgagcctcctgcatacactggtggcctttctctgcatcattggctataattgtctcaaggtgcccctggtaatctttaagcgggagaaggagctggcccggaagctggagtttgatggcctgtacatcacggagcagcctgaggacgatgacgtgaaggggcagtgggaccgactggtgctcaacacgccgtctttccctagcaactactgggacaagtttgtcaagcgcaaggtcctggacaaacatggggacatctacgggcgggagcggattgctgagctactgggcatggacctggccacactagagatcacagcccacaatgagcgcaagcccaacccgccgccagggctgctgacctggctcatgtccatcgatgtcaagtaccagatctggaagttcggggtcatcttcacagacaactccttcctgtacctgggctggtatatggtgatgtccctcttgggacactacaacaacttcttctttgctgcccatctcctggacatcgccatgggggtcaagacgctgcgcaccatcctgtcctctgtcacccacaatgggaaacagctggtgatgaccgtgggccttctggcggtggtcgtctacctgtacaccgtggtggccttcaacttcttccgcaagttctacaacaagagcgaggatgaggatgaacctgacatgaagtgtgatgacatgatgacgtgttacctgtttcacatgtacgtgggtgtccgggctggcggaggcattggggacgagatcgaggaccccgcgggtgacgaatacgagctctacagggtggtcttcgacatcaccttcttcttcttcgtcatcgtcatcctgttggccatcatccagggtctgatcatcgacgcttttggtgagctccgagaccaacaagagcaagtgaaggaggatatggagaccaagtgcttcatctgtggaatcggcagtgactactttgatacgacaccgcatggcttcgagactcacacgctggaggagcacaacctggccaattacatgtttttcctgatgtatttgataaacaaggatgagacagaacacacgggtcaggagtcttatgtctggaagatgtaccaagagagatgttgggatttcttcccagctggtgattgtttccgtaagcagtatgaggaccagcttagctgacacacccccagctggccctccacccccacctcaagtgccttattctcacagcaagccccttagtccccaagcccctccccctaaggcagctgggggagaggtgacctagtac

SEQ ID NO: 1368 - protein, 2000 aa, Homo sapien
MGDAEGEDEVQFLRTDDEVVLQCSATVLKEQLKLCLAAEGFGNRLCFLEPTSNAQNVPPDLAICCFVLEQSLSVRALQEMLANTVEAGVESSQGGGHRTLLYGHAILLRHAHSRMYLSCLTTSRSMTDKLAFDVGLQEDATGEACWWTMHPASKQRSEGEKVRVGDDIILVSVSSERYLHLSTASGELQVDASFMQTLWNMNPICSRCEEGFVTGGHVLRLFHGHMDECLTISPADSDDQRRLVYYEGGAVCTHARSLWRLEPLRISWSGSHLRWGQPLRVRHVTTGQYLALTEDQGLVVVDASKAHTKATSFCFRISKEKLDVAPKRDVEGMGPPEIKYGESLCFVQHVASGLWLTYAAPDPKALRLGVLKKKAMLHQEGHMDDALSLTRCQQEESQAARMIHSTNGLYNQFIKSLDSFSGKPRGSGPPAGTALPIEGVILSLQDLIIYFEPPSEDLQHEEKQSKLRSLRNRQSLFQEEGMLSMVLNCIDRLNVYTTAAHFAEFAGEEAAESWKEIVNLLYELLASLIRGNRSNCALFSTNLDWLVSKLDRLEASSGILEVLYCVLIESPEVLNIIQENHIKSIISLLDKHGRNHKVLDVLCSLCVCNGVAVRSNQDLITENLLPGRELLLQTNLINYVTSIRPNIFVGRAEGTTQYSKWYFEVMVDEVTPFLTAQATHLRVGWALTEGYTPYPGAGEGWGGNGVGDDLYSYGFDGLHLWTGHVARPVTSPGQHLLAPEDVISCCLDLSVPSISFRINGCPVQGVFESFNLDGLFFPVVSFSAGVKVRFLLGGRHGEFKFLPPPGYAPCHEAVLPRERLHLEPIKEYRREGPRGPHLVGPSRCLSHTDFVPCPVDTVQIVLPPHLERIREKLAENIHELWALTRIEQGWTYGPVRDDNKRLHPCLVDFHSLPEPERNYNLQMSGETLKTLLALGCHVGMADEKAEDNLKKTKLPKTYMMSNGYKPAPLDLSHVRLTPAQTTLVDRLAENGHNVWARDRVGQGWSYSAVQDIPARRNPRLVPYRLLDEATKRSNRDSLCQAVRTLLGYGYNIEPPDQEPSQVENQSRCDRVRIFRAEKSYTVQSGRWYFEFEAVTTGEMRVGWARPELRPDVELGADELAYVFNGHRGQRWHLGSEPFGRPWQPGDVVGCMIDLTENTIIFTLNGEVLMSDSGSETAFREIEIGDGFLPVCSLGPGQVGHLNLGQDVSSLRFFAICGLQEGFEPFAINMQRPVTTWFSKGLPQFEPVPLEHPHYEVSRVDGTVDTPPCLRLTHRTWGSQNSLVEMLFLRLSLPVQFHQHFRCTAGATPLAPPGLQPPAEDEARAAEPDPDYENLRRSAGGWSEAENGKEGTAKEGAPGGTPQAGGEAQPARAENEKDATTEKNKKRGFLFKAKKVAMMTQPPATPTLPRLPHDVVPADNRDDPEIILNTTTYYYSVRVFAGQEPSCVWAGWVTPDYHQHDMSFDLSKVRVVTVTMGDEQGNVHSSLKCSNCYMVWGGDFVSPGQQGRISHTDLVIGCLVDLATGLMTFTANGKESNTFFQVEPNTKLFPAVFVLPTHQNVIQFELGKQKNIMPLSAAMFQSERKNPAPQCPPRLEMQMLMPVSWSRMPNHFLQVETRRAGERLGWAVQCQEPLTMMALHIPEENRCMDILELSERLDLQRFHSHTLRLYRAVCALGNNRVAHALCSHVDQAQLLHALEDAHLPGPLRAGYYDLLISIHLESACRSRRSMLSEYIVPLTPETRAITLFPPGRSTENGHPRHGLPGVGVTTSLRPPHHFSPPCFVAALPAAGAAEAPARLSPAIPLEALRDKALRMLGEAVRDGGQHARDPVGASVEFQFVPVLKLVSTLLVMGIFGDEDVKQILKMIEPEVFTEEEEEEDEEEEGEEEDEEEKEEDEEETAQEKEDEEKEEEEAAEGEKEEGLEEGLLQMKLPESVKLQMCHLLEYFCDQELQHRVESLAAFAERYVDKLQANQRSRYGLLIKAFSMTAAETARRTREFRS

SEQ ID NO: 1369 - DNA, 878 bp, Homo sapien
cagattttcaggttgattgatgtgggacagcagccacaatgaggaactcctatagatttctggcatcctctctctcagttgtcgtttctctcctgctaattcctgaagatgtctgtgaaaaaattattggaggaaatgaagtaactcctcattcaagaccctacatggtcctacttagtcttgacagaaaaaccatctgtgctggggctttgattgcaaaagactgggtgttgactgcagctcactgtaacttgaacaaaaggtcccaggtcattcttggggctcactcaataaccagggaagagccaacaaaacagataatgcttgttaagaaagagtttccctatccatgctatgacccagccacacgcgaaggtgaccttaaacttttacagctgacggaaaaagcaaaaattaacaaatatgtgactatccttcatctacctaaaaagggggatgatgtgaaaccaggaaccatgtgccaagttgcagggtgggggaggactcacaatagtgcatcttggtccgatactctgagagaagtcaatatcaccatcatagacagaaaagtctgcaatgatcgaaatcactataattttaaccctgtgattggaatgaatatggtttgtgctggaagcctccgaggtggaagagactcgtgcaatggagattctggaagccctttgttgtgcgagggtgttttccgaggggtcacttcctttggccttgaaaataaatgcggagaccctcgtgggcctggtgtctatattcttctctcaaagaaacacctcaactggataattatgactatcaagggagcagtttaaataaccgtttcctttcatttactgtggcttcttaatcttttcacaaataaa

SEQ ID NO: 1370 - protein, 262 aa, Homo sapien
MRNSYRFLASSLSVVVSLLLIPEDVCEKIIGGNEVTPHSRPYMVLLSLDRKTICAGALIAKDWVLTAAHCNLNKRSQVILGAHSITREEPTKQIMLVKKEFPYPCYDPATREGDLKLLQLTEKAKINKYVTILHLPKKGDDVKPGTMCQVAGWGRTHNSASWSDTLREVNITIIDRKVCNDRNHYNFNPVIGMNMVCAGSLRGGRDSCNGDSGSPLLCEGVFRGVTSFGLENKCGDPRGPGVYILLSKKHLNWIIMTIKGAV

SEQ ID NO: 1371 - DNA, 738 bp, Homo sapien
gtatctgtggtaaacccagtgacacgggggagatgacatacaaaaagggcaggacctgagaaagattaagctgcaggctccctgcccataaaacagggtgtgaaaggcatctcagcggctgccccaccatggctacctgggccctcctgctccttgcagccatgctcctgggcaacccaggtctggtcttctctcgtctgagccctgagtactacgacctggcaagagcccacctgcgtgatgaggagaaatcctgcccgtgcctggcccaggagggcccccagggtgacctgttgaccaaaacacaggagctgggccgtgactacaggacctgtctgacgatagtccaaaaactgaagaagatggtggataagcccacccagagaagtgtttccaatgctgcgacccgggtgtgtaggacggggaggtcacgatggcgcgacgtctgcagaaatttcatgaggaggtatcagtctagagttacccagggcctcgtggccggagaaactgcccagcagatctgtgaggacctcaggttgtgtataccttctacaggtcccctctgagccctctcaccttgtcctgtggaagaagcacaggctcctgtcctcagatcccgggaacctcagcaacctctgccggctcctcgcttcctcgatccagaatccactctccagtctccctcccctgactccctctgctgtcctcccctctcacgagaataaagtgtcaagcaag

SEQ ID NO: 1372 - protein, 145 aa, Homo sapien
MATWALLLLAAMLLGNPGLVFSRLSPEYYDLARAHLRDEEKSCPCLAQEGPQGDLLTKTQELGRDYRTCLTIVQKLKKMVDKPTQRSVSNAATRVCRTGRSRWRDVCRNFMRRYQSRVTQGLVAGETAQQICEDLRLCIPSTGPL

SEQ ID NO: 1373 - DNA, 3959 bp, Homo sapien
gcggctccgccgccgcgaaggacagcctttccgcgcgggactccggggcgccacgggggccatgtaagcagctatcttccagagggccacactgggcatggacacccttttccctgcctggaggagcacaggtgatagtgtaattttccagtcacgaaactgctaaggccatctcaggggcgtgtgcgcaggataggcaggcggcgtccgaggaccacatagccatgccttttggtctgaagctccgccggacacggcgctacaacgtcctgagcaagaactgctttgtcacacggattcgcctgctggacagcaatgttatcgagtgcacgctgtcggtggaaagcacagggcaagaatgcctggaggctgtggcccagaggctggagctgcgagagacgcactactttggcctttggtttctcagcaagagccagcaagcacgatgggtggagctggagaaacctctgaagaaacatctggacaaattcgctaatgagcctttgcttttctttggagtcatgttctatgtgccaaatgtgtcatggcttcagcaagaggccacaagatatcagtattacctgcaagtcaaaaaagatgtgcttgaagggcgattacgatgtacattggaccaggtgattcggctagccggcctagctgtgcaagctgattttggagactataatcagtttgattctcaagatttcctcagagagtatgtgctatttcctatggatttggccctggaagaggctgttctggaggagctgacccagaaggtagcccaagaacacaaagcccacagtggaatcctgccagcagaagctgaactgatgtacatcaatgaagttgaacgtttggatggatttggacaggaaatcttccctgtaaaggacaatcatggaaactgtgtacaccttggcattttctttatggggattttcgtgaggaacagaattggaagacaagcggtaatatacaggtggaatgacatggggaatatcactcataacaagtcgaccattctagtggagctcatcaacaaagaagagactgccctctttcacacggatgatatcgaaaatgccaagtatatttctcggttgtttgccacacgacacaagttttacaaacaaaacaaaatctgcactgaacagtcaaattctccaccccccatcagacgccagcccacctggagccgatcctctctgcccaggcagcagccgtacatcctgcctcccgttcacgtccagtgtggtgagcactactcggaaacgcacacctcgcaagacagcatttttcatgggaatgaagaagccttgtattgcaactctcacaacagcctggacttaaattatttaaatggcactgtcaccaatggcagcgtgtgtagcgttgacagcgtcaactccctcaactgctcgcaaagtttcatccaggcctcccctgtatcctccaacctcagtatccctgggagtgacatcatgcgggccgactacatcccgagccaccggcacagcgcgatcatcgtgccctcgtacaggccaacccccgattatgagacagtcatgcgccagatgaagagggggatcctgcatacagacagccagagccagtctctgagaaacctcaacattatcaacacccatgcctacaaccagccagaggatctggtgtacagccaaccggagatgcgggagaggcacccctacactgtcccttatgggccacagggggtctacagcaacaaacttgtcagtccatctgaccagaggaacccaaagaataatgtggtaccaagcaagccgggggcaagcgccatctcgcacacggtgagcaccccagagctggccaacatgcagctgcagggcagccataactacagcacggcccacatgcttaagaactatctcttcaggccaccgcccccctacccacggccacgacctgccaccagcaccccagacctggccagccaccgccacaagtacgtcagcggcagcagcccggacctggtgacccggaaggtgcagctctcggtgaagaccttccaagaggacagctctccggtggttcatcagtctctccaggaggtgagcgagcccctcacggccaccaagcaccacggcactgtgaacaagcgccacagcctggaggtgatgaacagcatggtgcggggcatggaggccatgacgctcaagtcgctccacctccccatggctcgccgcaacacgctccgggagcagggaccgcccgaggaggggtcaggcagccacgaggtcccccagctccctcagtatcaccacaagaagaccttctctgatgccactatgctaatccacagcagcgagagtgaggaggaggaggaggaggctccagaatcggtgccccagatccccatgctccgggagaagatggagtacagtgcccagctgcaggcggccctggcccgcatccccaacaagcccccgcctgagtaccccggtccaaggaagagtgtgagcaatggggctctgaggcaggaccaagccagccttcctcccgccatggccagagccagggtgctgaggcatgggccagccaaggccatcagcatgtctcggactgacccgccggctgtcaacggggcctctctcggcccatccatctcggaacccgacctgactagtgtgaaggagcgggtcaaaaaagagcctgtgaaggagagacctgtgtctgaaatgttttccctggaagacagcattatagagagagagatgatgatcaggaatctagagaagcagaagatggcaggcctggaggcacagaagaggccgctgatgttggcagcattgaatgggctctcggtggctcgagtctcagggcgggaagagaatcgagttgatgccacccgggttcccatggacgagaggttcagaaccctgaagaagaaactagaagagggaatggtgttcacagaatatgagcaaattccaaagaaaaaggcgaatggcattttcagcacagcagctctgccagaaaacgccgagcgcagccgaatccgtgaagttgtcccctatgaggagaatcgagtagagctgataccaaccaaagaaaataacacaggatacattaatgcctcccacatcaaggtggtggttggcggggcagaatggcactacatagccacccaggggcccctgccacacacgtgccacgacttctggcagatggtgtgggagcagggagtgaatgtgattgccatggtcactgcagaggaggagggtggacgaaccaaaagccaccgatactggcccaaactaggttcaaagcacagctcagccacctatggcaagttcaaggtcaccacgaagtttcgaacggattctgtttgctatgcaaccacgggcttgaaggtcaagcaccttttgtctgggcaagaaaggacggtgtggcatttacaatatactgactggccagatcacggctgtccagaagatgtccaaggatttttatcctacttggaggagatccagtcggtccgtcgccataccaacagcatgctggaaggcaccaagaaccggcacccgcccatcgtggtccactgtagtgctggggtgggaaggaccggcgtgctcattctttctgagctgatgatctactgcttggaacataacgaaaaggtggaagtgcccatgatgctgaggctcctcagggagcagaggatgttcatgatccagactatcgctcagtacaagtttgtctaccaagtcctcatccagttcctccaaaactccagactcatttaatcaccccaatccagctcctggaggagggacccagctccatcgcgctggaggagagtcacctccagacaacatctgctccccccacaggggtgcaggtggctggcagcaaacaggctctctgaagacagtagccaagattattcacacataccatgtattattttatatgag

SEQ ID NO: 1374 - protein, 1187 aa, Homo sapien [sequence omitted]

SEQ ID NO: 1375 - DNA, 2107 bp, Homo sapien
gtgaagtgctcagaatggggcaggatgtcacctggaatcagcactaagtgattcagactttccttacttttaaatgtgctgctcttcatttcaagatgccgttgcagctctgataaatgcaaactgacaaccttcaaggccacgacggagggaaaatcattggtgcttggagcatagaagactgcccttcacaaaggaaatccctgattattgtttgaaatgctgaggacgttgctgcgaaggagacttttttcttatcccaccaaatactactttatggttcttgttttatccctaatcaccttctccgttttaaggattcatcaaaagcctgaatttgtaagtgtcagacacttggagcttgctggggagaatcctagtagtgatattaattgcaccaaagttttacagggtgatgtaaatgaaatccaaaaggtaaagcttgagatcctaacagtgaaatttaaaaagcgccctcggtggacacctgacgactatataaacatgaccagtgactgttcttctttcatcaagagacgcaaatatattgtagaaccccttagtaaagaagaggcggagtttccaatagcatattctatagtggttcatcacaagattgaaatgcttgacaggctgctgagggccatctatatgcctcagaatttctattgcattcatgtggacacaaaatccgaggattcctatttagctgcagtgatgggcatcgcttcctgttttagtaatgtctttgtggccagccgattggagagtgtggtttatgcatcgtggagccgggttcaggctgacctcaactgcatgaaggatctctatgcaatgagtgcaaactggaagtacttgataaatctttgtggtatggattttcccattaaaaccaacctagaaattgtcaggaagctcaagttgttaatgggagaaaacaacctggaaacggagaggatgccatcccataaagaagaaaggtggaagaagcggtatgaggtcgttaatggaaagctgacaaacacagggactgtcaaaatgcttcctccactcgaaacacctctcttttctggcagtgcctacttcgtggtcagtagggagtatgtggggtatgtactacagaatgaaaaaatccaaaagttgatggagtgggcacaagacacatacagccctgatgagtatctctgggccaccatccaaaggattcctgaagtcccgggctcactccctgccagccataagtatgatctgtctgacatgcaagcagttgccaggtttgtcaagtggcagtactttgagggtgatgtttccaagggtgctccctacccgccctgcgatggagtccatgtgcgctcagtgtgcattttcggagctggtgacttgaactggatgctgcgcaaacaccacttgtttgccaataagtttgacgtggatgttgacctctttgccatccagtgtttggatgagcatttgagacacaaagctttggagacattaaaacactgaccattacgggcaattttatgaacaagaagaaggatacacaaaacgtacccttatctgtttccccttccttgtcagcatcgggaagatggtatgaagtcctctttggggcagggactctagtagatcttcttgtcagagaagctgcatggtttctgcagagcacagttagctagaaaggtgatagcattaaatgttcatctagagttaatagtgggaggagtaaaggtagccttgaggccagagcaggtagcaaggcattgtggaaagaggggaccagggtggctggggaagaggccgatgcataaagtcagcctgttcaaagtgctcagggacttagcaaaatgagaagatgtgacctgtgccaaaactattttgagaattttaaatgtgaccatttttctggtatgaataaacttacagcaacaaataatcaaagatacaattaatctgatattatatttgttgaaatagaaatttgattgtactataaatgatttttgtaaataatttatattctgctctaatactgtactgtgtagtgtgtctccgtatgtcatctcagggagcttaaaatgggcttgatttaacattgaaaaaaaat

SEQ ID NO: 1376 - protein, 428 aa, Homo sapien
MLRTLLRRRLFSYPTKYYFMVLVLSLITFSVLRIHQKPEFVSVRHLELAGENPSSDINCTKVLQGDVNEIQKVKLEILTVKFKKRPRWTPDDYINMTSDCSSFIKRRKYIVEPLSKEEAEFPIAYSIVVHHKIEMLDRLLRAIYMPQNFYCIHVDTKSEDSYLAAVMGIASCFSNVFVASRLESVVYASWSRVQADLNCMKDLYAMSANWKYLINLCGMDFPIKTNLEIVRKLKLLMGENNLETERMPSHKEERWKKRYEVVNGKLTNTGTVKMLPPLETPLFSGSAYFVVSREYVGYVLQNEKIQKLMEWAQDTYSPDEYLWATIQRIPEVPGSLPASHKYDLSDMQAVARFVKWQYFEGDVSKGAPYPPCDGVHVRSVCIFGAGDLNWMLRKHHLFANKFDVDVDLFAIQCLDEHLRHKALETLKH

SEQ ID NO: 1377 - DNA, 1461 bp, Homo sapien
tttaaggcgccgggtttccggggctcctggccccgcttattccgcgggggtcggcggggtcggcctgggcgcccgcgccgccgctgcgctttgtccgctgggcacactgcttctgggaggggcgggcagacatggtggcggccgccgccccctcctcggccctagcatgccgcggccgcctcgcggctacccggcttgccggtcccgagcggcagccccggggtggcgatggggtcgcgccgaggcagcggaggttctgcgggcgactggaggttggcagtgggcgggagaaagaggaaggcaggcgcggctgggcctcggcctctggcgccgcggtaccctttgtctcggcagcctgacggccccgccgggctctccggagaggggaacgggcggcgagggtggcgggtcctgggcgccctgtgctgcggggccgagaggcgctcgggtcgcggcgggaccggccggaccagacagggttaatggaagagcctggccagtcccgcgcggggcccccgcagcgacagccttggccgcggggactggagtcctgagggggagaagcctgccgttctgaaggctcgggacttctgccccaaagacttcgccgccgagaactgcgggtgcactgcctcagggaagaagttgagaattttgccaggtcatctctgccagggcacagttcatcactgtgtgtttagtgtgtttcggtgaagctctccaagtgtgttgaatcagcgtgcctagcctcaagggtgcatcgtgaaaactgaaaccaaaggaatgatacaggcctgctttgtgtgtgtcttcccactttaagcttgttttcagtacaaatactcttgctttaaacctgattggactgtggcgagcggacatctgttcaaaggaggggccgagaccacagtacttctgaagggggcttgataatgtggaaacattttaagttttctctccggactgttttgctctctcaattcaggcaagttactgaagtacgttttttatctagaaaaaggtttgatgtagtctgtaaatggtccttgtaaagtacattgccatctcagaattaaaagatccactctcatttattatgcagaagttagtggtcattctttcctgtagatagtttatctcatgtaaagacccacccagcttggtttaaatttttttctcactgacgtataaccatcagctttgatacttccattttcaggctcagactttgaatttaaggaaactaaagatgactttattttcttttctcttggtttttttttccaaaaacaaaaaataaatccattacatgttaacatagatgataagagtgacatcttgcatttttgcaaatctttttaatgcctggtttaatagaagattctcagatctacgtcagactgttgtggttagcacaccatgtaacctctggaacactccactgtacactcatactttttt

SEQ ID NO: 1378 - protein, 136 aa, Homo sapien
MPRPPRGYPACRSRAAAPGWRWGRAEAAEVLRATGGWQWAGERGRQARLGLGLWRRGTLCLGSLTAPPGSPERGTGGEGGGSWAPCAAGPRGARVAAGPAGPDRVNGRAWPVPRGAPAATALAAGTGVLRGRSLPF

SEQ ID NO: 1379 - DNA, 4521 bp, Homo sapien
acttcattcacttgcaaatcagtgtgtgcccacaagagccagctctcccgagcccgtaaccttcgcatcccaagagctgcagtttcagccgcgacagcaagaacggcagagccggcgaccgcggcggcggcggcggcggaggcaggagcagcctgggcgggtcgcagggtctccgcgggcgcaggaaggcgagcagagatatcctctgagagccaagcaaagaacattaaggaaggaaggaggaatgaggctggatacggtgcagtgaaaaaggcacttccaagagtggggcactcactacgcacagactcgacggtgccatcagcatgagaacttaccgctacttcttgctgctcttttgggtgggccagccctacccaactctctcaactccactatcaaagaggactagtggtttcccagcaaagaaaagggccctggagctctctggaaacagcaaaaatgagctgaaccgttcaaaaaggagctggatgtggaatcagttctttctcctggaggaatacacaggatccgattatcagtatgtgggcaagttacattcagaccaggatagaggagatggatcacttaaatatatcctttcaggagatggagcaggagatctcttcattattaatgaaaacacaggcgacatacaggccaccaagaggctggacagggaagaaaaacccgtttacatccttcgagctcaagctataaacagaaggacagggagacccgtggagcccgagtctgaattcatcatcaagatccatgacatcaatgacaatgaaccaatattcaccaaggaggtttacacagccactgtccctgaaatgtctgatgtcggtacatttgttgtccaagtcactgcgacggatgcagatgatccaacatatgggaacagtgctaaagttgtctacagtattctacagggacagccctatttttcagttgaatcagaaacaggtattatcaagacagctttgctcaacatggatcgagaaaacagggagcagtaccaagtggtgattcaagccaaggatatgggcggccagatgggaggattatctgggaccaccaccgtgaacatcacactgactgatgtcaacgacaaccctccccgattcccccagagtacataccagtttaaaactcctgaatcttctccaccggggacaccaattggcagaatcaaagccagcgacgctgatgtgggagaaaatgctgaaattgagtacagcatcacagacggtgaggggctggatatgtttgatgtcatcaccgaccaggaaacccaggaagggattataactgtcaaaaagctcttggactttgaaaagaagaaagtgtatacccttaaagtggaagcctccaatccttatgttgagccacgatttctctacttggggcctttcaaagattcagccacggttagaattgtggtggaggatgtagatgagccacctgtcttcagcaaactggcctacatcttacaaataagagaagatgctcagataaacaccacaataggctccgtcacagcccaagatccagatgctgccaggaatcctgtcaagtactctgtagatcgacacacagatatggacagaatattcaacattgattctggaaatggttcgatttttacatcgaaacttcttgaccgagaaacactgctatggcacaacattacagtgatagcaacagagatcaataatccaaagcaaagtagtcgagtacctctatatattaaagttctagatgtcaatgacaacgccccagaatttgctgagttctatgaaacttttgtctgtgaaaaagcaaaggcagatcagttgattcagaccctgcatgctgttgacaaggatgacccttatagtggacaccaattttcgttttccttggcccctgaagcagccagtggctcaaactttaccattcaagacaacaaagacaacacggcgggaatcttaactcggaaaaatggctataatagacacgagatgagcacctatctcttgcctgtggtcatttcagacaacgactacccagttcaaagcagcactgggacagtgactgtccgggtctgtgcatgtgaccaccacgggaacatgcaatcctgccatgcggaggcgctcatccaccccacgggactgagcacgggggctctggttgccatccttctgtgcatcgtgatcctactagtgacagtggtgctgtttgcagctctgaggcggcagcgaaaaaaagagcctttgatcatttccaaagaggacatcagagataacattgtcagttacaacgacgaaggtggtggagaggaggacacccaggcttttgatatcggcaccctgaggaatcctgaagccatagaggacaacaaattacgaagggacattgtgcccgaagcccttttcctaccccgacggactccaacagctcgcgacaacaccgatgtcagagatttcattaaccaaaggttaaaggaaaatgacacggaccccactgccccgccatacgactccttggccacttacgcctatgaaggcactggctccgtggcggattccctgagctcgctggagtcagtgaccacggatgcagatcaagactatgattaccttagtgactggggacctcgattcaaaaagcttgcagatatgtatggaggagtggacagtgacaaagactcctaatctgttgcctttttcattttccaatacgacactgaaatatgtgaagtggctatttctttatatttatccactactccgtgaaggcttctctgttctacccgttccaaaagccaatggctgcagtccgtgtggatccaatgttagagacttttttctagtacacttttatgagcttccaaggggcaaatttttattttttagtgcatccagttaaccaagtcagcccaacaggcaggtgccggaggggaggacagggaacagtatttccacttgttctcagggcagcgtgcccgcttccgctgtcctggtgttttactacactccatgtcaggtcagccaactgccctaactgtacatttcacaggctaatgggataaaggactgtgctttaaagataaaaatatcatcatagtaaaagaaatgagggcatatcggctcacaaagagataaactacataggggtgtttatttgtgtcacaaagaatttaaaataacacttgcccatgctatttgttcttcaagaactttctctgccatcaactactattcaaaacctcaaatccacccatatgttaaaattctcattactcttaaggaatagaagcaaattaaacggtaacatccaaaagcaaccacaaacctagtacgacttcattccttccactaactcatagtttgttatatcctagactagacatgcgaaagtttgcctttgtaccatataaagggggagggaaatagctaataatgttaaccaaggaaatatattttaccatacatttaaagttttggccaccacatgtatcacgggtcacttgaaattctttcagctatcagtaggctaatgtcaaaattgtttaaaaattcttgaaagaattttcctgagacaaattttaacttcttgtctatagttgtcagtattattctactatactgtacatgaaagtagcagtgtgaagtacaataattcatattcttcatatccttcttacacgactaagttgaattagtaaagttagattaaataaaacttaaatctcactctaggagttcagtggagaggttagagccagccacacttgaacctaataccctgcccttgacatctggaaacctctacatatttatataacgtgatacatttggataaacaacattgagattatgatgaaaacctacatattccatgtttggaagacccttggaagaggaaaattggattcccttaaacaaaagtgtttaagattgtaattaaaatgatagttgattttcaaaagcattaattttttttcattgtttttaactttgctttcatgaccatcctgccatccttgactttgaactaatgataaagtaatgatctcaaactatgacagaaaagtaatgtaaaatccatccaatctattatttctctaattatgcaattagcctcatagttattatccagaggacccaactgaactgaactaatccttctggcagattcaaatcgtttatttcacacgctgttctaatggcacttatcattagaatcttaccttgtgcagtcatcagaaattccagcgtactataatgaaaacatccttgttttgaaaacctaaaagacaggctctgtatatatatatacttaagaatatgctgacttcacttattagtcttagggatttattttcaattaatattaattttctacaaataattttagtgtcatttccatttggggatattgtcatatcagcacatattttctgtttggaaacacactgttgtttagttaagttttaaataggtgtattacccaagaagtaaagatggaaacgtt

SEQ ID NO: 1380 - protein, 790 aa, Homo sapien
MRTYRYFLLLFWVGQPYPTLSTPLSKRTSGFPAKKRALELSGNSKNELNRSKRSWMWNQFFLLEEYTGSDYQYVGKLHSDQDRGDGSLKYILSGDGAGDLFIINENTGDIQATKRLDREEKPVYILRAQAINRRTGRPVEPESEFIIKIHDINDNEPIFTKEVYTATVPEMSDVGTFVVQVTATDADDPTYGNSAKVVYSILQGQPYFSVESETGIIKTALLNMDRENREQYQVVIQAKDMGGQMGGLSGTTTVNITLTDVNDNPPRFPQSTYQFKTPESSPPGTPIGRIKASDADVGENAEIEYSITDGEGLDMFDVITDQETQEGIITVKKLLDFEKKKVYTLKVEASNPYVEPRFLYLGPFKDSATVRIVVEDVDEPPVFSKLAYILQIREDAQINTTIGSVTAQDPDAARNPVKYSVDRHTDMDRIFNIDSGNGSIFTSKLLDRETLLWHNITVIATEINNPKQSSRVPLYIKVLDVNDNAPEFAEFYETFVCEKAKADQLIQTLHAVDKDDPYSGHQFSFSLAPEAASGSNFTIQDNKDNTAGILTRKNGYNRHEMSTYLLPVVISDNDYPVQSSTGTVTVRVCACDHHGNMQSCHAEALIHPTGLSTGALVAILLCIVILLVTVVLFAALRRQRKKEPLIISKEDIRDNIVSYNDEGGGEEDTQAFDIGTLRNPEAIEDNKLRRDIVPEALFLPRRTPTARDNTDVRDFINQRLKENDTDPTAPPYDSLATYAYEGTGSVADSLSSLESVTTDADQDYDYLSDWGPRFKKLADMYGGVDSDKDS

SEQ ID NO: 1381 - DNA, 1330 bp, Homo sapien
gcggacgcggggcgccagcaggtggcgctggacgcgcaacggacaaggaggcggggcctgcagctggcttggaggctccgcgctctggaggctcaggcgccgcgtggggcccgcacctctgggcagcagcggcagccgagactcacggtcaagctaaggcgaagagtgggtggctgaagccatactattttatagaattaatggaaagcagaaaagacatcacaaaccaagaagaactttggaaaatgaagcctaggagaaatttagaagaagacgattatttgcataaggacacgggagagaccagcatgctaaaaagacctgtgcttttgcatttgcaccaaacagcccatgctgatgaatttgactgcccttcagaacttcagcacacacaggaactctttccacagtggcacttgccaattaaaatagctgctattatagcatctctgacttttctttacactcttctgagggaagtaattcaccctttagcaacttcccatcaacaatatttttataaaattccaatcctggtcatcaacaaagtcttgccaatggtttccatcactctcttggcattggtttacctgccaggtgtgatagcagcaattgtccaacttcataatggaaccaagtataagaagtttccacattggttggataagtggatgttaacaagaaagcagtttgggcttctcagtttcttttttgctgtactgcatgcaatttatagtctgtcttacccaatgaggcgatcctacagatacaagttgctaaactgggcatatcaacaggtccaacaaaataaagaagatgcctggattgagcatgatgtttggagaatggagatttatgtgtctctgggaattgtgggattggcaatactggctctgttggctgtgacatctattccatctgtgagtgactctttgacatggagagaatttcactatattcagagcaagctaggaattgtttcccttctactgggcacaatacacgcattgatttttgcctggaataagtggatagatataaaacaatttgtatggtatacacctccaacttttatgatagctgttttccttccaattgttgtcctgatatttaaaagcatactattcctgccatgcttgaggaagaagatactgaagattagacatggttgggaagacgtcaccaaaattaacaaaactgagatatgttcccagttgtagaattactgtttacacacatttttgttcaatattgatatattttatcaccaacatttcaagtttgtatttgttaataaaatgattattcaaggaaaaaaaaaaaaaaaaaa

SEQ ID NO: 1382 - protein, 339 aa, Homo sapien
MESRKDITNQEELWKMKPRRNLEEDDYLHKDTGETSMLKRPVLLHLHQTAHADEFDCPSELQHTQELFPQWHLPIKIAAIIASLTFLYTLLREVIHPLATSHQQYFYKIPILVINKVLPMVSITLLALVYLPGVIAAIVQLHNGTKYKKFPHWLDKWMLTRKQFGLLSFFFAVLHAIYSLSYPMRRSYRYKLLNWAYQQVQQNKEDAWIEHDVWRMEIYVSLGIVGLAILALLAVTSIPSVSDSLTWREFHYIQSKLGIVSLLLGTIHALIFAWNKWIDIKQFVWYTPPTFMIAVFLPIVVLIFKSILFLPCLRKKILKIRHGWEDVTKINKTEICSQL

SEQ ID NO: 1383 - DNA, 1378 bp, Homo sapien
cgacgcgggagccgcacgcgccggacgaggctcgctgcgctccctgttgcccagcgcgggcccgttgaggcggagccctcagttcccggccaggacacggtctgggccgccgaatctccggccgaagagcggcggcggcagcggcggaaaaaaatgaagaatgaaattgctgccgttgtcttctttttcacaaggctagttcgaaaacatgataagttgaaaaaagaggcagttgagaggtttgctgagaaattgaccctaatacttcaagaaaaatataaaaatcactggtatccagaaaaaccatcgaaaggacaggcctacagatgtattcgtgtcaataaatttcagagagttgatcctgatgtcctgaaagcctgtgaaaacagctgcatcttgtatagtgacctgggcttgccaaaggagctcactctctgggtggacccatgtgaggtgtgctgtcggtatggagagaaaaacaatgcattcattgttgccagctttgaaaataaagatgagaacaaggatgagatctccaggaaagttaccagggcccttgataaggttacctctgattatcattcaggatcctcttcttcagatgaagaaacaagtaaggaaatggaagtgaaacccagttcggtgactgcagccgcaagtcctgtgtaccagatttcagaacttatatttccacctcttccaatgtggcaccctttgcccagaaaaaagccaggaatgtatcgagggaatggccatcagaatcactatcctcctcctgttccatttggttatccaaatcagggaagaaaaaataaaccatatcgcccaattccagtgacatgggtacctcctcctggaatgcattgtgaccggaatcactggattaatcctcacatgttagcacctcactaacttcgtttttgattgtgttggtgtcatgttgagaaaaaggtagaataaaccttactacacattaaaagttaaaagttcttactaatagtagtgaagttagatgggccaaaccatcaaacttatttttatagaagttattgagaataatctttcttaaaaaatatatgcactttagatattgatatagtttgagaaattttattaaagttagtcaagtgcctaagtttttaatattggacttgagtatttatatattgtgcatcaactctgttggatacgagaacactgtagaagtggacgatttgttctagcacctttgagaatttactttatggagcgtatgtaagttatttatatacaaggaaatctattttatgtcgttgtttaagagaattgtgtgaaatcatgtagttgcaaataaaaaatagtttgaggcatgaaaaaaaaaaaaaaaaaaaaaaaaaaa

SEQ ID NO: 1384 - protein, 252 aa, Homo sapien
MKNEIAAVVFFFTRLVRKHDKLKKEAVERFAEKLTLILQEKYKNHWYPEKPSKGQAYRCIRVNKFQRVDPDVLKACENSCILYSDLGLPKELTLWVDPCEVCCRYGEKNNAFIVASFENKDENKDEISRKVTRALDKVTSDYHSGSSSSDEETSKEMEVKPSSVTAAASPVYQISELIFPPLPMWHPLPRKKPGMYRGNGHQNHYPPPVPFGYPNQGRKNKPYRPIPVTWVPPPGMHCDRNHWINPHMLAPH

SEQ ID NO: 1385 - DNA, 1377 bp, Homo sapien
aacgaaaccaacagcagtccaagctcagtcagcagaagagataaaagcaaacaggtctgggaggcagttctgttgccactctctctcctgtcaatgatggatctcagaaataccccagccaaatctctggacaagttcattgaagactatctcttgccagacacgtgtttccgcatgcaaatcaaccatgccattgacatcatctgtgggttcctgaaggaaaggtgcttccgaggtagctcctaccctgtgtgtgtgtccaaggtggtaaagggtggctcctcaggcaagggcaccaccctcagaggccgatctgacgctgacctggttgtcttcctcagtcctctcaccacttttcaggatcagttaaatcgccggggagagttcatccaggaaattaggagacagctggaagcctgtcaaagagagagagcattttccgtgaagtttgaggtccaggctccacgctggggcaacccccgtgcgctcagcttcgtactgagttcgctccagctcggggagggggtggagttcgatgtgctgcctgcctttgatgccctgggtcagttgactggcagctataaacctaacccccaaatctatgtcaagctcatcgaggagtgcaccgacctgcagaaagagggcgagttctccacctgcttcacagaactacagagagacttcctgaagcagcgccccaccaagctcaagagcctcatccgcctagtcaagcactggtaccaaaattgtaagaagaagcttgggaagctgccacctcagtatgccctggagctcctgacggtctatgcttgggagcgagggagcatgaaaacacatttcaacacagcccagggatttcggacggtcttggaattagtcataaactaccagcaactctgcatctactggacaaagtattatgactttaaaaaccccattattgaaaagtacctgagaaggcagctcacgaaacccacgcctgtgatcctggacccggcggaccctacaggaaacttgggtggtggagacccaaagcgttggaggcagctggcacaagaggctgaggcctggctgaattacccatgctttaagaattgggatgggtccccagtgagctcctggattctgctggtgagacctcctgcttcctccctgccattcatccctgcccctctccatgaagcttgagacatatagctggagaccattctttccaaagaacttacctcttgccaaaggccatttatattcatatagtgacaggctgtgctccatattttacagtcattttggtcacaatcgagggtttctggaattttcacatcccttgtccagaattcattcccctaagagtaataataaataatctctaacacc

SEQ ID NO: 1386 - protein, 364 aa, Homo sapien
MMDLRNTPAKSLDKFIEDYLLPDTCFRMQINHAIDIICGFLKERCFRGSSYPVCVSKVVKGGSSGKGTTLRGRSDADLVVFLSPLTTFQDQLNRRGEFIQEIRRQLEACQRERAFSVKFEVQAPRWGNPRALSFVLSSLQLGEGVEFDVLPAFDALGQLTGSYKPNPQIYVKLIEECTDLQKEGEFSTCFTELQRDFLKQRPTKLKSLIRLVKHWYQNCKKKLGKLPPQYALELLTVYAWERGSMKTHFNTAQGFRTVLELVINYQQLCIYWTKYYDFKNPIIEKYLRRQLTKPTPVILDPADPTGNLGGGDPKRWRQLAQEAEAWLNYPCFKNWDGSPVSSWILLVRPPASSLPFIPAPLHEA

SEQ ID NO: 1387 - DNA, 3178 bp, Homo sapien
ggcaccgattcggggcctgcccggacttcgccgcacgctgcagaacctcgcccagcgcccaccatgccccggcagctcagcgcggcggccgcgctcttcgcgtccctggccgtaattttgcacgatggcagtcaaatgagagcaaaagcatttccagaaaccagagattattctcaacctactgcagcagcaacagtacaggacataaaaaaacctgtccagcaaccagctaagcaagcacctcaccaaactttagcagcaagattcatggatggtcatatcacctttcaaacagcggccacagtaaaaattccaacaactaccccagcaactacaaaaaacactgcaaccaccagcccaattacctacaccctggtcacaacccaggccacacccaacaactcacacacagctcctccagttactgaagttacagtcggccctagcttagccccttattcactgccacccaccatcaccccaccagctcatacagctggaaccagttcatcaaccgtcagccacacaactgggaacaccactcaacccagtaaccagaccacccttccagcaactttatcgatagcactgcacaaaagcacaaccggtcagaagcctgatcaacccacccatgccccaggaacaacggcagctgcccacaataccacccgcacagctgcacctgcctccacggttcctgggcccacccttgcacctcagccatcgtcagtcaagactggaatttatcaggttctaaacggaagcagactctgtataaaagcagagatggggatacagctgattgttcaagacaaggagtcggttttttcacctcggagatacttcaacatcgaccccaacgcaacgcaagcctctgggaactgtggcacccgaaaatccaaccttctgttgaattttcagggcggatttgtgaatctcacatttaccaaggatgaagaatcatattatatcagtgaagtgggagcctatttgaccgtctcagatccagagacagtttaccaaggaatcaaacatgcggtggtgatgttccagacagcagtcgggcattccttcaagtgcgtgagtgaacagagcctccagttgtcagcccacctgcaggtgaaaacaaccgatgtccaacttcaagcctttgattttgaagatgaccactttggaaatgtggatgagtgctcgtctgactacacaattgtgcttcctgtgattggggccatcgtggttggtctctgccttatgggtatgggtgtctataaaatccgcctaaggtgtcaatcatctggataccagagaatctaattgttgcccggggggaatgaaaataatggaatttagagaactctttcatcccttccaggatggatgttgggaaattccctcagagtgtgggtccttcaaacaatgtaaaccaccatcttctattcaaatgaagtgagtcatgtgtgatttaagttcaggcagcacatcaatttctaaatactttttgtttattttatgaaagatatagtgagctgtttattttctagtttcctttagaatattttagccactcaaagtcaacatttgagatatgttgaattaacataatatatgtaaagtagaataagccttcaaattataaaccaagggtcaattgtaactaatactactgtgtgtgcattgaagattttattttacccttgatcttaacaaagcctttgctttgttatcaaatggactttcagtgcttttactatctgtgttttatggtttcatgtaacatacatattcctggtgtagcacttaactccttttccactttaaatttgtttttgttttttgagacggagtttcactcttgtcacccaggctggagtacagtggcacgatctcggcttatggcaacctccgcctcccgggttcaagtgattctcctgcttcagcttcccgagtagctgggattacaggcacacactaccacgcctggctaatttttgtatttttattatagacgggtttcaccatgttggccagactggtcttgaactcttgacctcaggtgatccacccacctcagcctcccaaagtgctgggattacaggcatgagccattgcgcccggccttaaatgttttttttaatcatcaaaaagaacaacatatctcaggttgtctaagtgtttttatgtaaaaccaacaaaaagaacaaatcagcttatattttttatcttgatgactcctgctccagaattgctagactaagaattaggtggctacagatggtagaactaaacaataagcaagagacaataataatggcccttaattattaacaaagtgccagagtctaggctaagcactttatctatatctcatttcattctcacaacttataagtgaatgagtaaactgagacttaagggaactgaatcacttaaatgtcacctggctaactgatggcagagccagagcttgaattcatgttggtctgacatcaaggtctttggtcttctccctacaccaagttacctacaagaacaatgacaccacactctgcctgaaggctcacacctcataccagcatacgctcaccttacagggaaatgggtttatccaggatcatgagacattagggtagatgaaaggagagctttgcagataacaaaatagcctatccttaataaatcctccactctctggaaggagactgaggggctttgtaaaacattagtcagttgctcatttttatgggattgcttagctgggctgtaaagatgaaggcatcaaataaactcaaagtatttttaaatttttttgataatagagaaacttcgctaaccaactgttctttcttgagtgtatagccccatcttgtggtaacttgctgcttctgcacttcatatccatatttcctattgttcactttattctgtagagcagcctgccaagaattttatttctgctgttttttttgctgctaaagaaaggaactaagtcaggatgttaacagaaaagtccacataaccctagaattcttagtcaaggaataattcaagtcagcctagagaccatgttgactttcctcatgtgtttccttatgactcagtaagttggcaaggtcctgactttagtcttaataaaacattgaattgtagtaaaggtttttgcaataaaaacttactttgg

SEQ ID NO: 1388 - protein, 416 aa, Homo sapien
MPRQLSAAAALFASLAVILHDGSQMRAKAFPETRDYSQPTAAATVQDIKKPVQQPAKQAPHQTLAARFMDGHITFQTAATVKIPTTTPATTKNTATTSPITYTLVTTQATPNNSHTAPPVTEVTVGPSLAPYSLPPTITPPAHTAGTSSSTVSHTTGNTTQPSNQTTLPATLSIALHKSTTGQKPDQPTHAPGTTAAAHNTTRTAAPASTVPGPTLAPQPSSVKTGIYQVLNGSRLCIKAEMGIQLIVQDKESVFSPRRYFNIDPNATQASGNCGTRKSNLLLNFQGGFVNLTFTKDEESYYISEVGAYLTVSDPETVYQGIKHAVVMFQTAVGHSFKCVSEQSLQLSAHLQVKTTDVQLQAFDFEDDHFGNVDECSSDYTIVLPVIGAIVVGLCLMGMGVYKIRLRCQSSGYQRI

SEQ ID NO: 1389 - DNA, 3870 bp, Homo sapien
cagggagacatacaggatttaagaagcccatcatggagaagaccttcaattacagagataaaaagtttttcttgtggaacaagttaacactagatggcagataacagactgaggagtgagctgcttctgactcgattaaaaagggagtgagccataactggcggctgctctttcgccaatgagcctccccaattcctcctgcctcttagaagacaagatgtgtgagggcaacaagaccactatggccagcccccagctgatgcccctggtggtggtcctgagcactatctgcttggtcacagtagggctcaacctgctggtgctgtatgccgtacggagtgagcggaagctccacactgtggggaacctgtacatcgtcagcctctcggtggcggacttgatcgtgggtgccgtcgtcatgcctatgaacatcctctacctgctcatgtccaagtggtcactgggccgtcctctctgcctcttttggctttccatggactatgtggccagcacagcgtccattttcagtgtcttcatcctgtgcattgatcgctaccgctctgtccagcagcccctcaggtaccttaagtatcgtaccaagacccgagcctcggccaccattctgggggcctggtttctctcttttctgtgggttattcccattctaggctggaatcacttcatgcagcagacctcggtgcgccgagaggacaagtgtgagacagacttctatgatgtcacctggttcaaggtcatgactgccatcatcaacttctacctgcccaccttgctcatgctctggttctatgccaagatctacaaggccgtacgacaacactgccagcaccgggagctcatcaataggtccctcccttccttctcagaaattaagctgaggccagagaaccccaagggggatgccaagaaaccagggaaggagtctccctgggaggttctgaaaaggaagccaaaagatgctggtggtggatctgtcttgaagtcaccatcccaaacccccaaggagatgaaatccccagttgtcttcagccaagaggatgatagagaagtagacaaactctactgctttccacttgatattgtgcacatgcaggctgcggcagaggggagtagcagggactatgtagccgtcaaccggagccatggccagctcaagacagatgagcagggcctgaacacacatggggccagcgagatatcagaggatcagatgttaggtgatagccaatccttctctcgaacggactcagataccaccacagagacagcaccaggcaaaggcaaattgaggagtgggtctaacacaggcctggattacatcaagtttacttggaagaggctccgctcgcattcaagacagtatgtatctgggttgcacatgaaccgcgaaaggaaggccgccaaacagttgggttttatcatggcagccttcatcctctgctggatcccttatttcatcttcttcatggtcattgccttctgcaagaactgttgcaatgaacatttgcacatgttcaccatctggctgggctacatcaactccacactgaaccccctcatctaccccttgtgcaatgagaacttcaagaagacattcaagagaattctgcatattcgctcctaagggaggctctgaggggatgcaacaaaatgatccttatgatgtccaacaaggaaatagaggacgaaggcctgtgtgttgccaggcaggcacctgggctttctggaatccaaaccacagtcttaggggcttggtagtttggaaagttcttaggcaccatagaagaacagcagatggcggtgatcagcagagagattgaactttgaggaggaagcagaatctttgcaagaaagtcagacctgtttcttgtaactgggttcaaaaagaaaaaaataataaaaataaaagagagagagaatcagacctgggtggaactctcctgctcctcaggaactatgggagcctcagactcattgtaattcaagctttccgagtcaagtgattgacaactgaagagacacgtggctagggttccactggagaattgaaaaggactcttgagccctcctggaatggagctgtataactgtgcagagactttatccatgccaatagttgctgtccccttccaggggtcaccttgagaggcatgacagctgttccacaggggctatcccttctcagaaaacttctcttctgagcctctttaacagctttctccagaaccagtgtctgaaccaccctggaaattctgccttattatttcttactcaaacatgtttagagtggatagaaaattatgcagcttgcacacccatcatctttaaccccaaatttcctttggctattaaaaaagtggtggcaaaaggcatcctcaaaagaaagagaaatgaaatatttttgaatggttgcacgttaaaaattaaaagaaggaatgggggcagaatgccatatttttgagggctgtactaggtttatctcatttaagccccacaacaccccacaggagggtaattttctaactctagtttgcagaggagcaaattgaggttcagcaaggtgagagaggtacccaaggtcacatagctagttatgtgagaaagttagagtacagatcctctggggtttcagcttattgtagcatattttctccgaaaggcaaaaatgtgcccttttggccgggcatggtagctcaagcctataatcccagcatgttgagaggctgaggtgggcagatcatttgaggccaggagttcaagaccagtctggccaatatggagaaaccttgtctctactaaaaacacaaaaattatctgggcatggtggggcatgcctgtagtcccacttacttgggaggccgaggcacgagaatcgcttgaacccgggaggtggaggttgccgtgagccaagatcacgccactgcactccagcctgggcaacagagcaagactctgtctcaaaaaaaaaaatacaatattttaacaatgtgccctcttaagtgtgcacagatacacatacacggtattcccaagagtggtggcagctcaaaatgatatgtttgagtagacgaacagctgacatggagttcccgtgcacctacggaaggggacgctttgaaggaaccaagtgcatttttatctgtgagttctgttgtgtttgtcaaaaagtcattgtaatctttcatagccatacctggtaagcaaaaactagtaaagacataggaacatgtagttttacttggtgtttatgttgcaatctggttgtgatttatattttaaagcttggtgctaaaccacaatatgtatagcacatggagtgcctgtacaagctgatgttttgtattttgtgttcctctttgcatgatctgtcaaagtgagatatttttacctgcctaaaatatgatgtttaaaagcatactctatgtgatttatttatttctacctttctgagtctcttggactaagaagatgttttgaaatgtaccatcaaatgttaacagagtttgatatgggctttctctttggtttctcatcacatttgtaaatgtcttttcaaaaggatttactttttgtaaaaagcttcattctcactctgctttgcatcccccaaacttcttgttcaaaacggggggagtttaggagactttaatcccggtttcagaagctgcagctggtctgtttccaggtcagaaaccattgttcagaagacctccctgtgagagagttgctcctcagggtccctcaggaccaaagaacactcgaaaagagcacttcacacagacaagtggctaagtgtccattatttaccttgaacaatcaaggcaactagtggagagaactgattgtgagctc

SEQ ID NO: 1390 - protein, 487 aa, Homo sapien
MSLPNSSCLLEDKMCEGNKTTMASPQLMPLVVVLSTICLVTVGLNLLVLYAVRSERKLHTVGNLYIVSLSVADLIVGAVVMPMNILYLLMSKWSLGRPLCLFWLSMDYVASTASIFSVFILCIDRYRSVQQPLRYLKYRTKTRASATILGAWFLSFLWVIPILGWNHFMQQTSVRREDKCETDFYDVTWFKVMTAIINFYLPTLLMLWFYAKIYKAVRQHCQHRELINRSLPSFSEIKLRPENPKGDAKKPGKESPWEVLKRKPKDAGGGSVLKSPSQTPKEMKSPVVFSQEDDREVDKLYCFPLDIVHMQAAAEGSSRDYVAVNRSHGQLKTDEQGLNTHGASEISEDQMLGDSQSFSRTDSDTTTETAPGKGKLRSGSNTGLDYIKFTWKRLRSHSRQYVSGLHMNRERKAAKQLGFIMAAFILCWIPYFIFFMVIAFCKNCCNEHLHMFTIWLGYINSTLNPLIYPLCNENFKKTFKRILHIRS

SEQ ID NO: 1391 - DNA, 5428 bp, Homo sapien
gcggggagccggcggttatctgggcggcggagcgctcacaatgtggcaggagacagaaaagataagatgctcccaagtcccttgcagctctcttcagaagaaaaatcactagtgctctgctcttgccataataccaaacctttttgactcatgctttggtgctgcaacactggaagaattgcacacagtttccaggaatatctttttttcatttgagtgattctttgtggatgagaaaagatttgagtcttaataattaccttgttttaaagctatttctttatagtctgaactgtttaataaattgggccacttaccaatgagccacacagccagttcttgtcaggagctggttgaaaactgtgctgtgcatgtagcaggaatggcacaagaagatagccgtcgtggtcaagtgccatcttccttttatcatggtgccaaccaagaacttgacctgtccaccaaagtgtacaaaagggaatcaggaagtccttattctgtgttagtggacaccaagatgagcaaaccgcatctccatgaaacagaagaacagccatatttcagggagacaagagcagtgtctgacgtgcatgctgttaaggaagaccgggagaattctgatgacacagaggaggaagaggaagaagtctcttacaaaagggagcagatcatagtggaggtaaaccttaataatcaaacattaaatgtatctaaaggggaaaagggtgtctcttctcagtccaaagagactcctgttcttaagacaagcagtgaggaggaagaggaagagagtgaggaagaggccacagatgacagcaatgactatggagagaatgaaaagcagaagaaaaaggagaagatagtagagaaagtcagcgttacacaaaggagaaccaggagagctgcctctgttgccgcagctaccacttcccctactcccagaactacaagaggtcgtaggaagagtgtagagccacctaagcgtaagaagcgggccacaaaggagcccaaagcaccagtccagaaagctaagtgtgaagagaaagagactctgacctgtgagaagtgccccagggtatttaacactcgctggtacctggagaagcacatgaacgttactcataggcgcatgcagatttgtgataaatgtggcaagaagtttgtcctggaaagtgagctgtcccttcaccagcaaacagactgtgaaaaaaacattcagtgtgtttcctgtaacaaatcgttcaagaaactctggtcccttcatgaacatatcaagatcgtccatggatatgcagaaaagaaattttcctgtgaaatttgtgagaagaaattctataccatggctcatgtgcggaaacacatggttgcacacacaaaagacatgccatttacatgcgaaacctgtggaaaatcattcaaacgcagtatgtcactcaaggtgcactccttgcagcattctggagagaagccctttagatgcgagaactgtgacgaaaggtttcagtacaagtaccagctacgctcccacatgagcattcatattgggcacaaacagttcatgtgccagtggtgtggcaaggatttcaacatgaagcagtacttcgacgaacacatgaaaacacacactggagagaaaccctttatctgtgaaatctgtggcaaaagcttcaccagccgccccaacatgaagagacaccgcagaactcacacaggcgagaagccctatccatgtgatgtgtgtggccagcggttccgcttctcgaacatgcttaaggcccacaaggagaagtgctttcgggtgaccagccccgtgaatgtgccacctgctgtccagatcccacttacaacttccccagccaccccagttccttctgtggtgaacacagccacaaccccaacccctccaatcaatatgaatcctgtaagcactcttccccctcggcccatcccccaccccttctcacacctgcacatccacccacaccctcaccacccacaccaccttcccatccctccagtccctcacctcccgccacctccagctctctttaagagtgagcctttaaatcatagaggccagagtgaggacaactttctgcggcacctggcagagaagaacagttcagcacagcatcattaacatccgtctccttagtgtgttctccaggagacacgtccccatgtgtgagcgtgcacagagggagtcggtgagcatttccttagttctcagactctcctccgcctctaccaagagcttcgccagtgtcactgaatcaacagatccaagggaatgaacaagaagactaccttgagctcacagagggactgtcatctaaaccaggggaaccactgaactaaagcccaatttgcttgcattttctgatgacttttataagtttcaaatactcagacttgtggaattttataatttcatatcagctgatgaggtatgcttgcttttatatcccagacttctcctcaaagaggggataggcctggtttcctttgtactaatcgggaaggctgtgagattaatccagagcattaattgtatcactgtgtatggtaaggaattcttttcagcttttggtgccagctacagagttgagctggccatgtttcacagtatatcaagcattatagagaaagacagaaattttcttctttgtgtagctctcctaacgcactctttattttactacagaaattattttagagtttttgtatagacttctttggtagtctgtttctaaaatgaaatgtatttcaataagcagtgtaattttttcagtgtagctgaacctatgttgtaaaatagaaaaaaatttttataatcatcaaaatgtgattcttaaagatgcatataacttctataattcaaagctattcttacatccgtacaactcaaaaggtgcttcagagactagatgtatctgagagggtctccagaccaggttactgcaaaaatgaggttttgctttcaggatttggcgtaaatacttggtagttttgacatctctgcttaacactcaagagaggctccctaatgtgctcctgtcctccatgttctgcttggcttcgttagtgcattacatgaaatgatttgcaggggatggggccttttccagggaagtcacctaaagcttgcatgttttgaaaatttgaataaggctgtttgctgacaggaggaggaagtagtggagatcatttcatctcagtcacgtctgtttctcacttcccttaggaattgtgttgatgtttaacttttatgggatgacaaattgaaatcgctcattttgaggttgctttatttttctagaattgttataagaagctaaaatagtaaacttaaaatcacaaacatgacattgctgatagtggctgagaaattcagatgagaagacaaattggttatgaattttgaaatatctattatatgtaaaatgtggatatgttcacaaccttgagctattttaacacagtttaaatatagtgagggaaaactcctaagttttactgccctgtcctctgcaaattatgtaataccagcattcttaggcgataaagagagcagcacctctagtacctttaggcagattactttttcaagtttggggaacttcaaaagaccataatcaaccaggagcttattataggaaaggctgaacagaagggctagtgtattgattacacttaacagatcatatttatccagactcagtatagcttaaaattttgtatttctttatctgagagaactgagttcccaggctaaatcacttacctcccaccccctctccaattttttttttaagagacaaggtcttgctatgttgcccaggctagagtgcagtggctattcacaggtgcagttatagcacactacagcctccaactcttgggttcaagcaaccctgcctcagctaaccaagtagctgggactacaggtgcatgctaccatgcccagtccattttttaatcttgaaatttcttcatttttctttcttcggtttcttaaaatctttgcctgaatcagaacgctggcttttatttatttttttatttttaatattaaatgtgcagatatgcttcgagcacttttctaactaatgagctctgtggtaagaaaaaatgaactctttcaattgagattaagtccatatttttcaaacatcacgttctctattggctttttggtttagtgtttctaaattttctccttctgattttgcctgtcttatataatgagcataggaaaattttggaatgaggcagaaaagtatatcaagacatacttcctggttttggatgtaagttttaaagaatggtatttttaatatttgtacacattctttgagcacccaggtacccaagccaataaggaaagttaattccttgcatatgactgttatatctttagtggttgtctccctctccctccacagtctccttggcattccatgacaagtttgtcaacctacacttttatatagacatgtcattatttcatggtcaagcctgtagtattaaaatgatttttttaaaagatgtaaactgtgcttagttaattggttatattttgttctgtttttttttttttttttttttttttttgaggcagagtcttgttctgttgcctgggctggagtgcagtggcgtgatcttggctcactgcaacccccgccccccgggttcaagtgattctcctgcctcagcctcccgagtagctggaattacaggcatgcgccagcacgcccggctaagttttgtatttttggcagagatggggtttcaccatattggccaggctggtctcaaactcctgaccttgtgatccgcccacctcagcctccgaaagtgctgggattacaggcgtgagccaccacgtccaactgccttattttgttctgaataaatttacagtattgggcagcaattctggattctagacttgagaccacagaatcaaccatttcatgaggttgtactgtaattatacactggaatattcaggtagtcatctttgatttttcattcaagtaaatatagccataagaaaatatctgctatacaggaaaaccagtattaagcaaataccaccatccttaacagaaacaaaaatatatatatatattatttttaaaaattagcattgtcatacagtacaattcttagtgaagtgtattgtggaacaatttagaaacttcctttttttcccctagattaaggatactttccttgacttgagacttgtggtcttcaggaaaactactcagaatataatgactcctcatcagtatcatattgtatataaataatgaaatgcattaagaatattcacaacattgaacccaggaggcggagcttgcagtgagccgagattgcgccactgcgctccagcctgggcaacagagcgagactccatctc

SEQ ID NO: 1392 - protein, 606 aa, Homo sapien
MSHTASSCQELVENCAVHVAGMAQEDSRRGQVPSSFYHGANQELDLSTKVYKRESGSPYSVLVDTKMSKPHLHETEEQPYFRETRAVSDVHAVKEDRENSDDTEEEEEEVSYKREQIIVEVNLNNQTLNVSKGEKGVSSQSKETPVLKTSSEEEEEESEEEATDDSNDYGENEKQKKKEKIVEKVSVTQRRTRRAASVAAATTSPTPRTTRGRRKSVEPPKRKKRATKEPKAPVQKAKCEEKETLTCEKCPRVFNTRWYLEKHMNVTHRRMQICDKCGKKFVLESELSLHQQTDCEKNIQCVSCNKSFKKLWSLHEHIKIVHGYAEKKFSCEICEKKFYTMAHVRKHMVAHTKDMPFTCETCGKSFKRSMSLKVHSLQHSGEKPFRCENCDERFQYKYQLRSHMSIHIGHKQFMCQWCGKDFNMKQYFDEHMKTHTGEKPFICEICGKSFTSRPNMKRHRRTHTGEKPYPCDVCGQRFRFSNMLKAHKEKCFRVTSPVNVPPAVQIPLTTSPATPVPSVVNTATTPTPPINMNPVSTLPPRPIPHPFSHLHIHPHPHHPHHLPIPPVPHLPPPPALFKSEPLNHRGQSEDNFLRHLAEKNSSAQHH

SEQ ID NO: 1393 - DNA, 2916 bp, Homo sapien
  Unsure 2534, 2536: Unknown base
ggggagctcggcgtcccgctccctccgcggctcatggcgacgactctcggcacatccgggaccctccggccgtggcggccgaggcgccggctgctcgggccccagccccggccgctgtggtgactccgccgcgcctcgccgtcgcccccgtgccgcccgccgcccccgccgcccccgccgccggggacatgtctaaccccggaggccggaggaacgggcccgtcaagctgcgcctgacagtactctgtgcaaaaaacctggtgaaaaaggattttttccgacttcctgatccatttgctaaggtggtggttgatggatctgggcaatgccattctacagatactgtgaagaatacgcttgatccaaagtggaatcagcattatgacctgtatattggaaagtctgattcagttacgatcagtgtatggaatcacaagaagatccataagaaacaaggtgctggatttctcggttgtgttcgtcttctttccaatgccatcaaccgcctcaaagacactggttatcagaggttggatttatgcaaactcgggccaaatgacaatgatacagttagaggacagatagtagtaagtcttcagtccagagaccgaataggcacaggaggacaagttgtggactgcagtcgtttatttgataacgatttaccagacggctgggaagaaaggagaaccgcctctggaagaatccagtatctaaaccatataacaagaactacgcaatgggagcgcccaacacgaccggcatccgaatattctagccctggcagacctcttagctgctttgttgatgagaacactccaattagtggaacaaatggtgcaacatgtggacagtcttcagatcccaggctggcagagaggagagtcaggtcacaacgacatagaaattacatgagcagaacacatttacatactcctccagacctaccagaaggctatgaacagaggacaacgcaacaaggccaggtgtatttcttacatacacagactggtgtgagcacatggcatgatccaagagtgcccagggatcttagcaacatcaattgtgaagagcttggtccattgcctcctggatgggagatccgtaatacggcaacaggcagagtttatttcgttgaccataacaacagaacaacacaatttacagatcctcggctgtctgctaacttgcatttagttttaaatcggcagaaccaattgaaagaccaacagcaacagcaagtggtatcgttatgtcctgatgacacagaatgcctgacagtcccaaggtacaagcgagacctggttcagaaactaaaaattttgcggcaagaactttcccaacaacagcctcaggcaggtcattgccgcattgaggtttccagggaagagatttttgaggaatcatatcgacaggtcatgaaaatgagaccaaaagatctctggaagcgattaatgataaaatttcgtggagaagaaggccttgactatggaggcgttgccagggaatggttgtatctcttgtcacatgaaatgttgaatccatactatggcctcttccagtattcaagagatgatatttatacattgcagatcaatcctgattctgcagttaatccggaacatttatcctatttccactttgttggacgaataatgggaatggctgtgtttcatggacattatattgatggtggtttcacattgcctttttataagcaattgcttgggaagtcaattaccttggatgacatggagttagtagatccggatcttcacaacagtttagtgtggatacttgagaatgatattacaggtgttttggaccataccttctgtgttgaacataatgcatatggtgaaattattcagcatgaacttaaaccaaatggcaaaagtatccctgttaatgaagaaaataaaaaagaatatgtcaggctctatgtgaactggagatttttacgaggcattgaggctcaattcttggctctgcagaaaggatttaatgaagtaattccacaacatctgctgaagacatttgatgagaaggagttagagctcattatttgtggacttggaaagatagatgttaatgactggaaggtaaacacccggttaaaacactgtacaccagacagcaacattgtcaaatggttctggaaagctgtggagttttttgatgaagagcgacgagcaagattgcttcagtttgtgacaggatcctctcgagtgcctctgcagggcttcaaagcattgcaaggtgctgcaggcccgagactctttaccatacaccagattgatgcctgcactaacaacctgccgaaagcccacacttgcttcaatcgaatagacattccaccctatgaaagctatgaaaagctatatgaaaagctgctaacagccattgaagaaacatgtggatttgctgtggaatgacaagcttcaaggatttacccaggactctatttatacaaccctgactgacagcctcctttcagcagagtttcaaagaatatgctgaaatacaggaaaacncncccccccccccccttttttttttttttttacattttaggacactgtgaggggaaaggacaattttgaaattccttttcaaggaaaaaaaggtctttatgctttgccatgaggccacattcagctgctatttaaacttaatatcttgaacctaaagaatgctgacttttcctacatttccagagttaggcagtattctacacttaaagactactactatttttataaaaggtaatctattcaaatttcttcacagatttcaagtctctcaaacatcaagacaacttcagcagtcggtacaagtcacatttcattttgattgaatacatgatcttgaacagctcctgtacttgctctttgtaaaaaaaaataaaattatttt

SEQ ID NO: 1394 - protein, 748 aa, Homo sapien
  Unsure 2534, 2536: Unknown amino acid
MSNPGGRRNGPVKLRLTVLCAKNLVKKDFFRLPDPFAKVVVDGSGQCHSTDTVKNTLDPKWNQHYDLYIGKSDSVTISVWNHKKIHKKQGAGFLGCVRLLSNAINRLKDTGYQRLDLCKLGPNDNDTVRGQIVVSLQSRDRIGTGGQVVDCSRLFDNDLPDGWEERRTASGRIQYLNHITRTTQWERPTRPASEYSSPGRPLSCFVDENTPISGTNGATCGQSSDPRLAERRVRSQRHRNYMSRTHLHTPPDLPEGYEQRTTQQGQVYFLHTQTGVSTWHDPRVPRDLSNINCEELGPLPPGWEIRNTATGRVYFVDHNNRTTQFTDPRLSANLHLVLNRQNQLKDQQQQQVVSLCPDDTECLTVPRYKRDLVQKLKILRQELSQQQPQAGHCRIEVSREEIFEESYRQVMKMRPKDLWKRLMIKFRGEEGLDYGGVAREWLYLLSHEMLNPYYGLFQYSRDDIYTLQINPDSAVNPEHLSYFHFVGRIMGMAVFHGHYIDGGFTLPFYKQLLGKSITLDDMELVDPDLHNSLVWILENDITGVLDHTFCVEHNAYGEIIQHELKPNGKSIPVNEENKKEYVRLYVNWRFLRGIEAQFLALQKGFNEVIPQHLLKTFDEKELELIICGLGKIDVNDWKVNTRLKHCTPDSNIVKWFWKAVEFFDEERRARLLQFVTGSSRVPLQGFKALQGAAGPRLFTIHQIDACTNNLPKAHTCFNRIDIPPYESYEKLYEKLLTAIEETCGFAVE

SEQ ID NO: 1395 - DNA, 2412 bp, Homo sapien
caggccaggactccacaaggctggtcccctgccctggagcaacttaaacaggccctctggccagcctggaaccctgagatggcctccagctcaggcagcagtcctcgcccggcccctgatgagaatgagtttccctttgggtgccctcccaccgtctgccaggacccaaaggagcccagggctctctgctgtgcaggctgtctctctgagaacccgaggaatggcgaggatcagatctgccccaaatgcagaggggaagacctccagtctataagcccaggaagccgtcttcgaactcaggagaaggctcaccccgaggtggctgaggctggaattgggtgcccctttgcaggtgtcggctgctccttcaagggaagcccacagtctgtgcaagagcatgaggtcacctcccagacctcccacctaaacctgctgttggggttcatgaaacagtggaaggcccggctgggctgtggcctggagtctgggcccatggccctggagcagaacctgtcagacctgcagctgcaggcagccgtggaagtggcgggggacctggaggtcgattgctaccgggcaccctgctccgagagccaggaggagctggccctgcagcacttcatgaaggagaagcttctggctgagctggaggggaagctgcgtgtgtttgagaacattgttgctgtcctcaacaaggaggtggaggcctcccacctggccctggccacctctatccaccagagccagctggaccgtgagcgcatcctgagcttggagcagagggtggtggagcttcagcagaccctggcccagaaagaccaggccctgggcaagctggagcagagcttgcgcctcatggaggaggcctccttcgatggcactttcctgtggaagatcaccaatgtcaccaggcggtgccatgagtcggcctgtggcaggaccgtcagcctcttctccccagccttctacactgccaagtatggctacaagttgtgcctgcggctgtacctgaatggagatggcactggaaagagaacccatctgtcgctcttcatcgtgatcatgagaggggagtatgatgcgctgctgccgtggcctttccggaacaaggtcaccttcatgctgctggaccagaacaaccgtgagcacgccattgacgccttccggcctgacctaagctcagcgtccttccagaggccccagagtgaaaccaacgtggccagtggatgcccactcttcttccccctcagcaaactgcagtcacccaagcacgcctacgtgaaggacgacacaatgttcctcaagtgcattgtggagaccagcacttagggtgggcggggctcctgagggagctccaactcagaagggagctagccagaggactgtgatgccctgcccttggcacccaagacctcagggcacaaagatgggtgaaggctggcatgatccaagcaagactgaggggtcgacttcgggctggccatctggttaggatggcaggacgtgggctgggcccacaaaggcaaagggtccagaaggagacaggcagagctgctcccctctgcacggaccatgcgacactgggaggccagtgagccactccggccccgaatgttgaggtggactctcaccaaatgagaagaaaatggaaccaggcttggaaccgtaggacccaagcagagaagctctcgggctaggaagatctctgcagggccgccagggagacctggacacaggcctgctctctttttctccagggtcagaaacaggaccgggtggaagggatggggtgccagtttgaatgcagtctgtccaggctcgtcattggaggtgaacaagcaaacccagagggctccactaggacttcaaattgggggttggatttgaagacttttaagtttccttccagcccagaaagtctctcattctaggcctcctggcccaggtgagtcctagagctacaggggttctggaaacattcaggagcttcctgtcctcccagctcctcactcaccttcagtaacccccactggactgacctggtccacagggcacctgccaccctgggcctggcagctcagcttccccaacacgcaggagcacacccagcccccacatcctgtgcctccatcagctaaacaccacgtcacttcatgcaggtgaaacccagtcactgtgagctcccaggtgcagccagaggcacctcaagaagaagaggggcataaactttcctcttcctgcctagaggccccacctttggtgctttccagaatcccgtaacacctgattaactgaggcatccacttctttcagcagactgatcaggacctccaagccactgagcaatgtataaccccaaagaaataatttttagaatctctttcgaagttttcctaaaaaaaaaaaaaaaaa

SEQ ID NO: 1396 - protein, 416 aa, Homo sapien
MASSSGSSPRPAPDENEFPFGCPPTVCQDPKEPRALCCAGCLSENPRNGEDQICPKCRGEDLQSISPGSRLRTQEKAHPEVAEAGIGCPFAGVGCSFKGSPQSVQEHEVTSQTSHLNLLLGFMKQWKARLGCGLESGPMALEQNLSDLQLQAAVEVAGDLEVDCYRAPCSESQEELALQHFMKEKLLAELEGKLRVFENIVAVLNKEVEASHLALATSIHQSQLDRERILSLEQRVVELQQTLAQKDQALGKLEQSLRLMEEASFDGTFLWKITNVTRRCHESACGRTVSLFSPAFYTAKYGYKLCLRLYLNGDGTGKRTHLSLFIVIMRGEYDALLPWPFRNKVTFMLLDQNNREHAIDAFRPDLSSASFQRPQSETNVASGCPLFFPLSKLQSPKHAYVKDDTMFLKCIVETST

SEQ ID NO: 1397 - DNA, 1279 bp, Homo sapien
agaaactcagagaccaagtccattgagagactgaggggaaagagaggagagaaagaaaaagagagtgggaacagtaaagagaaaggaagacaacctccagagaaagcccccggagacgtctctctgcagagaggcggcagcacccggctcacctgcgaagcgcctgggaagcgagtgcccctaacatgcggctgccgctgcttgtgtccgcgggagtcctgctggtggctctcctgccctgcccgccatgcagggcgctcctgagccgcgggccggtcccgggagctcggcaggcgccgcagcaccctcagcccttggatttcttccagccgccgccgcagtccgagcagccccagcagccgcaggctcggccggtcctgctccgcatgggagaggagtacttcctccgcctggggaacctcaacaagagcccggccgctcccctttcgcccgcctcctcgctcctcgccggaggcagcggcagccgcccttcgccggaacaggcgaccgccaactttttccgcgtgttgctgcagcagctgctgctgcctcggcgctcgctcgacagccccgcggctctcgcggagcgcggcgctaggaatgccctcggcggccaccaggaggcaccggagagagaaaggcggtccgaggagcctcccatctccctggatctcaccttccacctcctccgggaagtcttggaaatggccagggccgagcagttagcacagcaagctcacagcaacaggaaactcatggagattattgggaaataaaacggtgcgtttggccaaaaagaatctgcatttagcacaaaaaaaatttaaaaaaatacagtattctgtaccatagcgctgctcttatgccatttgtttatttttatatagcttgaaacatagagggagagagggagagagcctataccccttacttagcatgcacaaagtgtattcacgtgcagcagcaacacaatgttattcgttttgtctacgtttagtttccgtttccaggtgtttatagtggtgttttaaagagaatgtagacctgtgagaaaacgttttgtttgaaaaagcagacagaagtcactcaattgtttttgttgtggtctgagccaaagagaatgccattctcttgggtgggtaagactaaatctgtaagctctttgaaacaactttctcttgtaaacgtttcagtaataaaacatctttccagtccttggtcagtttggttgtgtaagagaatgttgaatacttatatttttaataaaagttgcaaaggt

SEQ ID NO: 1398 - protein, 196 aa, Homo sapien
MRLPLLVSAGVLLVALLPCPPCRALLSRGPVPGARQAPQHPQPLDFFQPPPQSEQPQQPQARPVLLRMGEEYFLRLGNLNKSPAAPLSPASSLLAGGSGSRPSPEQATANFFRVLLQQLLLPRRSLDSPAALAERGARNALGGHQEAPERERRSEEPPISLDLTFHLLREVLEMARAEQLAQQAHSNRKLMEIIGK

SEQ ID NO: 1399 - DNA, 2254 bp, Homo sapien
aaagaaccgcacaccacagactccctccagctctttgtgtgtggctctctcagggtccaacaagagcaagctgtgggtctgtgagtgtttatgtgtgcttttattcacttcacacttattgaaaagtgtgtatgtgagagggtggggtgtgtgtgtcaaagagagtgaggaagagaaggagagagagatcaattgattctgcagcctcagctccagcatccctcagttgggagcttccaaagccgggtgatcacttggggtgcatagctcggagatgcagtccccctggaaaatccttacggtggcgcctctattcttgctcctgtctcttcagtcctcggcctctccagccaacgatgaccagtccaggcccagcctctcgaatgggcacacctgtgtagggtgtgtgctggtggtgtctgtaatagaacagcttgctcaagttcacaactcgacggtccaggcctcgatggagagactgtgcagctacctgcctgaaaaactgttcttgaaaaccacctgctatttagtcattgacaagtttggatcagacatcataaaactgcttagcgcagatatgaatgctgatgtggtatgtcacactctggagttttgtaaacagaacactggccaaccattgtgtcatctctaccctcttcccaaggagacatggaaatttacactacagaaggcaagacaaattgtcaagaagtccccgattctgaaatattctagaagtggttctgacatttgttcactcccggttttggccaagatctgccagaaaattaaattagctatggaacagtctgtgccattcaaagatgtggattcagacaaatacagcgttttcccaacactgcggggctatcactggcgggggagagactgtaatgacagcgacgagtcagtgtacccaggtagaaggccgaacaactgggatgtccatcaggattcaaactgtaatggcatttggggtgtcgatccaaaagatggagttccatatgagaagaaattctgtgaaggttcacagcccaggggaatcattttgctgggagactcagctggggctcattttcacatctctcctgaatggatcacagcgtcgcagatgtctttgaactctttcatcaatctaccaacagcccttaccaacgagcttgactggccccaactctctggtgctacaggatttctggactccactgttggaattaaagaaaaatctatttaccttcgcttatggaaaagaaaccactgtaatcacagggactaccagaatatttcaagaaatggtgcatcttcccgaaacctgaagaaatttatagaaagcttgtctagaaacaaggtgttggactatcccgccatcgttatatatgccatgattggaaatgatgtctgcagtgggaagagtgacccagtcccagccatgaccactcctgagaaactctactccaacgtcatgcagactctgaagcatctaaattcccacctgcccaatggcagccatgttattttgtatggcttaccagatggaacctttctctgggataatttgcacaacagatatcatcctctcggccagctaaataaagacatgacctatgcgcagttgtactccttcctgaactgcctccaggtcagcccctgccacggctggatgtcttccaacaagacgttgcggactctcacttcagagagagcagagcaactctccaacacactgaaaaaaattgcagccagtgagaaatttacaaacttcaatcttttctacatggattttgccttccatgaaatcatacaggagtggcagaagagaggcggacagccctggcagctcatcgagcccgtggatggattccaccccaacgaggtggctttgctgttgttggcggatcatttctggaaaaaggtgcagctccagtggccccaaatcctgggaaaggagaatccgttcaacccccagattaaacaggtgtttggagaccaaggcgggcactgagcctctcaggagcatgcacccctggggagcacagggaggcagaggcttgggtaaactcattccacaaaccctatgggggctgccacgtcacaggcccaaaggactcttcttcagcagcatctttgcaaaatgtctttctctcaatgaagagcatatctggacgactgtgcaatgctgtgtgctcccggggatcagtaacccttccgctgttcctgaaataacctttcataaagtgctttgggtgccattcca

SEQ ID NO: 1400 - protein, 575 aa, Homo sapien
MQSPWKILTVAPLFLLLSLQSSASPANDDQSRPSLSNGHTCVGCVLVVSVIEQLAQVHNSTVQASMERLCSYLPEKLFLKTTCYLVIDKFGSDIIKLLSADMNADVVCHTLEFCKQNTGQPLCHLYPLPKETWKFTLQKARQIVKKSPILKYSRSGSDICSLPVLAKICQKIKLAMEQSVPFKDVDSDKYSVFPTLRGYHWRGRDCNDSDESVYPGRRPNNWDVHQDSNCNGIWGVDPKDGVPYEKKFCEGSQPRGIILLGDSAGAHFHISPEWITASQMSLNSFINLPTALTNELDWPQLSGATGFLDSTVGIKEKSIYLRLWKRNHCNHRDYQNISRNGASSRNLKKFIESLSRNKVLDYPAIVIYAMIGNDVCSGKSDPVPAMTTPEKLYSNVMQTLKHLNSHLPNGSHVILYGLPDGTFLWDNLHNRYHPLGQLNKDMTYAQLYSFLNCLQVSPCHGWMSSNKTLRTLTSERAEQLSNTLKKIAASEKFTNFNLFYMDFAFHEIIQEWQKRGGQPWQLIEPVDGFHPNEVALLLLADHFWKKVQLQWPQILGKENPFNPQIKQVFGDQGGH

SEQ ID NO: 1401 - DNA, 1482 bp, Homo sapien
cggaagcggcggagtagagcggagcctggcgggcgtgggaacccaggccccgccgaggcggccaggaggtgagatggcagctgggcaaaatgggcacgaagagtgggtgggcagcgcatacctgtttgtggagtcctcgctggacaaggtggtcctgtcggatgcctacgcgcacccccagcagaaggtggcagtgtacagggctctgcaggctgccttggcagagagcggcgggagcccggacgtgctgcagatgctgaagatccaccgcagcgacccgcagctgatcgtgcagctgcgattctgcgggcggcagccctgtggccgcttcctccgcgcctaccgcgagggggcgctgcgcgccgcgctgcagaggagcctggcggccgcgctcgcccagcactcggtgccgctgcaactggagctgcgcgccggcgccgagcggctggacgctttgctggcggacgaggagcgctgtttgagttgcatcctagcccagcagcccgaccggctccgggatgaagaactggctgagctggaggatgcgctgcgaaatctgaagtgcggctcgggggcccggggtggcgacggggaggtcgcttcggcccccttgcagcccccggtgccctctctgtcggaggtgaagccgccgccgccgccgccacctgcccagacttttctgttccagggtcagcctgtagtgaatcggccgctgagcctgaaggaccaacagacgttcgcgcgctctgtgggtctcaaatggcgcaaggtggggcgctcactgcagcgaggctgccgggcgctgcgggacccggcgctggactcgctggcctacgagtacgagcgcgagggactgtacgagcaggccttccagctgctgcggcgcttcgtgcaggccgagggccgccgcgccacgctgcagcgcctggtggaggcactcgaggagaacgagctcaccagcctggcagaggacttgctgggcctgaccgatcccaatggcggcctggcctagaccaggggtgcagccagcttttggagaacctggatggccttagggttccttctgcggctattgctgaacccctgtccatccacgggaccctgaaactccacttggcctatctgctggacctgctggggcagagttgattgccttccccaggagccagaccactgggggtgcatcattggggattctgcctcaggtactttgatagagtgtggggtgggggggacctgctttggagatcagcctcaccttctcccatcccagaagcggggcttacagccagcccttacagtttcactcatgaagcaccttgatctttggtgtcctggacttcatcctgggtgctgcagatactgcagtgaagtaaaacaggaatcaatcttgcctgcccccagctcacactcagcgtgggaccccgaatgttaagcaatgataataaagtataacacggaaaaaaaaaaaaaaaaaaaaaa

SEQ ID NO: 1402 - protein, 312 aa, Homo sapien
MAAGQNGHEEWVGSAYLFVESSLDKVVLSDAYAHPQQKVAVYRALQAALAESGGSPDVLQMLKIHRSDPQLIVQLRFCGRQPCGRFLRAYREGALRAALQRSLAAALAQHSVPLQLELRAGAERLDALLADEERCLSCILAQQPDRLRDEELAELEDALRNLKCGSGARGGDGEVASAPLQPPVPSLSEVKPPPPPPPAQTFLFQGQPVVNRPLSLKDQQTFARSVGLKWRKVGRSLQRGCRALRDPALDSLAYEYEREGLYEQAFQLLRRFVQAEGRRATLQRLVEALEENELTSLAEDLLGLTDPNGGLA

SEQ ID NO: 1403 - DNA, 6928 bp, Homo sapien
ggcgggagcgcgtgcgcccgaggacccggccggaaggcttgcgccagctcaggatgaggacaggctgggcgacccctcgccgcccggcggggctcctcatgctgctcttctggttcttcgatctcgcggagccctctggccgcgcagctaatgaccccttcaccatcgtccatggaaatacgggcaagtgcatcaagccagtgtatggctggatagtagcagacgactgtgatgaaactgaggacaagttatggaagtgggtgtcccagcatcggctctttcatttgcactcccaaaagtgccttggcctcgatattaccaaatcggtaaatgagctgagaatgttcagctgtgactccagtgccatgctgtggtggaaatgtgagcaccactctctgtacggagctgcccggtaccggctggctctgaaggatggacatggcacagcaatctcaaatgcatctgatgtctggaagaaaggaggctcagaggaaagcctttgtgaccagccttatcatgagatctataccagagatgggaactcttatgggagaccttgtgaatttccattcttaattgatgggacctggcatcatgattgcattcttgatgaagatcatagtgggccatggtgtgccaccaccttaaattatgaatatgaccgaaagtggggcatctgcttaaagcctgaaaacggttgtgaagataattgggaaaagaacgagcagtttggaagttgctaccaatttaatactcagacggctctttcttggaaagaagcttatgtttcatgtcagaatcaaggagctgatttactgagcatcaacagtgctgctgaattaacttaccttaaagaaaaagaaggcattgctaagattttctggattggtttaaatcagctatactctgctagaggctgggaatggtcagaccacaaaccattaaactttctcaactgggatccagacaggcccagtgcacctactataggtggctccagctgtgcaagaatggatgctgagtctggtctgtggcagagcttttcctgtgaagctcaactgccctatgtctgcaggaaaccattaaataatacagtggagttaacagatgtctggacatactcagatacccgctgtgatgcaggctggctgccaaataatggattttgctatctgctggtaaatgaaagtaattcctgggataaggcacatgcgaaatgcaaagccttcagtagtgacctaatcagcattcattctctagcagatgtggaggtggttgtcacaaaactccataatgaggatatcaaagaagaagtgtggataggccttaagaacataaacataccaactttatttcagtggtcagatggtactgaagttactctaacatattgggatgagaatgagccaaatgttccctacaataagacgcccaactgtgtttcctacttaggagagctaggtcagtggaaagtccaatcatgtgaggagaaactaaaatatgtatgcaagagaaagggagaaaaactgaatgacgcaagttctgataagatgtgtcctccagatgagggctggaagagacatggagaaacctgttacaagatttatgaggatgaggtcccttttggaacaaactgcaatctgactatcactagcagatttgagcaagaatacctaaatgatttgatgaaaaagtatgataaatctctaagaaaatacttctggactggcctgagagatgtagattcttgtggagagtataactgggcaactgttggtggaagaaggcgggctgtaaccttttccaactggaattttcttgagccagcttccccgggcggctgcgtggctatgtctactggaaagtctgttggaaagtgggaggtgaaggactgcagaagcttcaaagcactttcaatttgcaagaaaatgagtggaccccttgggcctgaagaagcatcccctaagcctgatgacccctgtcctgaaggctggcagagtttccccgcaagtctttcttgttataaggtattccatgcagaaagaattgtaagaaagaggaactgggaagaagctgaacgattctgccaagcccttggagcacacctttctagcttcagccatgtggatgaaataaaggaatttcttcactttttaacggaccagttcagtggccagcattggctgtggattggtttgaataaaaggagcccagatttacaaggatcctggcaatggagtgatcgtacaccagtgtctactattatcatgccaaatgagtttcagcaggattatgacatcagagactgtgctgctgtcaaggtatttcataggccatggcgaagaggctggcatttctatgatgatagagaatttatttatttgaggccttttgcttgtgatacaaaacttgaatgggtgtgccaaattccaaaaggccgtactccaaaaacaccagactggtacaatccagaccgtgctggaattcatggacctccacttataattgaaggaagtgaatattggtttgttgctgatcttcacctaaactatgaagaagccgtcctgtactgtgccagcaatcacagctttcttgcgactataacatcttttgtgggactaaaagccatcaaaaacaaaatagcaaatatatctggtgatggacagaagtggtggataagaattagcgagtggccaatagatgatcattttacatactcacgatatccatggcaccgctttcctgtgacatttggagaggaatgcttgtacatgtctgccaagacttggcttatcgacttaggtaaaccaacagactgtagtaccaagttgcccttcatctgtgaaaaatataatgtttcttcgttagagaaatacagcccagattctgcagctaaagtgcaatgttctgagcaatggattccttttcagaataagtgttttctaaagatcaaacccgtgtctctcacattttctcaagcaagcgatacctgtcactcctatggtggcacccttccttcagtgttgagccagattgaacaagactttattacatccttgcttccggatatggaagctactttatggattggtttgcgctggactgcctatgaaaagataaacaaatggacagataacagagagctgacgtacagtaactttcacccattattggttagtgggaggctgagaataccagaaaatttttttgaggaagagtctcgctaccactgtgccctaatactcaacctccaaaaatcaccgtttactgggacgtggaattttacatcctgcagtgaacgccactttgtgtctctctgtcagaaatattcagaagttaaaagcagacagacgttgcagaatgcttcagaaactgtaaagtatctaaataatctgtacaaaataatcccaaagactctgacttggcacagtgctaaaagggagtgtctgaaaagtaacatgcagctggtgagcatcacggacccttaccagcaggcattcctcagtgtgcaggcgctccttcacaactcttccttatggatcggactcttcagtcaagatgatgaactcaactttggttggtcagatgggaaacgtcttcattttagtcgctgggctgaaactaatgggcaactcgaagactgtgtagtattagacactgatggattctggaaaacagttgattgcaatgacaatcaaccaggtgctatttgctactattcaggaaatgagactgaaaaagaggtcaaaccagttgacagtgttaaatgtccatctcctgttctaaatactccgtggataccatttcagaactgttgctacaatttcataataacaaagaataggcatatggcaacaacacaggatgaagttcatactaaatgccagaaactgaatccaaaatcacatattctgagtattcgagatgaaaaggagaataactttgttcttgagcaactgctgtacttcaattatatggcttcatgggtcatgttaggaataacttatagaaataattctcttatgtggtttgataagaccccactgtcatatacacattggagagcaggaagaccaactataaaaaatgagaagtttttggctggtttaagtactgacggcttctgggatattcaaacctttaaagttattgaagaagcagtttattttcaccagcacagcattcttgcttgtaaaattgaaatggttgactacaaagaagaacataatactacactgccacagtttatgccatatgaagatggtatttacagtgttattcaaaaaaaggtaacatggtatgaagcattaaacatgtgttctcaaagtggaggtcacttggcaagcgttcacaaccaaaatggccagctctttctggaagatattgtaaaacgtgatggatttccactatgggttgggctctcaagtcatgatggaagtgaatcaagttttgaatggtctgatggtagtacatttgactatatcccatggaaaggccaaacatctcctggaaattgtgttctcttggatccaaaaggaacttggaaacatgaaaaatgcaactctgttaaggatggtgctatttgttataaacctacaaaatctaaaaagctgtcccgtcttacatattcatcaagatgtccagcagcaaaagagaatgggtcacggtggatccagtacaagggtcactgttacaagtctgatcaggcattgcacagtttttcagaggccaaaaaattgtgttcaaaacatgatcactctgcaactatcgtttccataaaagatgaagatgagaataaatttgtgagcagactgatgagggaaaataataacattaccatgagagtttggcttggattatctcaacattctgttgaccagtcttggagttggttagatggatcagaagtgacatttgtcaaatgggaaaataaaagtaagagtggtgttggaagatgtagcatgttgatagcttcaaatgaaacttggaaaaaagttgaatgtgaacatggttttggaagagttgtctgcaaagtgcctctgggccctgattacacagcaatagctatcatagttgccacactaagtatcttagttctcatgggcggactgatttggttcctcttccaaaggcaccgtttgcacctggcgggtttctcatcagttcgatatgcacaaggagtgaatgaagatgagattatgcttccttctttccatgactaaattcttctaaaagttttctaatttgcactaatgtggttatggagaaattagtcacttaaaatgtcccagtgtcagtatttactctgctccaaagtagaactcttaaatactttttcagttgtttagatcttaggcatgtgctggtatccacagttaattccctgctaaatgccatgtttatcaccctaattaatagaatggaggggactccaaagctggaactgaagtccaaattgtttgtacagtaatatgtttaatgttcattttctctgtatgaatgtgattggtaactaggatatgtatattttaatagaatttttaacaaaacttcttagaaaattaaaataggcatattactaggtgacatgtctactttttaatttttaagagcatccggccaaatgcaaaattagtacctcaaagtaaaaattgaactgtaaactctatcagcattgtttcaaaatagtcatttttagcactggggaaaaataaacaataagacatgcttactttttaatttttatttttttgagactgagtctctctctgttgcccaggctggagtacaatggcgtgatctcggctcactgcaaatctccgcctcccaggttcaagcgattctcctgcctcagcctcctgagtagctgggattacaggcaactgccaccatgcccggctaatttttgtatttttagtagagatggggtttcaccatgttggccaggctggtctcgaactcgtgaccgcagtgatcctcccgcctcggcctcccaaagtgctgggattacaggcatgagccaccgcgcctggcctctgcttactttttatatagcaaaatgattccccttggcaagatgtttcttatattattccaaagttatttcataccattattatgtaaatatgaagagtttttttctgtttataattgtttataaaacaatgacttttaaagatttagtgcttaacattttcccaagtgtgggaacattatttttagattgagtaggtaccttgtagcagtgtgctttgcattttctgatgtattacatgactgtttcttttgtaaagagaatcaactaggtatttaagactgataattttacaatttatatgcttcacatagcatgtcaacttttgactaagaattttgttttacttttttaacatgtgttaaacagagaaagggtccatgaaggaaagtgtatgagttgcatttgtaaaaatgagactttttcagtggaactctaaaccttgtgatgactactaacaaatgtaaaattatgagtgattaagaaaacattgctttgtggttatcactttaagttttgacacctagattatagtcttagtaatagcatccactggaaaaggtgaaaatgttttattcagcatttaacttacatttgtactttagagtatttttgtataaaatccatagatttattttacatttagagtatttacactatgataaagttgtaaataattttctaagacagtttttatatagtctacagttgtcctgatttcttattgaatttgttagactagttctcttgtcttgtgatctgtgtacaattttagtcactaagactttcctccaagaactaagccaacttgatgtgaaaagcacggctgtatataatggtgatgtcataataaagttgttttatcttttaagtaaaaaaaaaaaaaaaaaaaaa

SEQ ID NO: 1404 - protein, 1722 aa, Homo sapien
MRTGWATPRRPAGLLMLLFWFFDLAEPSGRAANDPFTIVHGNTGKCIKPVYGWIVADDCDETEDKLWKWVSQHRLFHLHSQKCLGLDITKSVNELRMFSCDSSAMLWWKCEHHSLYGAARYRLALKDGHGTAISNASDVWKKGGSEESLCDQPYHEIYTRDGNSYGRPCEFPFLIDGTWHHDCILDEDHSGPWCATTLNYEYDRKWGICLKPENGCEDNWEKNEQFGSCYQFNTQTALSWKEAYVSCQNQGADLLSINSAAELTYLKEKEGIAKIFWIGLNQLYSARGWEWSDHKPLNFLNWDPDRPSAPTIGGSSCARMDAESGLWQSFSCEAQLPYVCRKPLNNTVELTDVWTYSDTRCDAGWLPNNGFCYLLVNESNSWDKAHAKCKAFSSDLISIHSLADVEVVVTKLHNEDIKEEVWIGLKNINIPTLFQWSDGTEVTLTYWDENEPNVPYNKTPNCVSYLGELGQWKVQSCEEKLKYVCKRKGEKLNDASSDKMCPPDEGWKRHGETCYKIYEDEVPFGTNCNLTITSRFEQEYLNDLMKKYDKSLRKYFWTGLRDVDSCGEYNWATVGGRRRAVTFSNWNFLEPASPGGCVAMSTGKSVGKWEVKDCRSFKALSICKKMSGPLGPEEASPKPDDPCPEGWQSFPASLSCYKVFHAERIVRKRNWEEAERFCQALGAHLSSFSHVDEIKEFLHFLTDQFSGQHWLWIGLNKRSPDLQGSWQWSDRTPVSTIIMPNEFQQDYDIRDCAAVKVFHRPWRRGWHFYDDREFIYLRPFACDTKLEWVCQIPKGRTPKTPDWYNPDRAGIHGPPLIIEGSEYWFVADLHLNYEEAVLYCASNHSFLATITSFVGLKAIKNKIANISGDGQKWWIRISEWPIDDHFTYSRYPWHRFPVTFGEECLYMSAKTWLIDLGKPTDCSTKLPFICEKYNVSSLEKYSPDSAAKVQCSEQWIPFQNKCFLKIKPVSLTFSQASDTCHSYGGTLPSVLSQIEQDFITSLLPDMEATLWIGLRWTAYEKINKWTDNRELTYSNFHPLLVSGRLRIPENFFEEESRYHCALILNLQKSPFTGTWNFTSCSERHFVSLCQKYSEVKSRQTLQNASETVKYLNNLYKIIPKTLTWHSAKRECLKSNMQLVSITDPYQQAFLSVQALLHNSSLWIGLFSQDDELNFGWSDGKRLHFSRWAETNGQLEDCVVLDTDGFWKTVDCNDNQPGAICYYSGNETEKEVKPVDSVKCPSPVLNTPWIPFQNCCYNFIITKNRHMATTQDEVHTKCQKLNPKSHILSIRDEKENNFVLEQLLYFNYMASWVMLGITYRNNSLMWFDKTPLSYTHWRAGRPTIKNEKFLAGLSTDGFWDIQTFKVIEEAVYFHQHSILACKIEMVDYKEEHNTTLPQFMPYEDGIYSVIQKKVTWYEALNMCSQSGGHLASVHNQNGQLFLEDIVKRDGFPLWVGLSSHDGSESSFEWSDGSTFDYIPWKGQTSPGNCVLLDPKGTWKHEKCNSVKDGAICYKPTKSKKLSRLTYSSRCPAAKENGSRWIQYKGHCYKSDQALHSFSEAKKLCSKHDHSATIVSIKDEDENKFVSRLMRENNNITMRVWLGLSQHSVDQSWSWLDGSEVTFVKWENKSKSGVGRCSMLIASNETWKKVECEHGFGRVVCKVPLGPDYTAIAIIVATLSILVLMGGLIWFLFQRHRLHLAGFSSVRYAQGVNEDEIMLPSFHD

SEQ ID NO: 1405 - DNA, 1667 bp, Homo sapien
ctgatcacaggtagcactcagattaccctgcctgctctgtgctttgctgcagaccatttgaccagaacgtgtgcagctcagccagccacagaactggaatttttcaggagcagggggagcatggagtttggactttgctgagcaactgaagtggagcgcagagcttgctcgcttaggagagagcatcatggatggcaaacaagggggcatggatgggagcaagcccgcggggccaagggactttcctggcatcaggcttctttcaaacccattgatgggcgatgctgtgtctgattggtctcctatgcatgaagctgcaatccacggacatcagctgtctctgaggaacctcatcagccaggggtgggctgtgaacatcatcacggcagatcatgtttccccactccatgaagcctgtcttggaggtcatctctcttgtgtgaagattttattaaagcatggagctcaggtgaatggtgtgacagcagactggcacactccactgtttaatgcttgtgtcagcggcagctgggattgtgtgaatttgcttctgcagcacggagccagcgttcaacctgagagtgatctggcatcccccatccatgaagctgctaggagaggccacgtggagtgtgtcaactctcttatagcttatgggggcaacattgaccataagatcagccacctgggcactccactctatttggcttgtgaaaaccaacagagagcctgtgtcaagaagcttctggagtcaggagcggacgtgaaccaagggaaaggtcaggattccccacttcatgcagtggccaggacagccagtgaagagctggcctgcctgctcatggattttggagcggacacccaggccaagaatgctgaaggcaaacgtcctgtggagctggtgcctccagagagccccttggcccagctcttcttggagagagaaggtgcttctttgccaaaacctaagccctaatctgttgacatcccttggggctctagtagaagggcccccttctttgatgcagttatgccgccttagaattcggaagtgttttggaatccagcagcatcataagataaccaaactcgtcctcccagaggatctgaaacagtttctcctacatctttaaatgcatctagggaatggattcacaaacgatgtgaaaacattattgagtgttgtagccactagaattttaaaatcaagttggatttatagagtttgactagttttttcgattagatttgtatttgttataaacttgtttatggagtttgactaattttttctattcaatttgtatttgttaaactcaagccagggtggaaagacactgcatacgtttgtattattagttagaaggcatgaagacttttttccctgcttggggagtgtcataagttattgttttgcatatctactgcatgccaagcactttctgcaccatctaatttagccctcacagccactgggtcaagatgtccaattttccagagtaaggatagaggagtcaaattcaaatacaggttttctgacattaacttatgtgatgacttgatcgaggcaggcttttccagcatcactgtcctggttccatctctgctatatgggaatgaaaataaagaaacatatttcttggcttgtctaaaaaaaaaaaaaaaaa

SEQ ID NO: 1406 - protein, 262 aa, Homo sapien
MDGKQGGMDGSKPAGPRDFPGIRLLSNPLMGDAVSDWSPMHEAAIHGHQLSLRNLISQGWAVNIITADHVSPLHEACLGGHLSCVKILLKHGAQVNGVTADWHTPLFNACVSGSWDCVNLLLQHGASVQPESDLASPIHEAARRGHVECVNSLIAYGGNIDHKISHLGTPLYLACENQQRACVKKLLESGADVNQGKGQDSPLHAVARTASEELACLLMDFGADTQAKNAEGKRPVELVPPESPLAQLFLEREGASLPKPKP

SEQ ID NO: 1407 - DNA, 885 bp, Homo sapien
agcctacgcacgaaagtgactagggaggaaggatattataaagtgatgcaaacagaaattccaccagcctccatgtatcatcatgtgtcataactcagtcaagctcagtgagcattctcagcacattgcctcaacagcttcaaggtgagccagctcaagactttgctctccaccaggcagaagatgacagactgtgaatttggatatatttacaggctggctcaggactatctgcagtgcgtcctacagataccacaacctggatcaggtccaagcaaaacgtccagagtgctacaaaatgttgcgttctcagtccaaaaagaagtggaaaagaatctgaagtcatgcttggacaatgttaatgttgtgtccgtagacactgccagaacactattcaaccaagtgatggaaaaggagtttgaagacggcatcattaactggggaagaattgtaaccatatttgcatttgaaggtattctcatcaagaaacttctacgacagcaaattgccccggatgtggatacctataaggagatttcatattttgttgcggagttcataatgaataacacaggagaatggataaggcaaaacggaggctgggaaaatggctttgtaaagaagtttgaacctaaatctggctggatgacttttctagaagttacaggaaagatctgtgaaatgctatctctcctgaagcaatactgttgaccagaaaggacactccatattgtgaaaccggcctaatttttctgactgatatggaaacgattgccaacacatacttctacttttaaataaacaactttgatgatgtaacttgaccttccagagttatggaaattttgtccccatgtaatgaataaattgtatgtatttttctct

SEQ ID NO: 1408 - protein, 175 aa, Homo sapien
MTDCEFGYIYRLAQDYLQCVLQIPQPGSGPSKTSRVLQNVAFSVQKEVEKNLKSCLDNVNVVSVDTARTLFNQVMEKEFEDGIINWGRIVTIFAFEGILIKKLLRQQIAPDVDTYKEISYFVAEFIMNNTGEWIRQNGGWENGFVKKFEPKSGWMTFLEVTGKICEMLSLLKQYC

SEQ ID NO: 1409 - DNA, 3486 bp, Homo sapien
cacaacctagtccagagcctcacagtcctactgaacctcctgcatggggcagcagtattgtgaaagttccgtctggtatatttgatgtcaacagcaggaaaagtagcactggtagtatatcaaatgtgctgttttctactcaagatccagttgaagatgcagtctttggcgaagctactaatctcaagaagaatggtgatagaggagaaaaaagacaaaagcattttcctgagaggagttgtagttttagttctgaaagtcgagcaggaatgttgcttaagaagagtagtttggattcgaattcaagtgaaatggctatcatgatgggagcagatgccaagattctcacagcagcattgacatgtcctaagacttctctacttcatattgcaagaacccatagctttgagaatgttagctgtcacctacctgatagtaggacttgtatgtctgaaagcacttggaatcctgagcacagatcatctccggtgccagagatgcttgaggaaagccaagaactccttgagcctgtggttgatgacgtacctaaaactactgcaacagtagatacatatgagagtctactaagtgatagtaacagtaatcagtccagagacttgaaaacagtatccaaagatctgagaaataagagaagtagtttatatggtattgctaaggtggttcagagggaagatgttgaaactggactagatcctttgtctcttttagccactgaatgtacaggaggaaaaactcctgattctgaagataagttgttttctccagttattgcacgtaatctggctgatgaaatagaaagctatatgaacctaaaaagtcccctaggtagtaaatcttctagtatggaattacacagagaggaaaacagagagtctggcatgactactgcatttattcatgctctagagaggagatcaagcctacctttagatcatggttcaccagcacaggaaaatcctgaaagtgaaaagagctcacctgcagtgtccaggtctaaaacttttactgggcgtttcaagcagcaaaccccctctcgaactcataaagaacgttcaacttctttgtcagcactggtgcgttcttcgccacatggctcgttgggttctgtagtaaattctttgtcagggctaaagctggataatatactctcagggcccaagatagatgtcctgaaatctggtatgaaacaagcagcgacagtagccagtaagatgtgggtagctgttgcgtctgcctacagctactcagatgatgaggaagaaactaatagagactacagcttcccagctggcctagaagaccatattttgggggagaatatatcgcctaacacaagtatctcagggttggtccccagtgaacttacccagagcaacacaagtcttggcagtagcagcagtagtggagatgtaggaaaactgcattatccaacaggtgaagttccatttccaagaggcatgaaagggcaagactttgaaaaatcagatcatggttcttctcaaaataccagcatgtctagcatctatcagaattgtgcaatggaggttttgatgtccagttgttcacagtgtagagcttgtggagctttagtttatgatgaagaaattatggctggatggacagcagatgactcaaatttgaatacagcttgtccattctgtaaaagcaacttcttgcctcttctcaatatagaattcaaagatttgagaggttctgcaagctttttcctgaaaccaagtacctctggtgacagtttacaaagtggaagcattccattggcaaatgaatccttggagcacaaacctgtatccagtttagcagaacctgacttgatcaactttatggacttcccaaaacataaccagatcataactgaagaaacaggctctgcagttgaaccaagtgatgaaataaagagagccagtggagatgtccaaactatgaaaatttcatctgtgcctaatagtttatcaaagcgaaatgtgtctttgactcgaagtcacagtgttggaggcccattgcagaatattgactttacccagcgaccgtttcatggcatctcaacagttagtcttccaaatagtctgcaggaagttgtggatcctttaggaaaaagacccaatcctccccctgtttctgtgccctacttgagtcctctagtactccgtaaagaacttgaatctttgctagaaaatgaaggtgatcaggtgattcatacatcttctttcatcaatcaacatccaatcattttctggaacctcgtttggtatttcagacgtttggaccttcctagtaacttgccaggacttatcctcacatctgaacattgtaatgaaggtgtacagcttcctctgtcatctctgtcccaggatagcaaacttgtgtatattcagctgttatgggataatatcaaccttcatcaggaaccaagagaacctctgtatgtctcatggaggaattttaattctgaaaagaaatcatctctcctgtcagaggaacaacaagaaacaagcactttagtagaaaccatcaggcagagtattcagcacaataatgttcttaaacccatcaacctactttcacagcaaatgaagccaggcatgaaaagacaaagaggcatttgacaatgaatatggaattgcatacaatagtctgtcttcagagattcttgaaaggttgcagaaaattgatgctccaccaagtgccagtgtcgagtggtgcaggaagtgttttggagcgcctctcatttaaatagagattcactagaatgttgacacacaaggcttggggattagatttcatctggaaacattcaagttttttttttccaaatcgtaagaactggtgaatacggaattgaagtaactcttggggacaatatataatgaattatgattcatattgcattaccttgaaatatgaagtgccatttgaatgtcccagggcttattaatattgaagattttcaacccctgaactgcttttctgcctctgtggaaaactactttgggattcttcagtatttgtagtagtttgatagaaataatgaggaaccatattcattctaggcattgtttatatttgaagttactgagtttgaggaatggcaaattaaatttgcctaacccccaaaacaaatgaaatatctcaattataaaagcaacatggccgggcacggtggctcaggcctgtaatcccagcactttgggaggctgagcaaggtgggtggatcacttgaggccaggagttcgagaccagcctggccaacacggtgagaccctgtctttactaaaaatacaaaaattagccaggcgcaccactgtagtcccagctactcaggctgaggcaggagaatcgcttgaactgaggcagaggctacagtgagtggagatcacgccactgcaactccagcttgggtgacagagtgagaccgtctcaaaaaaaaaaaaaaaaaaaaaaaaaaaa

SEQ ID NO: 1410 - protein, 791 aa, Homo sapien
MLLKKSSLDSNSSEMAIMMGADAKILTAALTCPKTSLLHIARTHSFENVSCHLPDSRTCMSESTWNPEHRSSPVPEMLEESQELLEPVVDDVPKTTATVDTYESLLSDSNSNQSRDLKTVSKDLRNKRSSLYGIAKVVQREDVETGLDPLSLLATECTGGKTPDSEDKLFSPVIARNLADEIESYMNLKSPLGSKSSSMELHREENRESGMTTAFIHALERRSSLPLDHGSPAQENPESEKSSPAVSRSKTFTGRFKQQTPSRTHKERSTSLSALVRSSPHGSLGSVVNSLSGLKLDNILSGPKIDVLKSGMKQAATVASKMWVAVASAYSYSDDEEETNRDYSFPAGLEDHILGENISPNTSISGLVPSELTQSNTSLGSSSSSGDVGKLHYPTGEVPFPRGMKGQDFEKSDHGSSQNTSMSSIYQNCAMEVLMSSCSQCRACGALVYDEEIMAGWTADDSNLNTACPFCKSNFLPLLNIEFKDLRGSASFFLKPSTSGDSLQSGSIPLANESLEHKPVSSLAEPDLINFMDFPKHNQIITEETGSAVEPSDEIKRASGDVQTMKISSVPNSLSKRNVSLTRSHSVGGPLQNIDFTQRPFHGISTVSLPNSLQEVVDPLGKRPNPPPVSVPYLSPLVLRKELESLLENEGDQVIHTSSFINQHPIIFWNLVWYFRRLDLPSNLPGLILTSEHCNEGVQLPLSSLSQDSKLVYIQLLWDNINLHQEPREPLYVSWRNFNSEKKSSLLSEEQQETSTLVETIRQSIQHNNVLKPINLLSQQMKPGMKRQRGI

SEQ ID NO: 1411 - DNA, 1960 bp, Homo sapien
atgggctcgcgctgccttaaccctcctccgcccgcccactctgacaccaccggaaaggattcattcgggaacattcgtggggcggagacgggacagggggcctcggcctgtagcgtcacgtccgccagggttacctgtggggctgggagcgaaccgcactcgcaccgcaaccccggcatcagtgcccaggttggcctcgcgccgtcctacggggcggccagaggccgccgaaggcctctcgcgctgcagcagtctcctcaggagcgccgccatgtgggatggaatagcacacgtgggcttctccctgcgtcacttccggggactgcttccagccaatcggcctccgccacagccagcgcagccttgccccttaaagtcacaggccccctagcgcgaaatcccacgcccccctggacggctgcggccgcactcgccaccagggggcagaggccagagaaagggctatttcccggacccgcccccttcagcttgggaaagcgaaagcgtggcaggggccggacctgggagcggaggaggcgggtctccatagaaacctccacctgtttccggccgggctgtgagagattaggggctgctgcgggggccaatctcagccagctcgcctcttcccagcggcctctgcgggagcggtgggtgttgtacacaatcatcatggcggcggccggggccccggatggcatggaggaacctggcatggacacggaggccgagactgtggctactgaggctcccgcgcggcccgtcaactgcctggaggctgaagccgcggcgggggcggcggccgaggactccggcgccgcacgaggcagcctgcagccggccccggcccagccccctggggaccccgcagcccaggcctcggtcagcaacggcgaagacgcgggcggcggcgcgggcagggagctggtggacttgaagatcatctggaataagaccaagcatgacgtgaagttccccctggacagcacaggctccgagctgaaacagaagatccactcgattacaggtctcccgcctgccatgcagaaagtcatgtataagggactcgtccccgaggataaaacattgagagaaataaaagtgaccagtggggccaagatcatggtggttggctccaccatcaatgatgttttagcagtaaacacacccaaagatgctgcgcagcaggatgcaaaggccgaagagaacaagaaggagcctctctgcaggcagaaacaacacaggaaagtgttggataaaggaaaacctgaagatgtgatgccatctgttaagggggcccaggagcgcctgccaacggtaccgctgtccggcatgtacaataaatctggaggaaaagtgagactcacctttaaactagaacaagaccagctgtggattggcactaaagagcggactgagaaattgcccatgggctccataaaaaatgtggtcagtgaacctatcgaaggacatgaagactaccacatgatggcgtttcagttgggccccacggaagcctcttactactgggtgtactgggttccaactcaatatgtggatgcaatcaaagacactgtgctggggaaatggcagtatttttgaaagcactttcacctctggcccaggagactgacccaaagtgaaggacattgccgggagaggcctgcagcatccctggatttcagagttctggaactttgttcataaaaaatctatattcaatctgaggtgatgtggtgactgaagccagaggtgatgtactttcaccattagcttaattttaacttaaaattaccagttccctttcttgcagtcagcttcataccatttttaaagtcaatacaatggaaatcaataaatctgaattccgaacatgttgtgtggaatactcttaagtgtgtttgagagtagatctgccaattatgttgacaagggaatgatcaaaagctttgttttttta

SEQ ID NO: 1412 - protein, 533 aa, Homo sapien
MGSRCLNPPPPAHSDTTGKDSFGNIRGAETGQGASACSVTSARVTCGAGSEPHSHRNPGISAQVGLAPSYGAARGRRRPLALQQSPQERRHVGWNSTRGLLPASLPGTASSQSASATASAALPLKVTGPLARNPTPPWTAAAALATRGQRPEKGLFPGPAPFSLGKRKRGRGRTWERRRRVSIETSTCFRPGCERLGAAAGANLSQLASSQRPLRERWVLYTIIMAAAGAPDGMEEPGMDTEAETVATEAPARPVNCLEAEAAAGAAAEDSGAARGSLQPAPAQPPGDPAAQASVSNGEDAGGGAGRELVDLKIIWNKTKHDVKFPLDSTGSELKQKIHSITGLPPAMQKVMYKGLVPEDKTLREIKVTSGAKIMVVGSTINDVLAVNTPKDAAQQDAKAEENKKEPLCRQKQHRKVLDKGKPEDVMPSVKGAQERLPTVPLSGMYNKSGGKVRLTFKLEQDQLWIGTKERTEKLPMGSIKNVVSEPIEGHEDYHMMAFQLGPTEASYYWVYWVPTQYVDAIKDTVLGKWQYF

SEQ ID NO: 1413 - DNA, 1233 bp, Homo sapien
ctaaagctctcttgctgcctagcctcctgccggcctcatcttcgcccagccaaccccgcctggagccctatggccaactgcgagttcagcccggtgtccggggacaaaccctgctgccggctctctaggagagcccaactctgtcttggcgtcagtatcctggtcctgatcctcgtcgtggtgctcgcggtggtcgtcccgaggtggcgccagacgtggagcggtccgggcaccaccaagcgctttcccgagaccgtcctggcgcgatgcgtcaagtacactgaaattcatcctgagatgagacatgtagactgccaaagtgtatgggatgctttcaagggtgcatttatttcaaaacatccttgcaacattactgaagaagactatcagccactaatgaagttgggaactcagaccgtaccttgcaacaagattcttctttggagcagaataaaagatctggcccatcagttcacacaggtccagcgggacatgttcaccctggaggacacgctgctaggctaccttgctgatgacctcacatggtgtggtgaattcaacacttccaaaataaactatcaatcttgcccagactggagaaaggactgcagcaacaaccctgtttcagtattctggaaaacggtttcccgcaggtttgcagaagctgcctgtgatgtggtccatgtgatgctcaatggatcccgcagtaaaatctttgacaaaaacagcacttttgggagtgtggaagtccataatttgcaaccagagaaggttcagacactagaggcctgggtgatacatggtggaagagaagattccagagacttatgccaggatcccaccataaaagagctggaatcgattataagcaaaaggaatattcaattttcctgcaagaatatctacagacctgacaagtttcttcagtgtgtgaaaaatcctgaggattcatcttgcacatctgagatctgagccagtcgctgtggttgttttagctccttgactccttgtggtttatgtcatcatacatgactcagcatacctgctggtgcagagctgaagattttggagggtcctccacaataaggtcaatgccagagacggaagcctttttccccaaagtcttaaaataacttatatcatcagcatacctttattgtgatctatcaatagtcaagaaaaattattgtataagattagaatgaaaattgtatgttaagttacttcctttag

SEQ ID NO: 1414 - protein, 300 aa, Homo sapien
MANCEFSPVSGDKPCCRLSRRAQLCLGVSILVLILVVVLAVVVPRWRQTWSGPGTTKRFPETVLARCVKYTEIHPEMRHVDCQSVWDAFKGAFISKHPCNITEEDYQPLMKLGTQTVPCNKILLWSRIKDLAHQFTQVQRDMFTLEDTLLGYLADDLTWCGEFNTSKINYQSCPDWRKDCSNNPVSVFWKTVSRRFAEAACDVVHVMLNGSRSKIFDKNSTFGSVEVHNLQPEKVQTLEAWVIHGGREDSRDLCQDPTIKELESIISKRNIQFSCKNIYRPDKFLQCVKNPEDSSCTSEI

SEQ ID NO: 1415 - DNA, 2718 bp, Homo sapien
ccgccatggggtccctgttccggagcgagaccatgtgcctggcgcagctcttcctgcagtcgggcacggcctacgagtgcctcagcgccctgggcgagaaaggcctggtccagttccgagacctcaaccagaacgtaagttctttccaaagaaaatttgttggtgaggtgaagaggtgtgaagagctagagcgaatattggtgtatttggtacaggaaattaatagagctgatattccccttcctgaaggagaggccagccctcctgcgccacccctgaaacaggttctagaaatgcaggagcagttgcagaagctcgaggttgaactgagagaagtcactaagaacaaggagaaactgaggaaaaacttgctggaactgatagagtacactcacatgctgagagtgacaaagacctttgtgaaacgcaacgttgagtttgaacccacttatgaagaattcccttccttagagagcgattctttgttggattacagctgtatgcagaggctgggagcaaaactgggatttgtgtctggcctaattaaccaaggaaaagtggaagcatttgaaaaaatgttgtggagagtctgcaaagggtacaccatcgtgtcctatgcagaactggatgaatcccttgaagaccctgaaacaggggaagtcataaaatggtatgtctttttaatatccttttggggagagcagattggccacaaggttaagaagatatgtgattgctaccactgccacgtgtacccctatccaaacacagccgaggagcggagggagatccaggaggggctgaacacccgcatccaggatctctacactgtactgcacaaaaccgaggactatttgaggcaagtgctatgtaaagccgccgagtctgtctacagccgtgtgatccaggtgaagaaaatgaaggccatctatcacatgctgaacatgtgcagctttgacgtgaccaacaagtgcctcattgctgaagtctggtgtcccgaggcggatctgcaggacctgcgccgggcactggaggagggctcgagagagagtggtgctacaatcccctcattcatgaatataatccccacaaaagaaacaccccccactcggatccgcaccaacaaattcaccgagggatttcagaacatcgtggatgcttatggagtcggaagctacagagaagtcaatccagctctctttaccatcatcaccttcccgtttttatttgctgtgatgtttggagacttcggacatggctttgtgatgtttttatttgccctcttgtgggtgttaaatgaaaatcatcccagactaaatcagtcacaagagatcatgaggatgttttttaatggccggtacatcctcctgctgatggggctgttctcagtgtacactggcctcatctacaacgactgcttttcaaagtcagtcaacctgttcggctctgggtggaacgtgtcggccatgtacagctccagccacccacccgcagagcataagaagatggtgctttggaacgacagcgtcgttagacacaacagcattttgcagctggatccaagcattcctggagtgttccgaggcccttatccccttggcattgatcctatttggaacttggccacaaatcgcctcacttttctaaactctttcaaaatgaaaatgtccgtgattttaggaatcattcatatgacttttggagtcattctgggaatatttaaccacttgcacttcaggaagaagttcaacatttacctggtttccatcccggaacttctcttcatgctctgtatctttggataccttatatttatgattttctacaagtggctggttttttcagcagaaacctccagagttgctcccagcattctgattgaatttattaacatgtttttattcccagccagtaaaacaagtggcctttacacagggcaggagtatgtccagagagtgctgctggttgtcacagcattgtctgtccctgtcctcttcttgggaaagccactgtttttgttgtggcttcacaatgggcgtagttgcttcggggtgaaccggagtggctacacacttataaggaaagatagtgaggaagaagtttcattgctgggaagccaagatatagaagagggaaatcaccaggtggaagatggatgtagagaaatggcgtgtgaagagtttaattttggagaaatattaatgacccaagtaatccattccatcgagtactgtctgggatgcatctccaacaccgcctcctacctgaggctctgggcgcttagcctggctcacgcacagttgtctgatgtcctgtgggccatgctgatgcgcgtgggcctccgcgttgacaccacctatggcgtcttgctactgctcccggttatcgcgctctttgcagttttgaccattttcatccttctgatcatggaagggctttctgcgtttcttcacgccatacgcctccactgggtagaatttcagaacaaattctacgttggtgcaggcaccaaatttgttcctttctcattcagtctactttcatcaaagttcaataacgacgacagtgtggcatgatcatattgctgtaaccaacaagctttcagatttatggagaatgaccatgttatagactttcacttatgtcagatttatgataggaaaaattccatcttcattactgccttatgacatagccaaataattctgtaagatatac

SEQ ID NO: 1416 - protein, 856 aa, Homo sapien
MGSLFRSETMCLAQLFLQSGTAYECLSALGEKGLVQFRDLNQNVSSFQRKFVGEVKRCEELERILVYLVQEINRADIPLPEGEASPPAPPLKQVLEMQEQLQKLEVELREVTKNKEKLRKNLLELIEYTHMLRVTKTFVKRNVEFEPTYEEFPSLESDSLLDYSCMQRLGAKLGFVSGLINQGKVEAFEKMLWRVCKGYTIVSYAELDESLEDPETGEVIKWYVFLISFWGEQIGHKVKKICDCYHCHVYPYPNTAEERREIQEGLNTRIQDLYTVLHKTEDYLRQVLCKAAESVYSRVIQVKKMKAIYHMLNMCSFDVTNKCLIAEVWCPEADLQDLRRALEEGSRESGATIPSFMNIIPTKETPPTRIRTNKFTEGFQNIVDAYGVGSYREVNPALFTIITFPFLFAVMFGDFGHGFVMFLFALLWVLNENHPRLNQSQEIMRMFFNGRYILLLMGLFSVYTGLIYNDCFSKSVNLFGSGWNVSAMYSSSHPPAEHKKMVLWNDSVVRHNSILQLDPSIPGVFRGPYPLGIDPIWNLATNRLTFLNSFKMKMSVILGIIHMTFGVILGIFNHLHFRKKFNIYLVSIPELLFMLCIFGYLIFMIFYKWLVFSAETSRVAPSILIEFINMFLFPASKTSGLYTGQEYVQRVLLVVTALSVPVLFLGKPLFLLWLHNGRSCFGVNRSGYTLIRKDSEEEVSLLGSQDIEEGNHQVEDGCREMACEEFNFGEILMTQVIHSIEYCLGCISNTASYLRLWALSLAHAQLSDVLWAMLMRVGLRVDTTYGVLLLLPVIALFAVLTIFILLIMEGLSAFLHAIRLHWVEFQNKFYVGAGTKFVPFSFSLLSSKFNNDDSVA

SEQ ID NO: 1417 - DNA, 3429 bp, Homo sapien
ggctggaagccggaagcgagcaaagtggagccgactcgaactccaccggcacgagggcggaaaagaaagcctcagaacgttcgctcgctgcgtccccagccggggccgagccctccgcgacgccacccgggccatgggggccgcacgcagcccgccgtccgctgtcccggggcccctgctggggctgctcctgctgctcctgggcgtgctggccccgggtggcgcctccctgcgactcctggaccaccgggcgctggtctgctcccagccggggctaaactgcacggtcaagaatagtacctgcctggatgacagctggattcaccctcgaaacctgaccccctcctccccaaaggacctgcagatccagctgcactttgcccacacccaacaaggagacctgttccccgtggctcacatcgaatggacactgcagacagacgccagcatcctgtacctcgagggtgcagagttatctgtcctgcagctgaacaccaatgaacgtttgtgcgtcaggtttgagtttctgtccaaactgaggcatcaccacaggcggtggcgttttaccttcagccactttgtggttgaccctgaccaggaatatgaggtgaccgttcaccacctgcccaagcccatccctgatggggacccaaaccaccagtccaagaatttccttgtgcctgactgtgagcacgccaggatgaaggtaaccacgccatgcatgagctcaggcagcctgtgggaccccaacatcaccgtggagaccctggaggcccaccagctgcgtgtgagcttcaccctgtggaacgaatctacccattaccagatcctgctgaccagttttccgcacatggagaaccacagttgctttgagcacatgcaccacatacctgcgcccagaccagaagagttccaccagcgatccaacgtcacactcactctacgcaaccttaaagggtgctgtcgccaccaagtgcagatccagcccttcttcagcagctgcctcaatgactgcctcagacactccgcgactgtttcctgcccagaaatgccagacactccagaaccaattccggactacatgcccctgtgggtgtactggttcatcacgggcatctccatcctgctggtgggctccgtcatcctgctcatcgtctgcatgacctggaggctagctgggcctggaagtgaaaaatacagtgatgacaccaaatacaccgatggcctgcctgcggctgacctgatccccccaccgctgaagcccaggaaggtctggatcatctactcagccgaccaccccctctacgtggacgtggtcctgaaattcgcccagttcctgctcaccgcctgcggcacggaagtggccctggacctgctggaagagcaggccatctcggaggcaggagtcatgacctgggtgggccgtcagaagcaggagatggtggagagcaactctaagatcatcgtcctgtgctcccgcggcacgcgcgccaagtggcaggcgctcctgggccggggggcgcctgtgcggctgcgctgcgaccacggaaagcccgtgggggacctgttcactgcagccatgaacatgatcctcccggacttcaagaggccagcctgcttcggcacctacgtagtctgctacttcagcgaggtcagctgtgacggcgacgtccccgacctgttcggcgcggcgccgcggtacccgctcatggacaggttcgaggaggtgtacttccgcatccaggacctggagatgttccagccgggccgcatgcaccgcgtaggggagctgtcgggggacaactacctgcggagcccgggcggcaggcagctccgcgccgccctggacaggttccgggactggcaggtccgctgtcccgactggttcgaatgtgagaacctctactcagcagatgaccaggatgccccgtccctggacgaagaggtgtttgaggagccactgctgcctccgggaaccggcatcgtgaagcgggcgcccctggtgcgcgagcctggctcccaggcctgcctggccatagacccgctggtcggggaggaaggaggagcagcagtggcaaagctggaacctcacctgcagccccggggtcagccagcgccgcagcccctccacaccctggtgctcgccgcagaggagggggccctggtggccgcggtggagcctgggcccctggctgacggtgccgcagtccggctggcactggcgggggagggcgaggcctgcccgctgctgggcagcccgggcgctgggcgaaatagcgtcctcttcctccccgtggaccccgaggactcgccccttggcagcagcacccccatggcgtctcctgacctccttccagaggacgtgagggagcacctcgaaggcttgatgctctcgctcttcgagcagagtctgagctgccaggcccaggggggctgcagtagacccgccatggtcctcacagacccacacacgccctacgaggaggagcagcggcagtcagtgcagtctgaccagggctacatctccaggagctccccgcagccccccgagggactcacggaaatggaggaagaggaggaagaggagcaggacccagggaagccggccctgccactctctcccgaggacctggagagcctgaggagcctccagcggcagctgcttttccgccagctgcagaagaactcgggctgggacacgatggggtcagagtcagaggggcccagtgcatgagggcggctccccagggaccgcccagatcccagctttgagagaggagtgtgtgtgcacgtattcatctgtgtgtacatgtctgcatgtgtatatgttcgtgtgtgaaatgtaggctttaaaatgtaaatgtctggattttaatcccaggcatccctcctaacttttctttgtgcagcggtctggttatcgtctatccccaggggaatccacacagcccgctcccaggagctaatggtagagcgtccttgaggctccattattcgttcattcagcatttattgtgcacctactatgtggcgggcatttgggataccaagataaattgcatgcggcatggccccagccatgaaggaacttaaccgctagtgccgaggacacgttaaacgaacaggatgggccgggcacggtggctcacgcctgtaatcccagcacactgggaggccgaggcaggtggatcactctgaggtcaggagtttgagccagcctggccaacatggtgaaaccccatctccactaaaaatagaaaaattagccgggcatggtgacacatgcctgtagtcctagctacttgggaggctgaggcaggagaattgcttgaatctgggaggcagaggttgcagtgagccgagattgtgccattgcactgcagcctggatgacagagcgagactctatctcaaaaaaaaaaaaaaaaaa

SEQ ID NO: 1418 - protein, 866 aa, Homo sapien
MGAARSPPSAVPGPLLGLLLLLLGVLAPGGASLRLLDHRALVCSQPGLNCTVKNSTCLDDSWIHPRNLTPSSPKDLQIQLHFAHTQQGDLFPVAHIEWTLQTDASILYLEGAELSVLQLNTNERLCVRFEFLSKLRHHHRRWRFTFSHFVVDPDQEYEVTVHHLPKPIPDGDPNHQSKNFLVPDCEHARMKVTTPCMSSGSLWDPNITVETLEAHQLRVSFTLWNESTHYQILLTSFPHMENHSCFEHMHHIPAPRPEEFHQRSNVTLTLRNLKGCCRHQVQIQPFFSSCLNDCLRHSATVSCPEMPDTPEPIPDYMPLWVYWFITGISILLVGSVILLIVCMTWRLAGPGSEKYSDDTKYTDGLPAADLIPPPLKPRKVWIIYSADHPLYVDVVLKFAQFLLTACGTEVALDLLEEQAISEAGVMTWVGRQKQEMVESNSKIIVLCSRGTRAKWQALLGRGAPVRLRCDHGKPVGDLFTAAMNMILPDFKRPACFGTYVVCYFSEVSCDGDVPDLFGAAPRYPLMDRFEEVYFRIQDLEMFQPGRMHRVGELSGDNYLRSPGGRQLRAALDRFRDWQVRCPDWFECENLYSADDQDAPSLDEEVFEEPLLPPGTGIVKRAPLVREPGSQACLAIDPLVGEEGGAAVAKLEPHLQPRGQPAPQPLHTLVLAAEEGALVAAVEPGPLADGAAVRLALAGEGEACPLLGSPGAGRNSVLFLPVDPEDSPLGSSTPMASPDLLPEDVREHLEGLMLSLFEQSLSCQAQGGCSRPAMVLTDPHTPYEEEQRQSVQSDQGYISRSSPQPPEGLTEMEEEEEEEQDPGKPALPLSPEDLESLRSLQRQLLFRQLQKNSGWDTMGSESEGPSA

SEQ ID NO: 1419 - DNA, 2798 bp, Homo sapien
cgttgctgtcgctctgcacgcacctatgtggaaactaaagcccagagagaaagtctgacttgccccacagccagtgagtgactgcagcagcaccagaatctggtctgtttcctgtttggctcttctaccactacggcttgggatctcgggcatggtggctttgccaatggtccttgttttgctgctggtcctgagcagaggtgagagtgaattggacgccaagatcccatccacaggggatgccacagaatggcggaatcctcacctgtccatgctggggtcctgccagccagccccctcctgccagaagtgcatcctctcacaccccagctgtgcatggtgcaagcaactgaacttcaccgcgtcgggagaggcggaggcgcggcgctgcgcccgacgagaggagctgctggctcgaggctgcccgctggaggagctggaggagccccgcggccagcaggaggtgctgcaggaccagccgctcagccagggcgcccgcggagagggtgccacccagctggcgccgcagcgggtccgggtcacgctgcggcctggggagccccagcagctccaggtccgcttccttcgtgctgagggatacccggtggacctgtactaccttatggacctgagctactccatgaaggacgacctggaacgcgtgcgccagctcgggcacgctctgctggtccggctgcaggaagtcacccattctgtgcgcattggttttggttcctttgtggacaaaacggtgctgccctttgtgagcacagtaccctccaaactgcgccacccctgccccacccggctggagcgctgccagtcaccattcagctttcaccatgtgctgtccctgacgggggacgcacaagccttcgagcgggaggtggggcgccagagtgtgtccggcaatctggactcgcctgaaggtggcttcgatgccattctgcaggctgcactctgccaggagcagattggctggagaaatgtgtcccggctgctggtgttcacttcagacgacacattccatacagctggggacgggaagttgggcggcattttcatgcccagtgatgggcactgccacttggacagcaatggcctctacagtcgcagcacagagtttgactacccttctgtgggtcaggtagcccaggccctctctgcagcaaatatccagcccatctttgctgtcaccagtgccgcactgcctgtctaccaggagctgagtaaactgattcctaagtctgcagttggggagctgagtgaggactccagcaacgtggtacagctcatcatggatgcttataatagcctgtcttccaccgtgacccttgaacactcttcactccctcctggggtccacatttcttacgaatcccagtgtgagggtcctgagaagagggagggtaaggctgaggatcgaggacagtgcaaccacgtccgaatcaaccagacggtgactttctgggtttctctccaagccacccactgcctcccagagccccatctcctgaggctccgggcccttggcttctcagaggagctgattgtggagttgcacacgctgtgtgactgtaattgcagtgacacccagccccaggctccccactgcagtgatggccagggacacctacaatgtggtgtatgcagctgtgcccctggccgcctaggtcggctctgtgagtgctctgtggcagagctgtcctccccagacctggaatctgggtgccgggctcccaatggcacagggcccctgtgcagtggaaagggtcactgtcaatgtggacgctgcagctgcagtggacagagctctgggcatctgtgcgagtgtgacgatgccagctgtgagcgacatgagggcatcctctgcggaggctttggtcgctgccaatgtggagtatgtcactgtcatgccaaccgcacgggcagagcatgcgaatgcagtggggacatggacagttgcatcagtcccgagggagggctctgcagtgggcatggacgctgcaaatgcaaccgctgccagtgcttggacggctactatggtgctctatgcgaccaatgcccaggctgcaagacaccatgcgagagacaccgggactgtgcagagtgtggggccttcaggactggcccactggccaccaactgcagtacagcttgtgcccataccaatgtgaccctggccttggcccctatcttggatgatggctggtgcaaagagcggaccctggacaaccagctgttcttcttcttggtggaggatgacgccagaggcacggtcgtgctcagagtgagaccccaagaaaagggagcagaccacacgcaggccattgtgctgggctgcgtagggggcatcgtggcagtggggctggggctggtcctggcttaccggctctcggtggaaatctatgaccgccgggaatacagtcgctttgagaaggagcagcaacaactcaactggaagcaggacagtaatcctctctacaaaagtgccatcacgaccaccatcaatcctcgctttcaagaggcagacagtcccactctctgaaggagggagggacacttacccaaggctcttctccttggaggacagtgggaactggagggtgagaggaagggtgggtctgtaagaccttggtaggggactaattcactggcgaggtgcggccaccaccctacttcattttcagagtgacacccaagagggctgcttcccatgcctgcaaccttgcatccatctgggctaccccacccaagtatacaataaagtcttacctcagaaaaaaaaaaaaaaaaaa

SEQ ID NO: 1420 - protein, 798 aa, Homo sapien
MVALPMVLVLLLVLSRGESELDAKIPSTGDATEWRNPHLSMLGSCQPAPSCQKCILSHPSCAWCKQLNFTASGEAEARRCARREELLARGCPLEELEEPRGQQEVLQDQPLSQGARGEGATQLAPQRVRVTLRPGEPQQLQVRFLRAEGYPVDLYYLMDLSYSMKDDLERVRQLGHALLVRLQEVTHSVRIGFGSFVDKTVLPFVSTVPSKLRHPCPTRLERCQSPFSFHHVLSLTGDAQAFEREVGRQSVSGNLDSPEGGFDAILQAALCQEQIGWRNVSRLLVFTSDDTFHTAGDGKLGGIFMPSDGHCHLDSNGLYSRSTEFDYPSVGQVAQALSAANIQPIFAVTSAALPVYQELSKLIPKSAVGELSEDSSNVVQLIMDAYNSLSSTVTLEHSSLPPGVHISYESQCEGPEKREGKAEDRGQCNHVRINQTVTFWVSLQATHCLPEPHLLRLRALGFSEELIVELHTLCDCNCSDTQPQAPHCSDGQGHLQCGVCSCAPGRLGRLCECSVAELSSPDLESGCRAPNGTGPLCSGKGHCQCGRCSCSGQSSGHLCECDDASCERHEGILCGGFGRCQCGVCHCHANRTGRACECSGDMDSCISPEGGLCSGHGRCKCNRCQCLDGYYGALCDQCPGCKTPCERHRDCAECGAFRTGPLATNCSTACAHTNVTLALAPILDDGWCKERTLDNQLFFFLVEDDARGTVVLRVRPQEKGADHTQAIVLGCVGGIVAVGLGLVLAYRLSVEIYDRREYSRFEKEQQQLNWKQDSNPLYKSAITTTINPRFQEADSPTL

SEQ ID NO: 1421 - DNA, 1681 bp, Homo sapien
ggcacgaggatacctcctcatcaactctgacatagtgtgcgaacaggacatctacgagtggactaagatcaatggccggcggcgggtgccgcgcggggggcgggcggcgcggagtaggtggcggcggccatggccgaggcgtcgccgcatcccggacggtacttctgccactgctgctccgtggagatcgtcccgcgcctgccggattatatctgtccaagatgcgagtctggttttatcgaggagcttccggaagagaccaggagcacagaaaatggttctgccccctccacagctcccacagaccagagccggccaccgctggagcacgtggaccagcacctgttcacgctgccgcagggctacggacagtttgctttcggcatcttcgatgacagcttcgagatccccacgttccctcctggggcgcaggctgacgacggcagggaccctgagagccggcgggagagagaccatccgtcccggcaccggtacggcgcccgacagccccgcgcccgcctcaccacgcggcgggccaccggccggcacgaaggcgtccccacgctggaagggatcatccagcagctcgtcaacggcatcatcacgcccgccaccatccccagcctgggcccctggggagtcctgcactcaaaccctatggactacgcctggggggccaacggcctggatgccatcatcacacagctcctcaatcagtttgaaaacacaggccccccaccggcagataaagagaaaatccaggccctccccaccgtccccgtcactgaggagcacgtaggctccgggctcgagtgccctgtgtgcaaggacgactacgcgctgggtgagcgtgtgcggcagctgccctgcaaccacctgttccacgacggctgcatcgtgccctggctggagcagcacgacagctgccccgtctgccgaaaaagcctcacgggacagaacacggccacgaacccccctggcctcactggggtgagcttctcctcctcgtcgtcatcgtcctcctccagctcgcccagcaacgagaacgccacaagcaactcgtgagcccacgtcggccgtcgggaaagcacggggcctttcccacccaccctcagccagcgccacacggcacccacagactgggtgccccggcggcgccacgcttggctggtcagcgctgcaggtcccgcctgttccagggcaggacccgggcccggcccaccggccccctggcttgggaaggcgtgggccacatggtcccctctggggcgtccccagcctccccgtcctctgtctaacctcaccctctaaacgttcagcggtggaaagatttttataattttaaattattactgctttgaaataaacggacgtttgagctcacgtggcggccatgcatggtttgtggcggaagacggggcccagcggctcccccagcgctgaagcacggggttcagcggctcccccagtgctgcaggtgccgccaggacgggccacgtgggcccccagcctccccctcggccgcctccacgacccggagtaggggggctcgggaccatgaggatgaccagcaaaattcaagaacaaaactgctccaacagacttttttaaaggaaaaaatatgtgtatcttgaaagctatttaaaatacactacttacaaagaaaaaaaaaaaaaaaaaa

SEQ ID NO: 1422 - protein, 311 aa, Homo sapien
MAEASPHPGRYFCHCCSVEIVPRLPDYICPRCESGFIEELPEETRSTENGSAPSTAPTDQSRPPLEHVDQHLFTLPQGYGQFAFGIFDDSFEIPTFPPGAQADDGRDPESRRERDHPSRHRYGARQPRARLTTRRATGRHEGVPTLEGIIQQLVNGIITPATIPSLGPWGVLHSNPMDYAWGANGLDAIITQLLNQFENTGPPPADKEKIQALPTVPVTEEHVGSGLECPVCKDDYALGERVRQLPCNHLFHDGCIVPWLEQHDSCPVCRKSLTGQNTATNPPGLTGVSFSSSSSSSSSSSPSNENATSNS

SEQ ID NO: 1423 - DNA, 2343 bp, Homo sapien
atacgactacacctgctccggagcccgcggcggtacctgcagcggaggagctctgtcttccccttcatctcacgcgagcccggcgtcccgccgcgtgcgccccggcgcagcccgccagtccgcccggagcccgcccagtcgccgcgctgcacgcccggggtgaaccctctgccctcgctgggacagagggccccgcagccgtcatgctttccgccatctacacagtcctggcgggactgctgttcctgccgctcctggtgaacctctgctgcccatacttcttccaggacataggctacttcttgaaggtggccgccgtgggccggagggtgcgcagctacgggcagcggcggccggcgcgcaccatcctgcgggcgttcctggagaaagcgcgccagacgccacacaagccttttctgctcttccgcgacgagactctcacctacgcgcaggtggaccggcgcagcaatcaagtggcccgggcgctgcacgaccacctcggcctgcgccagggagactgcgtggcgctccttatgggtaacgagccggcctacgtgtggctgtggctggggctggtgaagctgggctgtgccatggcgtgcctcaattacaacatccgcgcgaagtccctgctgcactgcttccagtgctgcggggcgaaggtgctgctggtgtcgccagaactacaagcagctgtcgaagagatactgccaagccttaaaaaagatgatgtgtccatctattatgtgagcagaacttctaacacagatgggattgactctttcctggacaaagtggatgaagtatcaactgaacctatcccagagtcatggaggtctgaagtcactttttccactcctgccttatacatttatacttctggaaccacaggtcttccaaaagcagccatgatcactcatcagcgcatatggtatggaactggcctcacttttgtaagcggattgaaggcagatgatgtcatctatatcactctgcccttttaccacagtgctgcactactgattggcattcacggatgtattgtggctggtgctactcttgccttgcggactaaattttcagccagccagttttgggatgactgcagaaaatacaacgtcactgtcattcagtatatcggtgaactgcttcggtatttatgcaactcaccacagaaaccaaatgaccgtgatcataaagtgagactggcactgggaaatggcttacgaggagatgtgtggagacaatttgtcaagagatttggggacatatgcatctatgagttctatgctgccactgaaggcaatattggatttatgaattatgcgagaaaagttggtgctgttggaagagtaaactacctacagaaaaaaatcataacttatgacctgattaaatatgatgtggagaaagatgaacctgtccgtgatgaaaatggatattgcgtcagagttcccaaaggtgaagttggacttctggtttgcaaaatcacacaacttacaccatttaatggctatgctggagcaaaggctcagacagagaagaaaaaactgagagatgtctttaagaaaggagacctctatttcaacagtggagatctcttaatggttgaccatgaaaatttcatctatttccacgacagagttggagatacattccggtggaaaggggaaaatgtggccaccactgaagttgctgatacagttggactggttgattttgtccaagaagtaaatgtttatggagtgcatgtgccagatcatgagggtcgcattggcatggcctccatcaaaatgaaagaaaaccatgaatttgatggaaagaaactctttcagcacattgctgattacctacctagttatgcaaggccccggtttctaagaatacaggacaccattgagatcactggaacttttaaacaccgcaaaatgaccctggtggaggagggctttaaccctgctgtcatcaaagatgccttgtatttcttggatgacacagcaaaaatgtatgtgcctatgactgaggacatctataatgccataagtgctaaaaccctgaaactctgaatattcccaggaggataactcaacatttccagaaagaaactgaatggacagccacttgatataatccaactttaatttgattgaagattgtgaggaaattttgtaggaaatttgcatacccgtaaagggagacttttttaaataacagttgagtctttgcaagtaaaaagatttagagattattatttttcagtgtgcacctactgtttgtatttgcaaactgagcttgttggagggaaggcattattttttaaaatacttagtaaattaaatgaac

SEQ ID NO: 1424 - protein, 620 aa, Homo sapien
MLSAIYTVLAGLLFLPLLVNLCCPYFFQDIGYFLKVAAVGRRVRSYGQRRPARTILRAFLEKARQTPHKPFLLFRDETLTYAQVDRRSNQVARALHDHLGLRQGDCVALLMGNEPAYVWLWLGLVKLGCAMACLNYNIRAKSLLHCFQCCGAKVLLVSPELQAAVEEILPSLKKDDVSIYYVSRTSNTDGIDSFLDKVDEVSTEPIPESWRSEVTFSTPALYIYTSGTTGLPKAAMITHQRIWYGTGLTFVSGLKADDVIYITLPFYHSAALLIGIHGCIVAGATLALRTKFSASQFWDDCRKYNVTVIQYIGELLRYLCNSPQKPNDRDHKVRLALGNGLRGDVWRQFVKRFGDICIYEFYAATEGNIGFMNYARKVGAVGRVNYLQKKIITYDLIKYDVEKDEPVRDENGYCVRVPKGEVGLLVCKITQLTPFNGYAGAKAQTEKKKLRDVFKKGDLYFNSGDLLMVDHENFIYFHDRVGDTFRWKGENVATTEVADTVGLVDFVQEVNVYGVHVPDHEGRIGMASIKMKENHEFDGKKLFQHIADYLPSYARPRFLRIQDTIEITGTFKHRKMTLVEEGFNPAVIKDALYFLDDTAKMYVPMTEDIYNAISAKTLKL

SEQ ID NO: 1425 - DNA, 2343 bp, Homo sapien; identical to SEQ ID NO: 1423

SEQ ID NO: 1426 - protein, 620 aa, Homo sapien; identical to SEQ ID NO: 1424

SEQ ID NO: 1427 - DNA, 2821 bp, Homo sapien
gaaaaaagaaaatgtcagaggaatttgaagccaatactatggattctctggtagacatgccatttgctactgtagatattcaggatgactgtggaatcactgatgaacctcaaataaatttgaagagaagtcaagaaaatgaatgggtcaagagtgatcaagtaaagaagaggaaaaaaaagagaaaagattatcaacccaactatttcctgtccattccaatcaccaacaaagagattataaaaggaattaagatcctgcagaatgcaataatacaacaagatgagcgactggccaaagcaatggtcagtgatggttcctttcatattaccctgctggtgatgcaattattaaatgaagatgaagtaaacattggtattgatgctcttttggaattgaaaccattcatagaagaactcctccagggaaaacatttgactttgccctttcaagggattggtacttttggaaatcaggttggatttgtgaagctggcagaaggagatcatgtaaactcacttttggagatagcagagactgcaaataggacatttcaagaaaaaggcatcctggtaggagagagcagaagttttaaacctcatttgaccttcatgaagttgtcaaaatcaccgtggctccgtaagaatggagtgaaaaaaatagatcctgatttatatgaaaagtttatcagtcacagatttggagaagaaatattatatcgcatagatctttgctccatgctgaagaaaaaacaaagtaatggttattatcactgtgaatcttccattgtgattggtgaaaagaacggaggggagcccgatgacgctgaactagtaaggctcagtaagaggctggtggagaacgcggtgctcaaggctgtccagcagtatctggaggaaacacagaataaaaacaagccgggggaggggagctctgtgaaaaccgaagcagctgatcagaatggcaatgacaatgagaacaacaggaaatgagcccggaacgcaggcccccatgtctctgtgcaaagcctccctgcttccctctgctgagtctagggactgacttgcagcgtgctgtttaagttaagtttctctggtgcaatctgtgaagattgcctaatacttttcatgatcgatgtgttcgcattgctgaaacacaacagaagaaaaatggagtgctgggactggcagaggaaattaattgatgaaagaagaatggcccaagtttcattcgccctcagccacgcacaagggaaagggaactttgggttatgcctcctggacgcaaattaaaggccgagaaagaggccttgccatcaatggaatactgccatttatattgcttagcagggcatttgactactttatctgaggccagaactctcacacacagctatcaagtgctaagtttaaaataatcactgttggaattgtcatctgtacaattagtccataatgtttcatgtttgtcctaagtgtgctgttgctatgcagtgtgatctttatttatagtaaattatgtttcatgtaaatgatatatttttggtgaaatgcaaccttttctataaaatgtgggcaacattttaaagtttttttaaaatcctattttgataagtcagtatgccatatttaatgaaatgttattatataatttttttttcttaggcaagaaacctattggaattcgagacttaattaatgaagctttgcatcgagaaacgatgggtctgaagtccaaagtgaaacagataaaggaacttttattaaagcctgagactcaggccagaattaggagggagctttttgaaggaagacttattaacaacagtaattcagcaaatgacgttgatttcagcacaactttgacataagctctacattgcgattgtgacaacatagcttatgaaatcttttcagcttattaagtagctctttggtaaacaccaaagaagtttctgatagtgtctgcacaacagcaaaccaacatttggtgaggaattagcaatttcttgccaaagaaaattgattctgcccaattattttttgagctacacttgtgttttagaatatctgtttctgtaatattgagagttattttatagaaatgatttcttaattagctgttgtgagatatttctcgggtccttgcagaaaaaaacatacagactgtgaacaaatcattcacaaacagaataaaacagagccaacaacagtattttaagggtcacttgcctcctgttgacacaattgttgctaaatcaaaagaagcgttgtccaggtgtgtctacatctagtgttacttttaatgagaatttgaatgtttattgaacaatagtacttgaatgaacatttataaatgtaattattgcgatcactggttaagaatgttttatatatccttataatatttttcactgatcaaaatgttgttctgctttttcatttcttaaggaatacatgtttgggatttttattttttacgtgtccgaagataagctccaggtcttatcgtatcccttgccatctgaacttgtttgcactgcttctgtttgaaagagcatcttgaaaaacttccccggtatgatgattgttggtaacaactttttctatagtcattgatggagtagatcatgatggaggggaaatcactggagatcaaatatgtaaaatcatttcaaatataaaatccagtttactcatggattttagctattttttcactgggtaaattatactacatttatttacaaatgagtttatgcattttcatggctcttaataaacatattgttttcccttgaaaaaaaaaaaaaaaaaaaaaa

SEQ ID NO: 1428 - protein, 326 aa, Homo sapien
MSEEFEANTMDSLVDMPFATVDIQDDCGITDEPQINLKRSQENEWVKSDQVKKRKKKRKDYQPNYFLSIPITNKEIIKGIKILQNAIIQQDERLAKAMVSDGSFHITLLVMQLLNEDEVNIGIDALLELKPFIEELLQGKHLTLPFQGIGTFGNQVGFVKLAEGDHVNSLLEIAETANRTFQEKGILVGESRSFKPHLTFMKLSKSPWLRKNGVKKIDPDLYEKFISHRFGEEILYRIDLCSMLKKKQSNGYYHCESSIVIGEKNGGEPDDAELVRLSKRLVENAVLKAVQQYLEETQNKNKPGEGSSVKTEAADQNGNDNENNRK

SEQ ID NO: 1429 - DNA, 1809 bp, Homo sapien
gtcttcctccctccctcccttcctcttactctcattcatttcatacacactggctcacacatctactctctctctctatctctctcagaatgacaattctaggtacaacttttggcatggttttttctttacttcaagtcgtttctggagaaagtggctatgctcaaaatggagacttggaagatgcagaactggatgactactcattctcatgctatagccagttggaagtgaatggatcgcagcactcactgacctgtgcttttgaggacccagatgtcaacatcaccaatctggaatttgaaatatgtggggccctcgtggaggtaaagtgcctgaatttcaggaaactacaagagatatatttcatcgagacaaagaaattcttactgattggaaagagcaatatatgtgtgaaggttggagaaaagagtctaacctgcaaaaaaatagacctaaccactatagttaaacctgaggctccttttgacctgagtgtcgtctatcgggaaggagccaatgactttgtggtgacatttaatacatcacacttgcaaaagaagtatgtaaaagttttaatgcacgatgtagcttaccgccaggaaaaggatgaaaacaaatggacgcatgtgaatttatccagcacaaagctgacactcctgcagagaaagctccaaccggcagcaatgtatgagattaaagttcgatccatccctgatcactattttaaaggcttctggagtgaatggagtccaagttattacttcagaactccagagatcaataatagctcaggggagatggatcctatcttactaaccatcagcattttgagttttttctctgtcgctctgttggtcatcttggcctgtgtgttatggaaaaaaaggattaagcctatcgtatggcccagtctccccgatcataagaagactctggaacatctttgtaagaaaccaagaaaaaatttaaatgtgagtttcaatcctgaaagtttcctggactgccagattcatagggtggatgacattcaagctagagatgaagtggaaggttttctgcaagatacgtttcctcagcaactagaagaatctgagaagcagaggcttggaggggatgtgcagagccccaactgcccatctgaggatgtagtcatcactccagaaagctttggaagagattcatccctcacatgcctggctgggaatgtcagtgcatgtgacgcccctattctctcctcttccaggtccctagactgcagggagagtggcaagaatgggcctcatgtgtaccaggacctcctgcttagccttgggactacaaacagcacgctgccccctccattttctctccaatctggaatcctgacattgaacccagttgctcagggtcagcccattcttacttccctgggatcaaatcaagaagaagcatatgtcaccatgtccagcttctaccaaaaccagtgaagtgtaagaaacccagactgaacttaccgtgagcgacaaagatgatttaaaagggaagtctagagttcctagtctccctcacagcacagagaagacaaaattagcaaaaccccactacacagtctgcaagattctgaaacattgctttgaccactcttcctgagttcagtggcactcaacatgagtcaagagcatcctgcttctaccatgtggatttggtcacaaggtttaaggtgacccaatgattcagctatttaaaaaaaaaagaggaaagaatgaaagagtaaaggaaatgattgaggagtgaggaaggcaggaagagagcatgagaggaaaaaaa

SEQ ID NO: 1430 - protein, 459 aa, Homo sapien
MTILGTTFGMVFSLLQVVSGESGYAQNGDLEDAELDDYSFSCYSQLEVNGSQHSLTCAFEDPDVNITNLEFEICGALVEVKCLNFRKLQEIYFIETKKFLLIGKSNICVKVGEKSLTCKKIDLTTIVKPEAPFDLSVVYREGANDFVVTFNTSHLQKKYVKVLMHDVAYRQEKDENKWTHVNLSSTKLTLLQRKLQPAAMYEIKVRSIPDHYFKGFWSEWSPSYYFRTPEINNSSGEMDPILLTISILSFFSVALLVILACVLWKKRIKPIVWPSLPDHKKTLEHLCKKPRKNLNVSFNPESFLDCQIHRVDDIQARDEVEGFLQDTFPQQLEESEKQRLGGDVQSPNCPSEDVVITPESFGRDSSLTCLAGNVSACDAPILSSSRSLDCRESGKNGPHVYQDLLLSLGTTNSTLPPPFSLQSGILTLNPVAQGQPILTSLGSNQEEAYVTMSSFYQNQ

SEQ ID NO: 1431 - DNA, 4670 bp, Homo sapien
ttgagctcaaagcttagcagcttcaatgttgttgttaggcataaacagcttgcaaatttcaattttttttctctcctcacttttgaactagatttgggcaatggaggtgatgacagcattttagaagacagaacaggaattctaggtgtttaggcacgttgaagagaaacttgctagaggtgatgaagtggaaagaaaaagacaattcactatagggatcaacattattgcagttctgcaaaggatattttcttttaaaacatccatatctcttctttgccatggaaactacacccaatctacctgaacctgcggcacccctctgatgacccatttggattctctgatttcactgccaagattctcagttctccaaaatacttatcattcaggttgaataaaccagttctacagactgcttcttccatgcatttcccaatgatgctaactgcccttaaaattctttcagatttggaactgtatctgtatggaaacaacagagttttcttgaagtacaactaaggacaggtcaccactaggcactaacatcgctgacttgcatgattatggagatggtctatctgatgctgaaaatgtctctagttttttgacaacggctaaataaccatgggatcaagtggccttgggaaagcagcaacattagatgaactgctgtgcacttgcattgagatgtttgatgacaatggagagctggataatagttatttgccaagaatagttctactgatgcaccgatggtatttatcttccactgaattggcagaaaaacttctctgcatgtatcgaaatgccactggagaaagctgcaatgaatttcgattaaagatctgctacttcatgaggtactggattctgaagtttcctgcagagtttaatttggatcttggtttgattcgtatgactgaggaatttcgggaagtagctagtcaactaggatatgaaaaacacgtcagcctcatcgacatatccagcattccttcctatgactggatgagaagagtcacacagaggaaaaaagtatccaagaagggaaaagcctgtctgctgtttgaccatctggagcccattgaattggctgagcacctcacttttctggagcataaatcttttagaaggatctcattcactgattaccaaagctatgtcatccatggctgcctggagaataatccaaccttggaaagatcgattgctttatttaatggaatctctaagtgggtccagttgatggttcttagcaaaccaaccccccagcaaagggcagaagtcatcacaaagtttatcaatgttgcaaagaagctccttcagctcaaaaattttaacaccctgatggcagtggtgggaggcctcagtcatagttccatttcacgcctcaaagagacccattctcatctttcttcagaagttacaaagaactggaatgaaatgacagagttggtctcctccaacggcaattactgcaattaccgcaaggcctttgccgactgcgatggcttcaaaatccccatccttggagtacacttgaaagacttgatagctgtccatgtcattttcccagactggacagaggagaacaaagtgaacattgtgaaaatgcaccagctctccgttaccctgagtgaactagtctccctgcagaatgcctctcaccacttagaacccaacatggatttgatcaacctgctcacgctttccctggacctctatcacactgaagatgatatttacaaactgtcactggtgctggagcctagaaattctaaatcgcagcctacctcccctacgacgcccaacaagcctgtggtacccctggagtgggcattaggggtgatgccaaagccagaccccacggtcatcaacaagcacataaggaaattagtggagtctgtatttagaaactatgatcacgaccatgatgggtacatttcccaagaggactttgaaagtatagctgccaattttcccttcttggattccttctgtgttctggacaaagatcaggatggcctaattagtaaagatgaaatgatggcttacttcctgagagctaaatcccaactacactgtaaaatgggaccaggatttatccataattttcaggagatgacctatctcaagccaaccttctgcgaacactgtgcgggatttctctggggcataatcaagcaaggatacaaatgcaaagactgtggagccaattgtcacaaacagtgcaaagacctcctggttctggcctgcaggagatttgcccgggcgccctccttgagcagtggtcatgggtcactgcctggaagcccctcgctgcccccagcgcaggatgaggtgtttgagttccctggagtcactgctggacacagggatttagacagcagagccatcacactggttacaggctcttctcgcaagatctctgtgaggctacagagggccaccaccagccaggccacccagactgaacctgtctggtcagaggctggctggggggactcggggtcccacaccttccctaaaatgaaatccaagttccatgacaaagcagcaaaggacaaaggctttgccaaatgggaaaatgagaagcccagggtgcatgctggtgtggatgttgtagaccggggcacggagtttgaacttgaccaggatgaaggagaagagaccagacaggatggtgaggatggctgacttcaggctgcggaaactgaaggcaataatgttggcttttggaaggggcaagacgagaaactctgaagaaagctctgactctcaggaagttatctggaaagatacctggatgtttactgccttgggacactgtgggatctccatgtttggactatgggacagagaattgaccctaactaactatgaactatttatttcctcctcccctacccctagttaagtgccacaaagactgtgttatgtagtcagtacttttttctcatgtatctttctctagaccatttatatacgggtgaaatgaaagcctttttgcatgtacttgatactcagtctgtaaactcagacttcgctttttttgtgagactatcctttcaatatttttataaacttttgtgtgtgctgtggcagggaacagttaacaaggagtttatttagaggggtttttttcattttttgtttttcttgttttgttttgttttgttttgttcttcttggtgtgctttttggatgggaccagaacttaacattttcctgaggactaggaagctcatcagacactggaatgcagtgattcttctaatgatggtcaactgcaaggagaaactgtttacatccttcccactacacagttgctatgatatgtaacaagtcacacatgtatatatcacacaagtcttaccaattctgcgtcactaggaagctatagcatggtcgtgaaagctctcctaatacttacttaaatagccatggaagaaaattatgcttgtcccttctgactgggttaagccatctttcttaagattcctgaagtagaaatagcaattaagaaattaattcaagttttgacggttaacatttagcagaaaaacaaaccattgaataagctactaggtgaaatgcaaaacaaccatcaatttttttaaactcaataattttgtgaaaaaaaaaaccaccaccaaacttttggttgtaaaagagaacccttgttcccttcctaagaaactgccttccacaattaaagaatactcatagaaagaaaataatcataaatcatatttgattaacatttcatttaagcttttaaaatatcaattttttaaatagctcccatttacccaaaataactagttatgggtctatttcttccatgattagaggagagagaacttgattcaagatactgaaaaatagagctgggactgagcctgtgaatgacaggaatgatctattaccaggtgactagtcggaaactacacagacgtgcactggtctgcatttgggggctaaagtgtatatattccatttaaaatggaatttgtttgtatttggggcagtcttcagtaaagcctttctcctttcttttctccattgaggacagttctgctcagcaaaattgttgagtacctgttctgggcaggtcccacgctatatgcacaaagttaagaaaaacttggtcttagcccttgggagctgacagcccatgggcattaaggcaaagtagttccagtgatttaaaatacggttccaaatacgctaaaaccaacttgtgccaaccagatttacagattggaaatactgcagatgatgtgaagttatcagttggaggagctgtgattaagctggataataagagaacgtgccatctgtaaagcactcagaaggcagccatccctagatgttggtttcatgtatattacactatctactactatccataaatgcaataatatgcatgttaacaacattaaaaacagcaaacagcaatctaagtacagaaaagctttttgtgtgtttaaaaaaattgaagaaaattcaggaagaaacgtgttaataaacattgtactgttcttaaaaaaaaaaaaaaaaaaaaaaaaaaaaaaaaaaaaaaaaaaaaaaaaaaaaaaaaaaaaaaaaaaaaaaaaaaaaaaaaaaaaaaaaaaaaaaaaaaaaaaaaaaaaaaaaaaaaaaaa

SEQ ID NO: 1432 - protein, 690 aa, Homo sapien
MGSSGLGKAATLDELLCTCIEMFDDNGELDNSYLPRIVLLMHRWYLSSTELAEKLLCMYRNATGESCNEFRLKICYFMRYWILKFPAEFNLDLGLIRMTEEFREVASQLGYEKHVSLIDISSIPSYDWMRRVTQRKKVSKKGKACLLFDHLEPIELAEHLTFLEHKSFRRISFTDYQSYVIHGCLENNPTLERSIALFNGISKWVQLMVLSKPTPQQRAEVITKFINVAKKLLQLKNFNTLMAVVGGLSHSSISRLKETHSHLSSEVTKNWNEMTELVSSNGNYCNYRKAFADCDGFKIPILGVHLKDLIAVHVIFPDWTEENKVNIVKMHQLSVTLSELVSLQNASHHLEPNMDLINLLTLSLDLYHTEDDIYKLSLVLEPRNSKSQPTSPTTPNKPVVPLEWALGVMPKPDPTVINKHIRKLVESVFRNYDHDHDGYISQEDFESIAANFPFLDSFCVLDKDQDGLISKDEMMAYFLRAKSQLHCKMGPGFIHNFQEMTYLKPTFCEHCAGFLWGIIKQGYKCKDCGANCHKQCKDLLVLACRRFARAPSLSSGHGSLPGSPSLPPAQDEVFEFPGVTAGHRDLDSRAITLVTGSSRKISVRLQRATTSQATQTEPVWSEAGWGDSGSHTFPKMKSKFHDKAAKDKGFAKWENEKPRVHAGVDVVDRGTEFELDQDEGEETRQDGEDG

SEQ ID NO: 1433 - DNA, 2058 bp, Homo sapien
gcccagacctatggattgaaagcgtgtgctttacccatctgctgtcttgctccatctgagaccagagccaagatctgcccaggactggaatgctttcccgagtggcttgagttggagcctgggactaggagcagccttattgaggtacaattcatgtgcttgtgggtttggatggcacaatctgtgtctgggctaaggaaagcagacttggcaccaacattaaccctgacagatccaggcatctattccaggaactggaagccaagcgcaacaggtgcttggaggtcatcatgatcagcccagaccccaggccctcccctggcttggcccggtgggctgagagctatgaggccaagtgtgagcgcaggcaagagatccgtgaaagccgccgctgccgtcccaatgtgaccacttgccgccaggtggggaagacgctgaggatccaacagagagagcagctccagagagctcgactgcagcagttcttcaggaggaggaacctggagctagaggagaagggcaaagcgcagcatccccaggccagggagcaagggccctccaggcggccaggacaggtgacaggcaccagctctgaagtctttccagcccagcatcctcctccctcaggcatctgcagggatctgtctgaccacctctcctcacaggctgggggccttcctccacaggacactcccatcaagaagccacccaaacaccaccgtggtactcagacaaaggcagaaggaccaacaattaagaacgatgccagtcagcaaaccaattacggagttgcagttctggataaggaaatcatccagctttctgattacctcaaagaggccctacaaagggagctggtcctaaaacagaaaatggtgattctccaagacctactgtccactctgattcaggcctctgacagctcttggaagggacagcttaatgaagacaaactgaaggggaaactgagatccttagaaaaccagctatacacctgtacccagaaatactccccttggggaatgaaaaaagtactactggagatggaagaccagaaaaacagctatgagcagaaggccaaggagtcactgcagaaagtgctggaggagaaaatgaatgcagagcagcaactacagagcacacagcgatccctggccctggcagagcagaagtgtgaagagtggaggagccagtatgaggctctgaaggaggactggaggacccttgggacccagcacagggagctggagagccaactccacgtgcttcagtccaaactgcagggagcagatagcagggacttacagatgaaccaggccctgcgatttttggaaaatgagcaccagcaactgcaggccaagattgaatgcctgcaaggggacagagacctgtgcagcttggatacccaggacctacaagatcaactaaaaaggtcagaggcagagaaactcaccctggtgaccagagtacagcagttgcagggtttgcttcaaaatcaatccttacagcttcaagaacaggagaaactcttaacaaagaaagatcaggctttgcccgtgtggagtccaaagtccttccctaacgaagtggagcctgagggtacagggaaggagaaagactgggatctcagagaccagctgcaaaagaagactttgcagctccaggccaaggaaaaggagtgcagagaactgcattcagaattagacaacctcagtgacgagtatctctcctgcctgcgtaagctgcagcactgtcgagaagagctgaaccagagccagcagctgcctcccagaaggcaatgtgggcgatggctcccagtgctgatggtggtgattgctgcagcactggcagtgttcctggccaataaagacaacctgatgatctgaataatttgtgacaactgccttgggtgaaaatcagaagcaagcaactcagcgaaaaactcagaaggtttgggtacattacagcttgggttttccaactgacttaggatttctgactttttattaatttcttaacctactgtaaataaacttcacctgaccagattgttcctca

SEQ ID NO: 1434 - protein, 531 aa, Homo sapien
MISPDPRPSPGLARWAESYEAKCERRQEIRESRRCRPNVTTCRQVGKTLRIQQREQLQRARLQQFFRRRNLELEEKGKAQHPQAREQGPSRRPGQVTGTSSEVFPAQHPPPSGICRDLSDHLSSQAGGLPPQDTPIKKPPKHHRGTQTKAEGPTIKNDASQQTNYGVAVLDKEIIQLSDYLKEALQRELVLKQKMVILQDLLSTLIQASDSSWKGQLNEDKLKGKLRSLENQLYTCTQKYSPWGMKKVLLEMEDQKNSYEQKAKESLQKVLEEKMNAEQQLQSTQRSLALAEQKCEEWRSQYEALKEDWRTLGTQHRELESQLHVLQSKLQGADSRDLQMNQALRFLENEHQQLQAKIECLQGDRDLCSLDTQDLQDQLKRSEAEKLTLVTRVQQLQGLLQNQSLQLQEQEKLLTKKDQALPVWSPKSFPNEVEPEGTGKEKDWDLRDQLQKKTLQLQAKEKECRELHSELDNLSDEYLSCLRKLQHCREELNQSQQLPPRRQCGRWLPVLMVVIAAALAVFLANKDNLMI

SEQ ID NO: 1435 - DNA, 3125 bp, Homo sapien
gcccagttggagccagacagcggggtggacaagtggcgtgtgtgctgcgaccccgagggaagatgaacgggacgcggaactggtgtaccctggtggacgtgcacccagaggaccaggcggcgggcagcgtggacattctcaggctgactctccagggtgaactgacaggagatgaacttgaacacatagcccagaaggcgggcaggaagacctatgccatggtgtccagccactcagctggtcattctctggcttcagaactggtggagtcccatgatggacatgaggagatcattaaggtgtacttgaaggggaggtctggagacaagatgattcacgagaagaatattaaccagctgaagagtgaggtccagtacatccaggaggccaggaactgcctacagaagctccgggaggatataagtagcaagcttgacaggaacctaggagattctctccatcgacaggagatacaggtggtgctagaaaagccaaatggctttagtcagagtcccacagccctgtacagcagcccacctgaggtggacacctgtataaatgaggatgttgagagcttgaggaagacggtgcaggacttgctggccaagcttcaggaggccaagcggcaacaccagtcagactgtgtggcttttgaggtcacactcagccggtaccagagggaagcagaacaaagtaatgtggcccttcagagagaggaggacagagtggagcagaaagaggcagaagtcggagagctgcagaggcgcttgctagggatggagacggagcatcaggccttactggcgaaagtgagggaaggggaggtggccctagaggaacttcggagcaacaatgctgactgccaagcagaacgagaaaaggctgctaccctggaaaaggaagtggccgggttgcgggagaagatccaccacttggatgacatgctcaagagccagcagcggaaagtccggcaaatgatagagcagctccagaattcaaaagctgtgatccagtcaaaggacgccaccatccaggagctcaaggagaaaatcgcctatctggaggcagagaatttagagatgcatgaccggatggaacacctgatagaaaaacaaatcagtcatggcaacttcagcacccaggcccgggccaagacagagaacccgggcagtattaggatatccaagccgcctagcccgaagcccatgcctgtcatccgagtggtggaaacctgagctgcctggagatggttgctgccattgctgctgcctctgcctcggagaagcccactgcccctgttggctgttaacactgcctttgacttcctgactgtcccctggctgcacccaggacttcgggctcctgtgtctcaccattcccaagcccctggccactctaagctgggcagacggagcacgagcacctattcaaggcactgcagccctttggaagacattgtcctgcaagcaggagccagggcaatatctatattcctacagtgactatttttctctgtagagagcctcccttctgttgtagactggactctggctgcgccataagccaggccttcatcagattgggagaggtgacaagatttgcctcagccctaaaagctggagacacagatgtccagagtgattggagaatgtcctgggggaatgaagttccttccacaaacacagctcagttcttagcaacaaactgtttgtttttctacttgctccatctgcagcctacgctgccctggcctcctgcagacagatagtggggttacctggcaaggcctggtgagagccagtgaacctaagctttgactgggtggccttgtctttctggggaggagggaatgtacattcagggagtagccttttgcggaaaaattctctagggctacagacagtcatgtgtgacttctctctgctgtgaaaactcccagagtctctttagggattttccctaaggtgtaccaccaggcacacctcagtcttcttgacccagagcctgaaaactgttttcactgggttccaccagtcccagcaaaatcctctttgtatttattttgctaagttattggtggttttgcttacatctcatgattgatataataccaaagttctatagccttctcttgcagtatttggatttgcttgaaaccgggaaaactgttcccattaggcttgttaatgtcagagtgacactattatgaatctttctctccctttcctctgcctgtttcttctctctttctccttcaaacttgctctgcagctaaggaaggtgagtctactttccctgaggctttggggtcagagtatatgttgtttggagaaagagggcaatcaggactcttctgggacccagatgagttcttcactagcccttctgaaccccttgctccataattggtcttttatcctggctctgaatgaccctgcaggtcatcatggttttctttttttattgtttttttttttctgagacagagtctcactctgtcacccaggctggagtgcagtagcgcgatctcagctcactgcaacctctgcctcccggatttaagcgattcttctgcctcagcctcccgagtagctgggactacaggtgtgccaccacgcctggctgatttttgtatttttagtagagatggggtttcaccatactggctaggctggtctcgaattcctgacctcaggtgatccacccacctcggcttcccaaagtgctaggattataggcttgagctactgtgcccggcccatggtgtttttctttagggctcttcctacagccttgagaagtagataggcatcagagtatggtactataggaatcagaaaaattcaaaacaaatgtggattaagtgtttaggctctatgtggctcacgcagccagaatccttaagtctgtgtgtttctgtgtctcaagactgggctcacattctggctttgtccataacaatgctctgggatttcagggagttccctcatttgtaaaatgagggggtcagagcaggtgatatccatgtttcttccctttctgatattgttgtctgtggcatattctttgtatggcgaatttaataaattatattaatgtgtctctttgaaaaaaaaaaaaaaaaa

SEQ ID NO: 1436 - protein, 390 aa, Homo sapien
MNGTRNWCTLVDVHPEDQAAGSVDILRLTLQGELTGDELEHIAQKAGRKTYAMVSSHSAGHSLASELVESHDGHEEIIKVYLKGRSGDKMIHEKNINQLKSEVQYIQEARNCLQKLREDISSKLDRNLGDSLHRQEIQVVLEKPNGFSQSPTALYSSPPEVDTCINEDVESLRKTVQDLLAKLQEAKRQHQSDCVAFEVTLSRYQREAEQSNVALQREEDRVEQKEAEVGELQRRLLGMETEHQALLAKVREGEVALEELRSNNADCQAEREKAATLEKEVAGLREKIHHLDDMLKSQQRKVRQMIEQLQNSKAVIQSKDATIQELKEKIAYLEAENLEMHDRMEHLIEKQISHGNFSTQARAKTENPGSIRISKPPSPKPMPVIRVVET

SEQ ID NO: 1437 - DNA, 1770 bp, Homo sapien
gaggagtggattacatattccaacagttgttattacattggtaaggaaagaagaacttgggaagaaagagtttgctggcctgtgcttcgaagaactctgatctgctttctatagataatgaggaagaaatggtatgtgtggggacttcccagttggctgtaagttgccatttgaactaaacgaaatagatcaggaactgaggacatatctaaattttctagttttatagaaggcttttatccacaagaatcaagatcttccctctctgagcaggaatcctttgtgcattgaagactttagattcctctctgcggtagacgtgcacttataagtatttgatggggtggattcgtggtcggaggtctcgacacagctgggagatgagtgaatttcataattataacttggatctgaagaagagtgatttttcaacacgatggcaaaagcaaagatgtccagtagtcaaaagcaaatgtagagaaaatgcatctccattttttttctgctgcttcatcgctgtagccatgggaatccgtttcattattatggtagcaatatggagtgctgtattcctaaactcattattcaaccaagaagttcaaattcccttgaccgaaagttactgtggcccatgtcctaaaaactggatatgttacaaaaataactgctaccaattttttgatgagagtaaaaactggtatgagagccaggcttcttgtatgtctcaaaatgccagccttctgaaagtatacagcaaagaggaccaggatttacttaaactggtgaagtcatatcattggatgggactagtacacattccaacaaatggatcttggcagtgggaagatggctccattctctcacccaacctactaacaataattgaaatgcagaagggagactgtgcactctatgcctcgagctttaaaggctatatagaaaactgttcaactccaaatacatacatctgcatgcaaaggactgtgtaaagatgatcaaccatctcaataaaagccaggaacagagaagagattacaccagcggtaacactgccaaccgagactaaaggaaacaaacaaaaacaggacaaaatgaccaaagactgtcagatttcttagactccacaggaccaaaccatagaacaatttcactgcaaacatgcatgattctccaagacaaaagaagagagatcctaaaggcaattcagatatccccaaggctgcctctcccaccacaagcccagagtggatgggctgggggaggggtgctgttttaatttctaaaggtaggaccaacacccaggggatcagtgaaggaagagaaggccagcagatcagtgagagtgcaaccccaccctccacaggaaattgcctcatgggcagggccacagcagagagacacagcatgggcagtgccttccctgcctgtgggggtcatgctgccacttttaatgggtcctccacccaacggggtcagggaggtggtgctgccccagtgggccatgattatcttaaaggcattattctccagccttaagatcttaggacgtttcctttgctatgatttgtacttgcttgagtcccatgactgtttctcttcctctctttcttccttttggaatagtaatatccatcctatgtttgtcccactattgtattttggaagcacataacttgtttggtttcacaggttcacagttaagaaggaattttgcctctgaataaatagaatcttgagtctcatgcaaaaaaaaaaaaaaaaaaaaaaaaa

SEQ ID NO: 1438 - protein, 216 aa, Homo sapien
MGWIRGRRSRHSWEMSEFHNYNLDLKKSDFSTRWQKQRCPVVKSKCRENASPFFFCCFIAVAMGIRFIIMVAIWSAVFLNSLFNQEVQIPLTESYCGPCPKNWICYKNNCYQFFDESKNWYESQASCMSQNASLLKVYSKEDQDLLKLVKSYHWMGLVHIPTNGSWQWEDGSILSPNLLTIIEMQKGDCALYASSFKGYIENCSTPNTYICMQRTV

SEQ ID NO: 1439 - DNA, 1504 bp, Homo sapien
cctaagatgagctttccatgtaaatttgtagccagcttccttctgattttcaatgtttcttccaaaggtgcagtctccaaagagattacgaatgccttggaaacctggggtgccttgggtcaggacatcaacttggacattcctagttttcaaatgagtgatgatattgacgatataaaatgggaaaaaacttcagacaagaaaaagattgcacaattcagaaaagagaaagagactttcaaggaaaaagatacatataagctatttaaaaatggaactctgaaaattaagcatctgaagaccgatgatcaggatatctacaaggtatcaatatatgatacaaaaggaaaaaatgtgttggaaaaaatatttgatttgaagattcaagagagggtctcaaaaccaaagatctcctggacttgtatcaacacaaccctgacctgtgaggtaatgaatggaactgaccccgaattaaacctgtatcaagatgggaaacatctaaaactttctcagagggtcatcacacacaagtggaccaccagcctgagtgcaaaattcaagtgcacagcagggaacaaagtcagcaaggaatccagtgtcgagcctgtcagctgtccagagaaaggtctggacatctatctcatcattggcatatgtggaggaggcagcctcttgatggtctttgtggcactgctcgttttctatatcaccaaaaggaaaaaacagaggagtcggagaaatgatgaggagctggagacaagagcccacagagtagctactgaagaaaggggccggaagccccaacaaattccagcttcaacccctcagaatccagcaacttcccaacatcctcctccaccacctggtcatcgttcccaggcacctagtcatcgtcccccgcctcctggacaccgtgttcagcaccagcctcagaagaggcctcctgctccgtcgggcacacaagttcaccagcagaaaggcccgcccctccccagacctcgagttcagccaaaacctccccatggggcagcagaaaactcattgtccccttcctctaattaaaaaagatagaaactgtctttttcaataaaaagcactgtggatttctgccctcctgatgtgcatatccgtacttccatgaggtgttttctgtgtgcagaacattgtcacctcctgaggctgtgggccacagccacctctgcatcttcgaactcagccatgtggtcaacatctggagtttttggtctcctcagagagctccatcacaccagtaaggagaagcaatataagtgtgattgcaagaatggtagaggaccgagcacagaaatcttagagatttcttgtcccctctcaggtcatgtgtagatgcgataaatcaagtgattggtgtgcctgggtctcactacaagcagcctatctgcttaagagactctggagtttcttatgtgccctggtggacacttgcccaccatcctgtgagtaaaagtgaaataaaagctttgac

SEQ ID NO: 1440 - protein, 351 aa, Homo sapien
MSFPCKFVASFLLIFNVSSKGAVSKEITNALETWGALGQDINLDIPSFQMSDDIDDIKWEKTSDKKKIAQFRKEKETFKEKDTYKLFKNGTLKIKHLKTDDQDIYKVSIYDTKGKNVLEKIFDLKIQERVSKPKISWTCINTTLTCEVMNGTDPELNLYQDGKHLKLSQRVITHKWTTSLSAKFKCTAGNKVSKESSVEPVSCPEKGLDIYLIIGICGGGSLLMVFVALLVFYITKRKKQRSRRNDEELETRAHRVATEERGRKPQQIPASTPQNPATSQHPPPPPGHRSQAPSHRPPPPGHRVQHQPQKRPPAPSGTQVHQQKGPPLPRPRVQPKPPHGAAENSLSPSSN

SEQ ID NO: 1441 - DNA, 5097 bp, Homo sapien
ctgcaggaaggagagaggaagaggagcagaagggggcagcagcggacgccgctaacggcctccctcggcgctgacaggctgggccggcgcccggctcgcttgggtgttcgcgtcgccacttcggcttctcggccggtcgggcccctcggcccgggcttgcggcgcgcgtcggggctgagggctgctgcggcgcagggagaggcctggtcctcgctgccgagggatgtgagtgggagctgagcccacactggagggcccccgagggcccagcctggaggtcgttcagagccgtgcccgccccggggcttcgcagaccttgacccgccgggtaggagccgcccctgcgggctcgagggcgcgctctggtcgcccgatctgtgtagccggtttcagaagcaggcaacaggaacaagatgtgaactgtttctcttctgcagaaaaagaggctcttcctcctcctcccgcgacggcaaatgttctgaaaaagactctgcatgggaatggcctgccttacgatgacagaaatggagggaacatccacctcttctatatatcagaatggtgatatttctggaaatgccaattctatgaagcaaatagatccagttcttcaggtgtatctttaccattcccttgggaaatctgaggcagattatctgacctttccatctggggagtatgttgcagaagaaatctgtattgctgcttctaaagcttgtggtatcacacctgtgtatcataatatgtttgctttaatgagtgaaacagaaaggatctggtatccacccaaccatgtcttccatatagatgagtcaaccaggcataatgtactctacagaataagattttactttcctcgttggtattgcagtggcagcaacagagcctatcggcatggaatatctcgaggtgctgaagctcctcttcttgatgactttgtcatgtcttacctctttgctcagtggcggcatgattttgtgcacggatggataaaagtacctgtgactcatgaaacacaggaagaatgtcttgggatggcagtgttagatatgatgagaatagccaaagaaaacgatcaaaccccactggccatctataactctatcagctacaagacattcttaccaaaatgtattcgagcaaagatccaagactatcatattttgacaaggaagcgaataaggtacagatttcgcagatttattcagcaattcagccaatgcaaagccactgccagaaacttgaaacttaagtatcttataaatctggaaactctgcagtctgccttctacacagagaaatttgaagtaaaagaacctggaagtggtccttcaggtgaggagatttttgcaaccattataataactggaaacggtggaattcagtggtcaagagggaaacataaagaaagtgagacactgacagaacaggatttacagttatattgcgattttcctaatattattgatgtcagtattaagcaagcaaaccaagagggttcaaatgaaagccgagttgtaactatccataagcaagatggtaaaaatctggaaattgaacttagctcattaagggaagctttgtctttcgtgtcattaattgatggatattatagattaactgcagatgcacatcattacctctgtaaagaagtagcacctccagccgtgcttgaaaatatacaaagcaactgtcatggcccaatttcgatggattttgccattagtaaactgaagaaagcaggtaatcagactggactgtatgtacttcgatgcagtcctaaggactttaataaatattttttgacttttgctgtcgagcgagaaaatgtcattgaatataaacactgtttgattacaaaaaatgagaatgaagagtacaacctcagtgggacaaagaagaacttcagcagtcttaaagatcttttgaattgttaccagatggaaactgttcgctcagacaatataattttccagtttactaaatgctgtcccccaaagccaaaagataaatcaaaccttctagtcttcagaacgaatggtgtttctgatgtaccaacctcaccaacattacagaggcctactcatatgaaccaaatggtgtttcacaaaatcagaaatgaagatttgatatttaatgaaagccttggccaaggcacttttacaaagatttttaaaggcgtacgaagagaagtaggagactacggtcaactgcatgaaacagaagttcttttaaaagttctggataaagcacacagaaactattcagagtctttctttgaagcagcaagtatgatgagcaagctttctcacaagcatttggttttaaattatggagtatgtgtctgtggagacgagaatattctggttcaggagtttgtaaaatttggatcactagatacatatctgaaaaagaataaaaattgtataaatatattatggaaacttgaagttgctaaacagttggcatgggccatgcattttctagaagaaaacacccttattcatgggaatgtatgtgccaaaaatattctgcttatcagagaagaagacaggaagacaggaaatcctcctttcatcaaacttagtgatcctggcattagtattacagttttgccaaaggacattcttcaggagagaataccatgggtaccacctgaatgcattgaaaatcctaaaaatttaaatttggcaacagacaaatggagttttggtaccactttgtgggaaatctgcagtggaggagataaacctctaagtgctctggattctcaaagaaagctacaattttatgaagataggcatcagcttcctgcaccaaagtgggcagaattagcaaaccttataaataattgtatggattatgaaccagatttcaggccttctttcagagccatcatacgagatcttaacagtttgtttactccagattatgaactattaacagaaaatgacatgttaccaaatatgaggataggtgccctagggttttctggtgcctttgaagaccgggatcctacacagtttgaagagagacatttgaaatttctacagcaacttggcaagggtaattttgggagtgtggagatgtgccggtatgaccctctacaggacaacactggggaggtggtcgctgtaaaaaagcttcagcatagtactgaagagcacctaagagactttgaaagggaaattgaaatcctgaaatccctacagcatgacaacattgtaaagtacaagggagtgtgctacagtgctggtcggcgtaatctaaaattaattatggaatatttaccatatggaagtttacgagactatcttcaaaaacataaagaacggatagatcacataaaacttctgcagtacacatctcagatatgcaagggtatggagtatcttggtacaaaaaggtatatccacagggatctggcaacgagaaatatattggtggagaacgagaacagagttaaaattggagattttgggttaaccaaagtcttgccacaagacaaagaatactataaagtaaaagaacctggtgaaagtcccatattctggtatgctccagaatcactgacagagagcaagttttctgtggcctcagatgtttggagctttggagtggttctgtatgaacttttcacatacattgagaagagtaaaagtccaccagcggaatttatgcgtatgattggcaatgacaaacaaggacagatgatcgtgttccatttgatagaacttttgaagaataatggaagattaccaagaccagatggatgcccagatgagatctatatgatcatgacagaatgctggaacaataatgtaaatcaacgcccctcctttagggatctagctcttcgagtggatcaaataagggataacatggctggatgaaagaaatgaccttcattctgagaccaaagtagatttacagaacaaagttttatatttcacattgctgtggactattattacatatatcattattatataaatcatgatgctagccagcaaagatgtgaaaatatctgctcaaaactttcaaagtttagtaagtttttcttcatgaggccaccagtaaaagacattaatgagaattccttagcaaggattttgtaagaagtttcttaaacattgtctgttaacatcactcttgtctggcaaaagaaaaaaaatagactttttcaactcagctttttgagacctgaaaaaattattatgtaaattttgcaatgttaaagatgcacagaatatgtatgtatagtttttaccacagtggatgtataataccttggcatcttgtgtgatgttttacacacatgagggctggtgttcattaatactgttttctaatttttccatagttaatctataattaattacttcactatacaaacaaattaagatgttcagataattgaataagtacctttgtgtccttgttcatttatatcgctggccagcattataagcaggtgtatacttttagcttgtagttccatgtactgtaaatatttttcacataaagggaacaaatgtctagttttatttgtataggaaatttccctgaccctaaataatacattttgaaatgaaacaagcttacaaagatataatctattttattatggtttcccttgtatctatttgtggtgaatgtgttttttaaatggaactatctccaaatttttctaagactactatgaacagttttcttttaaaattttgagattaagaatgccaggaatattgtcatcctttgagctgctgactgccaataacattcttcgatctctgggatttatgctcatgaactaaatttaagcttaagccataaaatagattagattgttttttaaaaatggatagctcattaagaagtgcagcaggttaagaattttttcctaaagactgtatatttgaggggtttcagaattttgcattgcagtcatagaagagatttatttcctttttagaggggaaatgaggtaaataagtaaaaaagtatgcttgttaattttattcaagaatgccagtagaaaattcataacgtgtatctttaagaaaaatgagcatacatcttaaatcttttcaatta

SEQ ID NO: 1442 - protein, 1132 aa, Homo sapien
MGMACLTMTEMEGTSTSSIYQNGDISGNANSMKQIDPVLQVYLYHSLGKSEADYLTFPSGEYVAEEICIAASKACGITPVYHNMFALMSETERIWYPPNHVFHIDESTRHNVLYRIRFYFPRWYCSGSNRAYRHGISRGAEAPLLDDFVMSYLFAQWRHDFVHGWIKVPVTHETQEECLGMAVLDMMRIAKENDQTPLAIYNSISYKTFLPKCIRAKIQDYHILTRKRIRYRFRRFIQQFSQCKATARNLKLKYLINLETLQSAFYTEKFEVKEPGSGPSGEEIFATIIITGNGGIQWSRGKHKESETLTEQDLQLYCDFPNIIDVSIKQANQEGSNESRVVTIHKQDGKNLEIELSSLREALSFVSLIDGYYRLTADAHHYLCKEVAPPAVLENIQSNCHGPISMDFAISKLKKAGNQTGLYVLRCSPKDFNKYFLTFAVERENVIEYKHCLITKNENEEYNLSGTKKNFSSLKDLLNCYQMETVRSDNIIFQFTKCCPPKPKDKSNLLVFRTNGVSDVPTSPTLQRPTHMNQMVFHKIRNEDLIFNESLGQGTFTKIFKGVRREVGDYGQLHETEVLLKVLDKAHRNYSESFFEAASMMSKLSHKHLVLNYGVCVCGDENILVQEFVKFGSLDTYLKKNKNCINILWKLEVAKQLAWAMHFLEENTLIHGNVCAKNILLIREEDRKTGNPPFIKLSDPGISITVLPKDILQERIPWVPPECIENPKNLNLATDKWSFGTTLWEICSGGDKPLSALDSQRKLQFYEDRHQLPAPKWAELANLINNCMDYEPDFRPSFRAIIRDLNSLFTPDYELLTENDMLPNMRIGALGFSGAFEDRDPTQFEERHLKFLQQLGKGNFGSVEMCRYDPLQDNTGEVVAVKKLQHSTEEHLRDFEREIEILKSLQHDNIVKYKGVCYSAGRRNLKLIMEYLPYGSLRDYLQKHKERIDHIKLLQYTSQICKGMEYLGTKRYIHRDLATRNILVENENRVKIGDFGLTKVLPQDKEYYKVKEPGESPIFWYAPESLTESKFSVASDVWSFGVVLYELFTYIEKSKSPPAEFMRMIGNDKQGQMIVFHLIELLKNNGRLPRPDGCPDEIYMIMTECWNNNVNQRPSFRDLALRVDQIRDNMAG

SEQ ID NO: 1443 - DNA, 5097 bp, Homo sapien; identical to SEQ ID NO: 1441

SEQ ID NO: 1444 - protein, 1132 aa, Homo sapien; identical to SEQ ID NO: 1442

SEQ ID NO: 1445 - DNA, 4932 bp, Homo sapien
ggcagggcacacctggattgcattagaatgagactcactacccagttcaggtgtgttgcgttgtgggtctccggcacatttcagaggctgattaggaccctgaccccacactggggtttacacccctaaaagcaggtgtgtcccgtggcaactgagtgggtgcgtgaaaaggggggatcatcaattaccagctggagcaatcgaatcggttaaatgtgaatcaagtcacagtgcttccttaacccaacctctctgttggggtcagccacagcctaaaccgcctgccgttcagcctgagaggctgctgctagcctgctcacgcatgcagcccgggctgcagaggaagtgtggggaggaaggaagtgggtatagaagggtgctgagatgtgggtcttgaagagaatagccataacgtctttgtcactaaaatgttccccaggggccttcggcgagtctttttgtttggttttttgtttttaatctgtggctcttgataatttatctagtggttgcctacacctgaaaaacaagacacagtgtttaactatcaacgaaagaactggacggctccccgccgcagtcccactccccgagtttgtggctggcatttgggccacgccgggctgggcggctcacagcgaggggcgcgcagtttggggtcacacagctccgcttctaggccccaaccaccgttaaaaggggaagcccgtgccccatcaggtccgctcttgctgagcccagagccatcccgcgctctgcgggctgggaggcccgggccagacgcgagtcctgcgcagccgaggttccccagcgccccctgcagccgcgcgtaggcagagacggagcccggccctgcgcctccgcaccacgcccgggaccccacccagcggcccgtacccggagaagcagcgcgagcacccgaagctcccggctcggcggcagaaaccgggagtggggccgggcgagtgcgcggcatcccaggccggcccgaacgtccgcccgcggtgggccgacttcccctcctcttccctctctccttcctttagcccgctggcgccggacacgctgcgcctcatctcttggggcgttcttccccgttggccaaccgtcgcatcccgtgcaactttggggtagtggccgcttagtgttgaatgttccccaccgagagcgcatggcttgggaagcgaggcgcgaacccgggccccgaagccgccgtccgggagacggtgatgctgttgctgtgcctgggggtcccgaccggccgcccctacaacgtggacactgagagcgcgctgctttaccagggcccccacaacacgctgttcggctactcggtcgtgctgcacagccacggggcgaaccgatggctcctagtgggtgcgcccactgccaactggctcgccaacgcttcagtgatcaatcccggggcgatttacagatgcaggatcggaaagaatcccggccagacgtgcgaacagctccagctgggtagccctaatggagaaccttgtggaaagacttgtttggaagagagagacaatcagtggttgggggtcacactttccagacagccaggagaaaatggatccatcgtgacttgtgggcatagatggaaaaatatattttacataaagaatgaaaataagctccccactggtggttgctatggagtgccccctgatttacgaacagaactgagtaaaagaatagctccgtgttatcaagattatgtgaaaaaatttggagaaaattttgcatcatgtcaagctggaatatccagtttttacacaaaggatttaattgtgatgggggccccaggatcatcttactggactggctctctttttgtctacaatataactacaaataaatacaaggcttttttagacaaacaaaatcaagtaaaatttggaagttatttaggatattcagtcggagctggtcattttcggagccagcatactaccgaagtagtcggaggagctcctcaacatgagcagattggtaaggcatatatattcagcattgatgaaaaagaactaaatatcttacatgaaatgaaaggtaaaaagcttggatcgtactttggagcttctgtctgtgctgtggacctcaatgcagatggcttctcagatctgctcgtgggagcacccatgcagagcaccatcagagaggaaggaagagtgtttgtgtacatcaactctggctcgggagcagtaatgaatgcaatggaaacaaacctcgttggaagtgacaaatatgctgcaagatttggggaatctatagttaatcttggcgacattgacaatgatggctttgaagatgttgctatcggagctccacaagaagatgacttgcaaggtgctatttatatttacaatggccgtgcagatgggatctcgtcaaccttctcacagagaattgaaggacttcagatcagcaaatcgttaagtatgtttggacagtctatatcaggacaaattgatgcagataataatggctatgtagatgtagcagttggtgcttttcggtctgattctgctgtcttgctaaggacaagacctgtagtaattgttgacgcttctttaagccaccctgagtcagtaaatagaacgaaatttgactgtgttgaaaatggatggccttctgtgtgcatagatctaacactttgtttctcatataagggcaaggaagttccaggttacattgttttgttttataacatgagtttggatgtgaacagaaaggcagagtctccaccaagattctatttctcttctaatggaacttctgacgtgattacaggaagcatacaggtgtccagcagagaagctaactgtagaacacatcaagcatttatgcggaaagatgtgcgggacatcctcaccccaattcagattgaagctgcttaccaccttggtcctcatgtcatcagtaaacgaagtacagaggaattcccaccacttcagccaattcttcagcagaagaaagaaaaagacataatgaaaaaaacaataaactttgcaaggttttgtgcccatgaaaattgttctgctgatttacaggtttctgcaaagattgggtttttgaagccccatgaaaataaaacatatcttgctgttgggagtatgaagacattgatgttgaatgtgtccttgtttaatgctggagatgatgcatatgaaacgactctacatgtcaaactacccgtgggtctttatttcattaagattttagagctggaagagaagcaaataaactgtgaagtcacagataactctggcgtggtacaacttgactgcagtattggctatatatatgtagatcatctctcaaggatagatattagctttctcctggatgtgagctcactcagcagagcggaagaggacctcagtatcacagtgcatgctacctgtgaaaatgaagaggaaatggacaatctaaagcacagcagagtgactgtagcaatacctttaaaatatgaggttaagctgactgttcatgggtttgtaaacccaacttcatttgtgtatggatcaaatgatgaaaatgagcctgaaacgtgcatggtggagaaaatgaacttaactttccatgttatcaacactggcaatagtatggctcccaatgttagtgtggaaataatggtaccaaattcttttagcccccaaactgataagctgttcaacattttggatgtccagactactactggagaatgccactttgaaaattatcaaagagtgtgtgcattagagcagcaaaagagtgcaatgcagaccttgaaaggcatagtccggttcttgtccaagactgataagaggctattgtactgcataaaagctgatccacattgtttaaatttcttgtgtaattttgggaaaatggaaagtggaaaagaagccagtgttcatatccaactggaaggccggccatccattttagaaatggatgagacttcagcactcaagtttgaaataagagcaacaggttttccagagccaaatccaagagtaattgaactaaacaaggatgagaatgttgcgcatgttctactggaaggactacatcatcaaagacccaaacgttatttcaccatagtgattatttcaagtagcttgctacttggacttattgtacttctgttgatctcatatgttatgtggaaggctggcttctttaaaagacaatacaaatctatcctacaagaagaaaacagaagagacagttggagttatatcaacagtaaaagcaatgatgattaaggacttctttcaaattgagagaatggaaaacagactcaggttgtagtaaagaaatttaaaagacactgtttacaagaaaaaatgaattttgtttggacttcttttactcatgatcttgtgacatattatgtcttcatgcaaggggaaaatctcagcaatgattactctttgagatagaagaactgcaaaggtaataatacagccaaagataatctctcagcttttaaatgggtagagaaacactaaagcattcaatttattcaagaaaagtaagcccttgaagatatcttgaaatgaaagtataactgagttaaattatactggagaagtcttagacttgaaatactacttaccatatgtgcttgcctcagtaaaatgaaccccactgggtgggcagaggttcatttcaaatacatctttgatacttgttcaaaatatgttctttaaaaatataattttttagagagctgttcccaaattttctaacgagtggaccattatcactttaaagccctttatttataatacatttcctacgggctgtgttccaacaaccattttttttcagcagactatgaatattatagtattataggccaaactggcaaacttcagactgaacatgtacactggtttgagcttagtgaaatgacttccggaatct

SEQ ID NO: 1446 - protein, 1038 aa, Homo sapien
MFPTESAWLGKRGANPGPEAAVRETVMLLLCLGVPTGRPYNVDTESALLYQGPHNTLFGYSVVLHSHGANRWLLVGAPTANWLANASVINPGAIYRCRIGKNPGQTCEQLQLGSPNGEPCGKTCLEERDNQWLGVTLSRQPGENGSIVTCGHRWKNIFYIKNENKLPTGGCYGVPPDLRTELSKRIAPCYQDYVKKFGENFASCQAGISSFYTKDLIVMGAPGSSYWTGSLFVYNITTNKYKAFLDKQNQVKFGSYLGYSVGAGHFRSQHTTEVVGGAPQHEQIGKAYIFSIDEKELNILHEMKGKKLGSYFGASVCAVDLNADGFSDLLVGAPMQSTIREEGRVFVYINSGSGAVMNAMETNLVGSDKYAARFGESIVNLGDIDNDGFEDVAIGAPQEDDLQGAIYIYNGRADGISSTFSQRIEGLQISKSLSMFGQSISGQIDADNNGYVDVAVGAFRSDSAVLLRTRPVVIVDASLSHPESVNRTKFDCVENGWPSVCIDLTLCFSYKGKEVPGYIVLFYNMSLDVNRKAESPPRFYFSSNGTSDVITGSIQVSSREANCRTHQAFMRKDVRDILTPIQIEAAYHLGPHVISKRSTEEFPPLQPILQQKKEKDIMKKTINFARFCAHENCSADLQVSAKIGFLKPHENKTYLAVGSMKTLMLNVSLFNAGDDAYETTLHVKLPVGLYFIKILELEEKQINCEVTDNSGVVQLDCSIGYIYVDHLSRIDISFLLDVSSLSRAEEDLSITVHATCENEEEMDNLKHSRVTVAIPLKYEVKLTVHGFVNPTSFVYGSNDENEPETCMVEKMNLTFHVINTGNSMAPNVSVEIMVPNSFSPQTDKLFNILDVQTTTGECHFENYQRVCALEQQKSAMQTLKGIVRFLSKTDKRLLYCIKADPHCLNFLCNFGKMESGKEASVHIQLEGRPSILEMDETSALKFEIRATGFPEPNPRVIELNKDENVAHVLLEGLHHQRPKRYFTIVIISSSLLLGLIVLLLISYVMWKAGFFKRQYKSILQEENRRDSWSYINSKSNDD

SEQ ID NO: 1447 - DNA, 2502 bp, Homo sapien
gaattcgtgggtcgtgctgcgtcgacaacggtagtgacgcgtattgcctggaggatggcggacgccggcattcgccgcgtggttcccagcgacctgtatcccctcgtgctcggcttcctgcgcgataaccaactctcagaggtggccaataagttcgccaaagcgacaggagctacacagcaggatgccaatgcctcttccctcttagacatctatagcttctggctcaagtctgccaaggtcccagagcgaaagttacaggcaaatggaccagtggctaagaaagctaagaagaaggcctcatccagtgacagtgaggacagcagcgaggaggaggaggaagttcaagggcctccagcaaagaaggctgctgtacctgccaagcgagtcggtctgcctcctgggaaggctgcagccaaagcatcagagagtagcagcagtgaagagtccagagatgatgatgatgaggaggaccaaaagaaacagcctgtccagaagggagttaagccccaagccaaggcagccaaagctcctcctaagaaggccaagagctctgattctgattctgactcaagctccgaggatgagccaccaaagaaccagaagccaaagataacacctgtgacagttaaagctcagactaaagcccctcccaaaccagctcgagcagcacctaaaatagccaatggtaaagcagccagtagcagcagtagcagcagcagcagcagtagcagtgatgactcagaggaggagaaggcagcagccacccccaagaagactgtacctaaaaagcaagttgtggccaaagccccagtgaaagcagctaccacccctacccggaagagttctagcagtgaggattcctccagtgacgaggaagaggagcaaaaaaaacccatgaaaaataaaccaggtccctacagttacgcccccccgccttctgctcccccaccaaagaagtctctgggaacccagcctcccaagaaggctgtggagaagcagcagcctgtggaaagcagtgaagacagcagtgatgagtctgattcaagttctgaagaagagaagaaacccccaactaaggcagtagtctctaaagcaaccactaaaccacctccagcaaagaaagcagcagagagctcttcagacagctcagactctgacagctctgaggatgatgaagctccttctaagccagctggtaccaccaagaattcttcaaataagccagctgtcaccaccaagtcacctgcagtgaagccagctgcagcccccaagcaacctgtgggcggtggccagaagcttctgacgagaaaggctgacagcagctccagcgaggaagagagcagctccagtgaggaggagaagacaaagaagatggtggccaccactaagcccaaggcgactgccaaagcagctctatctctgcctgccaagcaggctcctcagggtagtagggacagcagctctgattcagacagctccagcagtgaggaggaggaagagaagacatctaagtctgcagttaagaagaagccacagaaggtagcaggaggtgcagccccttccaagccagcctctgcaaagaaaggaaaggctgagagcagcaacagttcttcttctgatgactccagtgaggaagaggaagagaagctcaagggcaagggctctccaagaccacaagcccccaaggccaatggcacctctgcactgactgcccagaatggaaaagcagctaagaacagtgaggaggaggaagaagaaaagaaaaaggcggcagtggtagtttccaaatcaggttcattaaagaagcggaagcagaatgaggctgccaaggaggcagagactcctcaggccaagaagataaagcttcagacccctaacacatttccaaaaaggaagaaaggagaaaaaagggcatcatccccattccgaagggtcagggaggaggaaattgaggtggattcacgagttgcggacaactcctttgatgccaagcgaggtgcagccggagactggggagagcgagccaatcaggttttgaagttcaccaaaggcaagtcctttcggcatgagaaaaccaagaagaagcggggcagctaccggggaggctcaatctctgtccaggtcaattctattaagtttgacagcgagtgacctgaggccatcttcggtgaagcaagggtgatgatcggagactacttactttctccagtggacctgggaaccctcaggtctctaggtgagggtcttgatgaggacagaagtttagagtaggtcctaagactttacagtgtaacatcctctctggtccttttctgtgttcctagttttgtacagacttgtttttgagtgttgagtagcagggacaaaataagggaatgttattttttaagaaaattcattttcattgttgtctccttccttttctgtgaaagtcctcatactgagaaatttgtatattttatattaaatcacttactattgaaaaaaaaaaaggaattc

SEQ ID NO: 1448 - protein, 699 aa, Homo sapien
MADAGIRRVVPSDLYPLVLGFLRDNQLSEVANKFAKATGATQQDANASSLLDIYSFWLKSAKVPERKLQANGPVAKKAKKKASSSDSEDSSEEEEEVQGPPAKKAAVPAKRVGLPPGKAAAKASESSSSEESRDDDDEEDQKKQPVQKGVKPQAKAAKAPPKKAKSSDSDSDSSSEDEPPKNQKPKITPVTVKAQTKAPPKPARAAPKIANGKAASSSSSSSSSSSSDDSEEEKAAATPKKTVPKKQVVAKAPVKAATTPTRKSSSSEDSSSDEEEEQKKPMKNKPGPYSYAPPPSAPPPKKSLGTQPPKKAVEKQQPVESSEDSSDESDSSSEEEKKPPTKAVVSKATTKPPPAKKAAESSSDSSDSDSSEDDEAPSKPAGTTKNSSNKPAVTTKSPAVKPAAAPKQPVGGGQKLLTRKADSSSSEEESSSSEEEKTKKMVATTKPKATAKAALSLPAKQAPQGSRDSSSDSDSSSSEEEEEKTSKSAVKKKPQKVAGGAAPSKPASAKKGKAESSNSSSSDDSSEEEEEKLKGKGSPRPQAPKANGTSALTAQNGKAAKNSEEEEEEKKKAAVVVSKSGSLKKRKQNEAAKEAETPQAKKIKLQTPNTFPKRKKGEKRASSPFRRVREEEIEVDSRVADNSFDAKRGAAGDWGERANQVLKFTKGKSFRHEKTKKKRGSYRGGSISVQVNSIKFDSE

SEQ ID NO: 1449 - DNA, 3100 bp, Homo sapien
actcgtctctggtaaagtctgagcaggacagggtggctgactggcagatccagaggttcccttggcagtccacgccaggccttcaccatggatcagttccctgaatcagtgacagaaaactttgagtacgatgatttggctgaggcctgttatattggggacatcgtggtctttgggactgtgttcctgtccatattctactccgtcatctttgccattggcctggtgggaaatttgttggtagtgtttgccctcaccaacagcaagaagcccaagagtgtcaccgacatttacctcctgaacctggccttgtctgatctgctgtttgtagccactttgcccttctggactcactatttgataaatgaaaagggcctccacaatgccatgtgcaaattcactaccgccttcttcttcatcggcttttttggaagcatattcttcatcaccgtcatcagcattgataggtacctggccatcgtcctggccgccaactccatgaacaaccggaccgtgcagcatggcgtcaccatcagcctaggcgtctgggcagcagccattttggtggcagcaccccagttcatgttcacaaagcagaaagaaaatgaatgccttggtgactaccccgaggtcctccaggaaatctggcccgtgctccgcaatgtggaaacaaattttcttggcttcctactccccctgctcattatgagttattgctacttcagaatcatccagacgctgttttcctgcaagaaccacaagaaagccaaagccattaaactgatccttctggtggtcatcgtgtttttcctcttctggacaccctacaacgttatgattttcctggagacgcttaagctctatgacttctttcccagttgtgacatgaggaaggatctgaggctggccctcagtgtgactgagacggttgcatttagccattgttgcctgaatcctctcatctatgcatttgctggggagaagttcagaagatacctttaccacctgtatgggaaatgcctggctgtcctgtgtgggcgctcagtccacgttgatttctcctcatctgaatcacaaaggagcaggcatggaagtgttctgagcagcaattttacttaccacacgagtgatggagatgcattgctccttctctgaagggaatcccaaagccttgtgtctacagagaacctggagttcctgaacctgatgctgactagtgaggaaagatttttgttgttatttcttacaggcacaaaatgatggacccaatgcacacaaaacaaccctagagtgttgttgagaattgtgctcaaaatttgaagaatgaacaaattgaactctttgaatgacaaagagtagacatttctcttactgcaaatgtcatcagaactttttggtttgcagatgacaaaaattcaactcagactagtttagttaaatgagggtggtgaatattgttcatattgtggcacaagcaaaagggtgtctgagccctcaaagtgaggggaaaccagggcctgagccaagctagaattccctctctctgactctcaaatcttttagtcattatagatcccccagactttacatgacacagctttatcaccagagagggactgacacccatgtttctctggccccaagggaaaattcccagggaagtgctctgataggccaagtttgtatcaggtgcccatccctggaaggtgctgttatccatggggaagggatatataagatggaagcttccagtccaatctcatggagaagcagaaatacatatttccaagaagttggatgggtgggtactattctgattacacaaaacaaatgccacacatcacccttaccatgtgcctgatccagcctctcccctgattacaccagcctcgtcttcattaagccctcttccatcatgtccccaaacctgcaagggctccccactgcctactgcatcgagtcaaaactcaaatgcttggcttctcatacgtccaccatggggtcctaccaatagattccccattgcctcctccttcccaaaggactccacccatcctatcagcctgtctcttccatatgacctcatgcatctccacctgctcccaggccagtaagggaaatagaaaaaccctgcccccaaataagaagggatggattccaaccccaactccagtagcttgggacaaatcaagcttcagtttcctggtctgtagaagagggataaggtacctttcacatagagatcatcctttccagcatgaggaactagccaccaactcttgcaggtctcaacccttttgtctgcctcttagacttctgctttccacacctgcactgctgtgctgtgcccaagttgtggtgctgacaaagcttggaagagcctgcaggtgccttggccgcgtgcatagcccagacacagaagaggctggttcttacgatggcacccagtgagcactcccaagtctacagagtgatagccttccgtaacccaactctcctggactgccttgaatatcccctcccagtcaccttgtgcaagcccctgcccatctgggaaaataccccatcattcatgctactgccaacctggggagccagggctatgggagcagcttttttttcccccctagaaacgtttggaacaatgtaaaactttaaagctcgaaaacaattgtaataatgctaaagaaaaagtcatccaatctaaccacatcaatattgtcattcctgtattcacccgtccagaccttgttcacactctcacatgtttagagttgcaatcgtaatgtacagatggttttataatctgatttgttttcctcttaacgttagaccacaaatagtgctcgctttctatgtagtttggtaattatcattttagaagactctaccagactgtgtattcattgaagtcagatgtggtaactgttaaattgctgtgtatctgatagctctttggcagtctatatgtttgtataatgaatgagagaataagtcatgttccttcaagatcatgtaccccaatttacttgccattactcaattgataaacatttaacttgtttccaatgtttagcaaatacatattttatagaacttc

SEQ ID NO: 1450 - protein, 355 aa, Homo sapien
MDQFPESVTENFEYDDLAEACYIGDIVVFGTVFLSIFYSVIFAIGLVGNLLVVFALTNSKKPKSVTDIYLLNLALSDLLFVATLPFWTHYLINEKGLHNAMCKFTTAFFFIGFFGSIFFITVISIDRYLAIVLAANSMNNRTVQHGVTISLGVWAAAILVAAPQFMFTKQKENECLGDYPEVLQEIWPVLRNVETNFLGFLLPLLIMSYCYFRIIQTLFSCKNHKKAKAIKLILLVVIVFFLFWTPYNVMIFLETLKLYDFFPSCDMRKDLRLALSVTETVAFSHCCLNPLIYAFAGEKFRRYLYHLYGKCLAVLCGRSVHVDFSSSESQRSRHGSVLSSNFTYHTSDGDALLLL

SEQ ID NO: 1451 - DNA, 1365 bp, Homo sapien
cactgcttgagccgctgagagggtggcgacgtcggggccatggggctgggcccggtcttcctgcttctggctggcatcttcccttttgcacctccgggagctgctgctgagccccacagtcttcgttataacctcacggtgctgtcctgggatggatctgtgcagtcagggtttctcactgaggtacatctggatggtcagcccttcctgcgctgtgacaggcagaaatgcagggcaaagccccagggacagtgggcagaagatgtcctgggaaataagacatgggacagagagaccagagacttgacagggaacggaaaggacctcaggatgaccctggctcatatcaaggaccagaaagaaggcttgcattccctccaggagattagggtctgtgagatccatgaagacaacagcaccaggagctcccagcatttctactacgatggggagctcttcctctcccaaaacctggagactaaggaatggacaatgccccagtcctccagagctcagaccttggccatgaacgtcaggaatttcttgaaggaagatgccatgaagaccaagacacactatcacgctatgcatgcagactgcctgcaggaactacggcgatatctaaaatccggcgtagtcctgaggagaacagtgccccccatggtgaatgtcacccgcagcgaggcctcagagggcaacattaccgtgacatgcagggcttctggcttctatccctggaatatcacactgagctggcgtcaggatggggtatctttgagccacgacacccagcagtggggggatgtcctgcctgatgggaatggaacctaccagacctgggtggccaccaggatttgccaaggagaggagcagaggttcacctgctacatggaacacagcgggaatcacagcactcaccctgtgccctctgggaaagtgctggtgcttcagagtcattggcagacattccatgtttctgctgttgctgctgctgctatttttgttattattattttctatgtccgttgttgtaagaagaaaacatcagctgcagagggtccagagctcgtgagcctgcaggtcctggatcaacacccagttgggacgagtgaccacagggatgccacacagctcggatttcagcctctgatgtcagatcttgggtccactggctccactgagggcgcctagactctacagccaggcagctgggattcaattccctgcctggatctcacgagcactttccctcttggtgcctcagtttcctgacctatgaaacagagaaaataaaagcacttatttattgttgttggaggctgcaaaatgttagtagatatgaggcgtttgcagctgtaccatatt

SEQ ID NO: 1452 - protein, 383 aa, Homo sapien
MGLGPVFLLLAGIFPFAPPGAAAEPHSLRYNLTVLSWDGSVQSGFLTEVHLDGQPFLRCDRQKCRAKPQGQWAEDVLGNKTWDRETRDLTGNGKDLRMTLAHIKDQKEGLHSLQEIRVCEIHEDNSTRSSQHFYYDGELFLSQNLETKEWTMPQSSRAQTLAMNVRNFLKEDAMKTKTHYHAMHADCLQELRRYLKSGVVLRRTVPPMVNVTRSEASEGNITVTCRASGFYPWNITLSWRQDGVSLSHDTQQWGDVLPDGNGTYQTWVATRICQGEEQRFTCYMEHSGNHSTHPVPSGKVLVLQSHWQTFHVSAVAAAAIFVIIIFYVRCCKKKTSAAEGPELVSLQVLDQHPVGTSDHRDATQLGFQPLMSDLGSTGSTEGA

SEQ ID NO: 1453 - DNA, 6530 bp, Homo sapien
gtcggggccgctttgcaggtccctagtcaggaccgagcaggggagtaggataggaatccccgccgcacctttgtacgagcctgaccccttccgtgggtttgttcctgggtcgccgtcaagctgcggtctctcctcccccgcccttcagccccgcggtctccaggggcggcgccctgggtctggaacgcggttgccaccgaggaggcggcggccctgcgtctggaacgccgttgccaccgaggaggcggcggccccgagcgcgcctggaagccccgggcaaccggccagggtcgggcacaggtggggtccgtcaggccgcccggggctcctctgtcccagctctgcggcccagggggtgacgtgatggcggcagcggtgctgacggaccgggcccaggtgtctgtgacctttgatgatgtggctgtgactttcaccaaggaggagtgggggcagctggacctagctcagcggaccctgtaccaggaggtgatgctggaaaactgtgggctcctggtgtctctggggtgtcctgttcccaaagctgagctgatctgccacctagagcatgggcaggagccatggaccaggaaggaagacctctcccaagacacctgtccaggcgacaaaggaaaacctaagaccacagaacctaccacttgtgagccagccttgtcagagggaatctcacttcagggacaagtgacacaaggaaactcagtggactcacagttggggcaagccgaggatcaggatgggctatcagaaatgcaggaaggacacttcagaccaggaatagatccccaggagaagtctcctgggaagatgagccctgaatgtgatggtttagggacagctgatggtgtgtgttcaaggattggacaggagcaagtctctccaggagatagagtccgtagccataactcatgtgagtcaggtaaagatcccatgattcaggaagaggaaaataactttaaatgcagtgaatgtggaaaagtatttaacaagaaacacctccttgctggacatgagaaaattcactctggagttaagccctatgaatgcacagaatgtgggaaaacctttattaagagcacacatctcctgcaacatcacatgatccacactggggagaggccctatgagtgcatggagtgtggaaaggccttcaaccgcaagtcataccttacccagcaccagcggattcacagtggagagaagccttacaagtgcaatgaatgcggaaaggccttcacccaccgctccaattttgtcttgcataacaggagacacactggagaaaaatcctttgtgtgcacagaatgtggccaagtctttcgacataggccaggctttctccggcactatgttgtccacagtggtgagaatccctatgagtgcttggagtgtggcaaggtcttcaaacacaggtcatatctcatgtggcaccagcagactcataccggggagaagccctatgagtgcagtgaatgtgggaaggtcttcttggagagtgcagccctgattcaccactatgtcatccacactggagagaagccctttgagtgcctcgagtgtgggaaggctttcaaccaccgatcctacctcaagaggcaccagcggattcacactggggagaagcccttcgtgtgcagtgaatgtggaaaggccttcacccactgctctacttttatcttgcataaaagggcccacactggagaaaagcctttcgagtgcaaagagtgtgggaaagcctttagcaatcggaaggacctcattcgccacttcagcatccacactggagagaagccctatgagtgcgtggagtgtggaaaggccttcacccgcatgtcgggcctcacgaggcacaagcggattcatagtggagagaagccctatgaatgtgttgagtgtgggaaatcgttttgctggagcacaaacctcattcgacatgccattatccacactggagagaagccctataaatgtagtgaatgtggaaaggccttcagtcgcagctcgtccctcactcagcatcaaaggatgcatactgggaaaaatcccatcagtgtaacagatgtgggaagaccttttacaagtggacaaacctcagttacccttcgagaacttcttttagggaaggactttttgaatgtaaccactgaggcaaatattttgccagaggaaacatcttcctctgcatctgatcaaccataccaaagagaaaccccacaagtgtcttcactgtgagaaaaccttctgttgctgaatattacttgtcatctgaagagtcatattagaaattcgttcagtctagagccttattctccatctgataatttatcctggagagagacccagtggttattgtgcacataggagaaccttcagctgcatctttctccttagtttacagtgcaattttatctcaggaattatttttaaaaggaggaggggacatagaaaaaatgaaatgcaagcacacatcttttcaggcttctctgccaagcctatggcgctttgtcatggatttcttagtgtatttgggggaagggaaatgtttcaaggtaaagaaccttgaccctttatgtgcttgtatgtacatttattgctatccagtgtcagaacagttagtttaggaaaagtatgcaaactttaatcgcacatcttctgtattccacaatagtacttactcttgagaagcataactttatgacaacttagggggcttgagccatgaaatactcacgtttaagtcagtaaggatacacatgttaacattcaggcttttgtcttgatgcccgtcttttggtttacgtcatcattgtagccatatggtaaatttttatttgttaaatttttaaaaattacttagctcaaaatgtcagtggtaaatttttaaattgagtaaagtgattcttctttgctcttatttaaaatcgacagcatttctagttcctttgacattccatataatttttaggattagtttgtacttatttacaaaacagtcttgttcagatttttacagaaattgagttaagtctgtggattaatctgttaagaattggtatctttactatgttgggtcttgtagttcatgagtgcaggagtaggcctcttaatttataatagttaagcattccttaaagtatttcattaatgttaaaaattttcagcgtatagatccctatgcatttttgttagaatttgcatcctagggtgcttttttgtttgtgtgtgtgtgtaatttgagtgattgtaaatggcattgatgtttgaactttgaattgcacacaatttttggtagtatacagaaatataatatttttggacattgttttgctaccctgcaaccttattgagttcacttattatttttagctatttctttcgacagaatccttggaattttctatatagaaatgtcatctgcaaatacagaccattttttatctttcatcttacctgtaatcctagcactttgagaccactaaggcgggtggatcacctgaggccaggagttcgagaccagcctggccaacatggcaaaaccctgtctactaaaaatacaaaaattagccgggcatggtggcgtgtgcctgtggtcccagctgctggggggctgaggcaggaggatcagttgaacgtgggaggcggaggttgcagtgagctgagatctcaccactgcactccagcctgggcagcagagcgagactctgtctcaacaacaacaacaaaaagtcctgaacatgattgtggaagtgtgttgctctttcaagttctatcactttttgtttgcaaagttcaaagctgtattgtttggtacatatacatgtaggtttgccaagtctttgtggtgaattgactcttctgtcattatgtgatgtcatttttttgccttttaatagtcttgtcaatactttacctgatgttctcatagtgactcctgcatattttgattaatgtttgcatggttaatatttcttcattttattttaaagcttacctgtatcattacttatgaagtcagtttctttgaacagcatatactcaggccatgctttttttattcattctgcatatgtctctcttaattggtatgttgaaatgatttacattaaaataattattgatattttagggcttaagtgtgcccttaaatgatttttgtgttcttttttattgttcctctgttatttggggttgtttactagtcttcctataggttacttcaccttttttttttttaataatttgatttgatacatatgtagtgttttttagtatagatcctccttgacttatgatggggttatgtcacaataaacccattgcaagttgaaaatactatgtcaaatatgcatttaatacacctaccctgctgaacatcatagccgatcttgccttcagaatgctcagaaaatttacattagcctgcagttgggcaaaatcatctaacacaaggcctactttataataaagttactgcaaagaattttaaataaaaattcaagtgtggtttctactgaatgcatgtcgcattcgcaccattgtaaagtcaagtagtaagtcgaaccatcctaagtcagggactgtctgtatatatctgcattttttagtgattgttctactattacagtgtaaatatataacttatgacagtttaataagttatcagcaatttagcactttacttccattaggttcctttagcttacctactaatgtaactatcttaagtaatagtaattcctcttcaaaaattgagcgctatgttgcaagatgtaatttttcttttccttttttttgagaccaagtctcactctgtcacccacgctggagtgctgtgatgcgatctcggctctctgcaacctctgcctcccgggttcaagcaattaactgcctcagcttccctagtaatggattacaggcgcccgccaccacgcctggctaatttttgtatttttagtagagacggggtttcaccatcttggccaggttggtcttgaactcttgacctcatgatccacccgcctcggccccccaaagtgctggggttacaggtgtgagccactgcacccggccacaagatgtaatttttactttatctctcacacgtattttacaaaacgtcatgagaaacattgtctcttgaccttttttttttttttttttttttaaagagacagagtctcactctgtcacccaggctggagtgcagtggcacgatcttggctcactgcaacctccgcctcctgggttcaagcgattctcctgcctcagcctcctgagtagctgggattacaggtgtgcgccgccacacccagctaattttgtatttttagtagagacggggtttcaccatgttgctcaggctggtctcaaactcctgaccttgtgatccgccaaccttggcctgtcgacctctttacccattccattgttcattcttctttcttgaaatcccaaaccttctattaacatttcttttcagttatacactgaactttactgtagcctttcttctagagtaacaaatgttctttgttttccttcctctaaagatgtctttatgtttccttcattcccaaagaatatttttgtggaatataagattcagagttggcagttgttttcttttagacttcagagatgtatctctctgttctgtacattattgtttaatataagaaacctactaccattcaaataatcattccctattttacaatgcatcagttctgtcaagcttcattcaaagtgtttttcattgtctctagtgttcagaagtttggctgtgatgtgcgtggcatggaagtttttgggtgtattctatttggcgctccctggtgcttgcccagctttttgatctgtaggattatgccttttgcaaaatttggggaactttcaactattatttcttcaaatattttttcaccccccagtcttgtcttttttagggacttcaataacatgagtggcagatcttgttttacactcccatgggtccttcaggctctcatcttttttctttttccagtctattttctgtcttgttaatattgattaatttttattgaccttccatggtcctcactgattgttttctttgtcatacctaatctgttgagtttgtgcagtgagttttcattttggttttgtattttccagttgtttaatttccattgggtgggttcttttgtacaccttctgtttctttgcttattttttaacgccaaagaaagactctcagagaatagacaactatattccaaagtcatggttctctggtggtttgtcttgacatttgaatagaaatgttaaactatctgggggaatagaaagcccacagtcttctgagttgtgctacaccaatatttctatgaacagatcttacaactgagagtgatctgcagatttttcagagtcatgttctccatggaatgtttgtaaaattccctagctctctgcactgagctgagatcgtgccactgcactccagcctgggcaacagagcgagactccatctc

SEQ ID NO: 1454 - protein, 627 aa, Homo sapien
MAAAVLTDRAQVSVTFDDVAVTFTKEEWGQLDLAQRTLYQEVMLENCGLLVSLGCPVPKAELICHLEHGQEPWTRKEDLSQDTCPGDKGKPKTTEPTTCEPALSEGISLQGQVTQGNSVDSQLGQAEDQDGLSEMQEGHFRPGIDPQEKSPGKMSPECDGLGTADGVCSRIGQEQVSPGDRVRSHNSCESGKDPMIQEEENNFKCSECGKVFNKKHLLAGHEKIHSGVKPYECTECGKTFIKSTHLLQHHMIHTGERPYECMECGKAFNRKSYLTQHQRIHSGEKPYKCNECGKAFTHRSNFVLHNRRHTGEKSFVCTECGQVFRHRPGFLRHYVVHSGENPYECLECGKVFKHRSYLMWHQQTHTGEKPYECSECGKVFLESAALIHHYVIHTGEKPFECLECGKAFNHRSYLKRHQRIHTGEKPFVCSECGKAFTHCSTFILHKRAHTGEKPFECKECGKAFSNRKDLIRHFSIHTGEKPYECVECGKAFTRMSGLTRHKRIHSGEKPYECVECGKSFCWSTNLIRHAIIHTGEKPYKCSECGKAFSRSSSLTQHQRMHTGKNPISVTDVGRPFTSGQTSVTLRELLLGKDFLNVTTEANILPEETSSSASDQPYQRETPQVSSL

SEQ ID NO: 1455 - DNA, 5744 bp, Homo sapien
agcgcatggagccagaggaggaggatgaactaggctcagggcgggatgtggattccaactccaacgcggacagtgagaaatgggtggcaggagatggtttggaagaacaggaattttctatcaaggaggcaaacttcacagagggaagtctgaagctaaagattcagaccacaaagcgggctaagaaacccccaaagaatttggagaactatatatgtccacctgagatcaagatcaccatcaagcagtctggggaccagaaggtgtcccgtgctggaaaaaatagcaaagccacgaaggaggaagaaagaagccactccaaaaagaagctcctcacagccagtgaccttgcagccagtgacctcaaaggatttcagccacaggcttacgaaaggccccagaaacattcaactctccattatgacacgggcctcccacaggacttcaccggtgacaccttaaaaccaaagcaccagcaaaaaagcagcagccagaaccacatggactggtccaccaactctgacagcggacccgtcactcagaattgcttcatcagtccagagtctggcagagaaactgcaagcaccagcaagatccccgctcttgagcccgtggcttcctttgcaaaggcccagggtaagaaaggcagtgcagggaacacgtggagtcagttgtctaacaataacaaagatctgctcttgggaggtgtggctccatccccaagcagccacagctcaccagccccacccagcagctctgctgagtgcaacgggcttcagcccttggtggatcaagatggaggaggtacaaaggagcccccagaaccacctacggtgggcagcaagaaaaagtccagtaaaaaagatgtgataagtcagaccataccaaacccagacctggattgggtcaagaatgcccagaaagcatttgacaatacagaagggaaaagggaaggttattccgcagatagtgcccaagaggcatcaccagccaggcagaacgtgagttctgccagtaatcctgaaaatgactcaagtcatgtccggattactatccccatcaaggcaccctctctggatccaaccaaccataagaggaaaaaaagacagtccattaaagcggtggtggaaaagatcatgccagagaaagccttggcttctggaatcaccatgagcagtgaagtagttaacaggatactttccaactctgaggggaataagaaggatccccgtgtccctaagttgagtaaaatgatagagaatgagtccccctcagttggccttgaaactggtggaaatgctgagaaagttatcccaggaggtgtgtctaagccgcggaagccacccatggtcatgacacctccaacgtgcacagatcactctccatccagaaagctgccagaaatccagcatccaaaatttgctgcaaaacgaaggtggacttgcagcaaaccaaaacctagcaccatgcttcgagaggcagttatggccacctctgataaactgatgctggagcccccgtctgcatatcccatcaccccatccagccctctctacaccaacacagacagtcttactgtgatcactccagtcaaaaagaagcggggacgaccaaagaagcagcctttgctcacagtcgagacgattcatgagggaacttccaccagccccgtcagtcccatcagccgagagtttcctggcactaagaaaagaaagcgacgacgcaatttagcgaagttggcccagctagtgccgggagaggacaaacccatgagcgagatgaaatttcacaagaaagttggaaagctcggcgtgttggataagaagaccatcaaaactatcaataagatgaagacactcaagaggaaaaacatcttgaatcagatcttgtcctgttccagcagcgttgctctgaaggcaaaagctcccccagagaccagccctggggcagcagccattgaaagcaaactgggcaagcagattaatgtcagcaagaggggaaccatctacattggcaagaagcggggcaggaagccaagagcagagctgccacccccatccgaagaacccaaaacagccatcaagcaccccaggcctgtttctagccagccggatgttccagccgtgccttccaactttcagtcacttgtggcgtcttcaccagcagctatgcacccactttcaacacagttaggtgggtccaatggcaacctgagccctgccagcactgaaaccaatttttcagagttgaaaactatgccaaatctccagcccatcagtgctcttccaaccaaaacccaaaagggaatacacagtggaacctggaagctgtctccacccagactgatggccaactccccttcacacctgtgcgagattggctccctaaaggaaatcacgctgtcccctgtgagcgagtcccacagtgaggagacgatccccagcgacagcggcattgggacagacaacaacagcacttctgaccaagcggagaagagctcagaatcccgaaggaggtactcttttgatttctgctccctggacaacccggaggccattccgtccgacaccagcacaaagaaccggcatggccaccggcaaaagcatctcattgtggacaactttctggcccacgaaagcctcaagaagccaaagcacaagaggaaacggaaaagcctgcaaaaccgcgatgacctccagtttctggcagacctggaggagctaatcaccaagttccaagtgttcagaatctcccaccggagttacaccttctaccacgagaatccatatcccagcatttttcggattaattttgatcactattacccggtgccatatatccagtatgacccgttgctctatcttcgtaggacttcagacttgaagtcaaagaagaagcgtggtaggcctgcaaaaaccaatgacaccatgacaaaggtgccttttttacaagggttcagctaccctattcccagtggaagttactatgcaccctatggaatgccttacacatcaatgcctatgatgaaccttggttattacggtcagtacccagctcctttgtacctatcgcacacgcttggagcagcttccccattcatgaggccaacagtgccaccacctcagttccacacaaactcccacataaagatgtccggtgcagctaagcataaagccaagcatggagtacacctgcagggacctgttagcatgggccttggtgacatgcagccttctctgaaccctcccaaggtaggcagtgccagtctgtccagtggtcggctccataagaggaaacacaaacacaagcataagcacaaggaagaccggatcctagggacccatgacaacctgagtggtctttttgcaggcaaagccacaggcttctccagccacatcctgagcgagcggctgagtagcgcagacaaagagctcccgctggtgagtgagaagaacaagcataaggagaaacagaagcaccagcacagcgaagccggccacaaagcttctaagaacaactttgaggtggacaccctgtctacactgtcactttccgacgcccagcattggacacaggccaaggaaaaaggagacttgagcagtgagcctgtggactcatgcacgaaaagatactctggcagtggcggggatggtggcagcacgagatcggagaacctggacgtgttcagtgaaatgaacccttcgaatgacaagtgggacagtgacgtgagtgggagtaaaaggaggagctatgaaggctttggaacgtacagggaaaaggacatccaagccttcaagatgaaccgcaaggagagaagttcttatgactcctccatgtctccagggatgccaagtccccacttaaaagtggaccagacagcagtgcatagtaagaacgaaggctcagtgcccaccatgatgaccaggaagaagccagccgcagttgacagtgttacaattccaccagccccagtgttatctctccttgctgcatctgcagcaacgtcggatgcagtcggctcctccctgaagaagaggttcaagcggcgggagatcgaagccatccagtgcgaagtgcggaagatgtgcaactacaccaagatcctgtccaccaagaagaacctggaccacgtgaacaagatcctgaaggccaagcggctgcagagacaatcaaaaacaggcaacaacttcgtgaagaagaggcgcgggcgtcccaggaagcagcccacccagttcgatgaggactccagagaccaaatgccggtgctggaaaaatgcatcgacctgcccagcaaaagaggccagaagcccagcctgagcccgctggtgctggagcccgccgccagccaagacaccatcatggccaccatcgaggcggtcatccacatggcccgggaggcgccgcccctgcccccgccaccgccgccgcccctgccgccaccgccgccaccacccctgcccccgccaccccctctacccaagaccccccgaggcggaaagaggaaacacaaaccgcaggcccccgctcagcccccacagcagtcgcccccgcagcagccccttccccaggaagaggaggtgaaagccaaaaggcagaggaagtcccgagggagtgagagcgaggtccttccctagggcgggtctgggcgtctgcacctggggcctagggaactgacacgtgggaagcgcagtgagccggggcgggggcggaatcccccgctgcagggacacccacgcccttctctccagaagccgggcaggcagaatccggccagacgacggggctgagccatcaggagctcttgggaaagcaaagcagggagacaccttcagaagaagcttgtctgagcttcaccgcagctcccaccacgcggcgcttcagtacggctggatcctccgcaggcgagcggaaggcccccaggaggagcaggctggtggcactctcctgacctcacgctgccaaggtgcgccctcgactcccgatttcatttgctggccaggaaaatcgaaagggaaacaccctcaattaggaaacattccaaggggagaaaagctgcaaattgctcaactggcattgctgtaacccgttccatttaattggtttttatttcttttgattttcaagctctgctaagctttggggtaccaacgtcatcttcaggtgacctgaatctttcccttaaccgtacagtttctcgatggaattgtgtgatcagaaggtggaattctagtgataggcgacctcagacccgcattcatgttctgtgtgcctcttctattgcacatacactgatttttagcattgtctattcctatttttcctttgcccattgtacttccatatatcttttcattaacttacttgctgccttttttttttcttggtacacatttaaataaagtaatccttaacctgtgctgtaaagttcacccttggcatgctgttccaagaacctgggtttgaatcccaatcgttgtgaaacatactcagtattgataaaacctttttaataagtgatgcagagcagccaaggatatgttgacccagatgtcaaccaggctatttttatacttaaaacatgtcagcagagcataggcagaataaaatggtttaaataccccacagcaaatagagtaactgacaaaccaccaaaaactgaaaccccagacccaccagaaagacaagtgtctagcaatgccttggtacctgatctttttcattcaaataattgtcataggttgttc

SEQ ID NO: 1456 - protein, 1542 aa, Homo sapien
MEPEEEDELGSGRDVDSNSNADSEKWVAGDGLEEQEFSIKEANFTEGSLKLKIQTTKRAKKPPKNLENYICPPEIKITIKQSGDQKVSRAGKNSKATKEEERSHSKKKLLTASDLAASDLKGFQPQAYERPQKHSTLHYDTGLPQDFTGDTLKPKHQQKSSSQNHMDWSTNSDSGPVTQNCFISPESGRETASTSKIPALEPVASFAKAQGKKGSAGNTWSQLSNNNKDLLLGGVAPSPSSHSSPAPPSSSAECNGLQPLVDQDGGGTKEPPEPPTVGSKKKSSKKDVISQTIPNPDLDWVKNAQKAFDNTEGKREGYSADSAQEASPARQNVSSASNPENDSSHVRITIPIKAPSLDPTNHKRKKRQSIKAVVEKIMPEKALASGITMSSEVVNRILSNSEGNKKDPRVPKLSKMIENESPSVGLETGGNAEKVIPGGVSKPRKPPMVMTPPTCTDHSPSRKLPEIQHPKFAAKRRWTCSKPKPSTMLREAVMATSDKLMLEPPSAYPITPSSPLYTNTDSLTVITPVKKKRGRPKKQPLLTVETIHEGTSTSPVSPISREFPGTKKRKRRRNLAKLAQLVPGEDKPMSEMKFHKKVGKLGVLDKKTIKTINKMKTLKRKNILNQILSCSSSVALKAKAPPETSPGAAAIESKLGKQINVSKRGTIYIGKKRGRKPRAELPPPSEEPKTAIKHPRPVSSQPDVPAVPSNFQSLVASSPAAMHPLSTQLGGSNGNLSPASTETNFSELKTMPNLQPISALPTKTQKGIHSGTWKLSPPRLMANSPSHLCEIGSLKEITLSPVSESHSEETIPSDSGIGTDNNSTSDQAEKSSESRRRYSFDFCSLDNPEAIPSDTSTKNRHGHRQKHLIVDNFLAHESLKKPKHKRKRKSLQNRDDLQFLADLEELITKFQVFRISHRSYTFYHENPYPSIFRINFDHYYPVPYIQYDPLLYLRRTSDLKSKKKRGRPAKTNDTMTKVPFLQGFSYPIPSGSYYAPYGMPYTSMPMMNLGYYGQYPAPLYLSHTLGAASPFMRPTVPPPQFHTNSHIKMSGAAKHKAKHGVHLQGPVSMGLGDMQPSLNPPKVGSASLSSGRLHKRKHKHKHKHKEDRILGTHDNLSGLFAGKATGFSSHILSERLSSADKELPLVSEKNKHKEKQKHQHSEAGHKASKNNFEVDTLSTLSLSDAQHWTQAKEKGDLSSEPVDSCTKRYSGSGGDGGSTRSENLDVFSEMNPSNDKWDSDVSGSKRRSYEGFGTYREKDIQAFKMNRKERSSYDSSMSPGMPSPHLKVDQTAVHSKNEGSVPTMMTRKKPAAVDSVTIPPAPVLSLLAASAATSDAVGSSLKKRFKRREIEAIQCEVRKMCNYTKILSTKKNLDHVNKILKAKRLQRQSKTGNNFVKKRRGRPRKQPTQFDEDSRDQMPVLEKCIDLPSKRGQKPSLSPLVLEPAASQDTIMATIEAVIHMAREAPPLPPPPPPPLPPPPPPPLPPPPPLPKTPRGGKRKHKPQAPAQPPQQSPPQQPLPQEEEVKAKRQRKSRGSESEVLP

SEQ ID NO: 1457 - DNA, 4565 bp, Homo sapien
gaattccgggcagcatcatcaaggcacatagattctctctttgaacaatgcagctgctgcaggggatggggaagggatggcactggcaattcaagactgcctttcctacttcttcagtgcctctttcaccaatatgaagttaaaaccaggatccttcaaaccaaaaatgtggtggaagaaagaaaaccgtgtctttcagcagcatgccatcggaaaagaaaattagcagtgcaaatgactgcatcagcttcatgcaagctggctgtgagttgaagaaagtccggccaaattctcgcatttacaaccgttttttcactctggacacagaccttcaagctcttcgctgggaaccttcaaagaaagacctcgagaaagccaagcttgatatttctgccataaaagagatcagactggggaaaaacacggaaacatttacaaacaatggccttgctgaccagatctgtgaggactgtgccttttccatactccacggggaaaactatgagtctctggacctagttgccaattcagcagatgtggcaaacatctgggtgtctgggttacggtacctggtttctcgaagtaagcagcctcttgattttatggagggcaaccagaacacaccacggttcatgtggttgaaaacagtgtttgaagcagcagatgttgatgggaatgggattatgttggaagacacctctgtagagttaataaaacaactcaaccctactctgaaggaagccaagatcaggttaaagtttaaagaaatccagaagagcaaggaaaaactaaccacccgcgtgaccgaagaggaattttgtgaagctttttgtgaactttgcaccaggccagaagtgtatttcttacttgtacagatatctaaaaacaaagaatatttggatgccaatgatctcatgctctttttagaagctgagcaaggagtcacccatatcaccgaggatatatgcttagacatcataaggagatacgaactttctgaagagggacgtcaaaaagggtttcttgcaattgatggctttacccagtatttattgtcatcagaatgtgacatttttgatcctgagcaaaagaaggttgcccaagatatgacccagccattatctcactactatatcaatgcctctcataacacctatctaatagaagaccagttcagggggccagctgacatcaatgggtacattagagctttgaaaatgggctgtcgaagcgttgaactcgatgtaagtgatggttcagataatgaaccaatcctttgtaatcgaaataacatgacaacccatgtttcctttcgaagtgtcatagaggtaataaataaatttgcctttgttgcttctgaatacccactcattctttgcttgggaaatcactgctccttgccgcagcagaaggtaatggctcaacagatgaaaaaggtctttggcaataaactctatactgaagcacctttgccctcagaatcctacctcccatcaccagaaaaattaaaaagaatgatcattgtgaaaggaaagaagttgccttctgatccagatgtgttagaaggagaagtaacagatgaagatgaagaagctcaaatgtctcgaaggatgtcggtagattacaatggtgagcagaagcaaatccgactctgtagggagctctctgatttggtgtctatttgtaaatctgttcaatacagggattttgaactatctatgaaaagccaaaactattgggaaatgtgttcatttagtgaaacagaggccagccgcattgcaaatgagtacccagaggattttgttaattataataagaagttcttatcaagaatctatccaagtgccatgaggatcgattccagtaacttgaatccacaggacttttggaattgtggctgtcagattgtagcaatgaattttcagactccgggtccaatgatggaccttcacacgggctggtttcttcaaaacgggggatgtggttatgttctaaggccgtctataatgcgagatgaagtttcttacttcagcgcaaatacaaagggcattctacctggggtgtctcctctagctcttcatatcaagatcatcagtggtcagaatttcccaaagcccaagggagcttgtgccaaaggggatgtcatagatccctatgtttgtatagagatacacggaattccagcggattgttcggaacaaagaactaaaactgtacagcaaaacagtgataatcctatttttgatgaaacttttgagttccaagtaaacctacctgagctggccatgatccgttttgttgttctggatgatgactacattggggatgagtttatagggcaatatacgataccatttgaatgtttgcagcctggatatcggcatgttcccctgcgttcttttgtgggtgacatcatggagcacgtaaccctttttgtccacatagcaataactaatcgaagtggaggaggaaaggcacagaagcgcagtctttcagtgagaatggggaagaaagttcgggaatataccatgctcaggaatatcggtcttaaaaccattgatgacatctttaaaatagcggttcatccattacgagaagccatagatatgagagaaaatatgcagaatgcaatcgtgtctattaaggaactatgtggactccctccaattgccagtctgaagcagtgcctgttaactctgtcatctcggctcatcaccagtgacaatactccttcagtctcacttgtgatgaaagacagctttccttacctggagcctctgggtgcaattccagatgtgcagaaaaagatgctgactgcttatgatctgatgattcaagagagccggtttctcatagaaatggcggacacagtccaggaaaagattgtacagtgtcagaaagcagggatggagttccatgaagaacttcataatttgggggcaaaagaaggcttgaagggaagaaaactcaacaaagcaactgagagctttgcttggaacattacagtattgaagggccaaggagatctgttgaagaatgccaagaatgaagctatagaaaacatgaagcagatccagctggcatgcctgtcctgtggactgagtaaagcccccagcagcagtgctgaggccaagagcaagcgcagcctggaagccatagaggagaaggaaagtagtgaggagaatgggaagctgtgactctgggcattatcgacacgttcacccatcttatcaaggactctggtttctcattcttgttttctttctttaaatgttttataagttcacaaaatggtgccctatatggggtattggacatagatattttcacaatgtcagtatttcagtgtagttaatttatctaaattaaagcctttagtatcagtgttttaaattctgagacatgtgtcaacacccctgtgtggatgcctgtggaagagtgtgtgtgtgtgtgtgtgtgtgtgtgtgtgtgtgtgtggcagagagagagaaagagagagagagaaattctgttaaaatctattctgtgttgcattattcatttagtgagttattccttgatcattttgggacaattgttttaatctgaaattctaaagagcacttactgtaacctgttgctgtgtttaatttgacttctctgcctttgacatttaatttagtgatcttagcatagcttattattgaaggaagccaaatttatcaaagcatacatgttttggtagattaaatatagattagaaaaattcctaagaatcagagtagaaataaaagtgaatgaaagattaaacagatgatgagaatttctaaaaagattagcaaggtcatttcttcagtcagaaaactttaaaaaatatttattaaataaaatcaatttttaggaagttttctgtagtcatttactaaacatatgatttcactagaaaagctgatcataagtgaatttatacctacctgtgtggctactctgaaacacactgaaagctctgttgcaattaggatttgatgtgacataatattgttgtataatttcgagatttgtaggaaggtctcattcttccaagctgagagtctagcactcattttctataacagatatggcagcttagaggtgttggctttgtttggatgtaattttaggggtactaaaatttaaaatttaaagataattgttcaacaatatcatatcatcacattgagctgatataaattctgtgggtccgataatatctttgtgataatttaagagctaaccagttaccacacatctatgatataaccctaacacacacagaaagcatacatgcaaaaagaaatgactaattagggtacatttataattgcatctaggtaatttttaccctaatgtcttcataaagtacttgagtgtaatgtttgttacctccaacagaactaaatgttctatggttatgaaagaatatatttatttaaagcattgcttttattttgaaaagcttcttaattaatttgattaacaaatatgctaatttggggaaacctagagaagataattgttgaaattttgcaaatataaacatctcctat

SEQ ID NO: 1458 - protein, 997 aa, Homo sapien
MPSEKKISSANDCISFMQAGCELKKVRPNSRIYNRFFTLDTDLQALRWEPSKKDLEKAKLDISAIKEIRLGKNTETFTNNGLADQICEDCAFSILHGENYESLDLVANSADVANIWVSGLRYLVSRSKQPLDFMEGNQNTPRFMWLKTVFEAADVDGNGIMLEDTSVELIKQLNPTLKEAKIRLKFKEIQKSKEKLTTRVTEEEFCEAFCELCTRPEVYFLLVQISKNKEYLDANDLMLFLEAEQGVTHITEDICLDIIRRYELSEEGRQKGFLAIDGFTQYLLSSECDIFDPEQKKVAQDMTQPLSHYYINASHNTYLIEDQFRGPADINGYIRALKMGCRSVELDVSDGSDNEPILCNRNNMTTHVSFRSVIEVINKFAFVASEYPLILCLGNHCSLPQQKVMAQQMKKVFGNKLYTEAPLPSESYLPSPEKLKRMIIVKGKKLPSDPDVLEGEVTDEDEEAQMSRRMSVDYNGEQKQIRLCRELSDLVSICKSVQYRDFELSMKSQNYWEMCSFSETEASRIANEYPEDFVNYNKKFLSRIYPSAMRIDSSNLNPQDFWNCGCQIVAMNFQTPGPMMDLHTGWFLQNGGCGYVLRPSIMRDEVSYFSANTKGILPGVSPLALHIKIISGQNFPKPKGACAKGDVIDPYVCIEIHGIPADCSEQRTKTVQQNSDNPIFDETFEFQVNLPELAMIRFVVLDDDYIGDEFIGQYTIPFECLQPGYRHVPLRSFVGDIMEHVTLFVHIAITNRSGGGKAQKRSLSVRMGKKVREYTMLRNIGLKTIDDIFKIAVHPLREAIDMRENMQNAIVSIKELCGLPPIASLKQCLLTLSSRLITSDNTPSVSLVMKDSFPYLEPLGAIPDVQKKMLTAYDLMIQESRFLIEMADTVQEKIVQCQKAGMEFHEELHNLGAKEGLKGRKLNKATESFAWNITVLKGQGDLLKNAKNEAIENMKQIQLACLSCGLSKAPSSSAEAKSKRSLEAIEEKESSEENGKL

SEQ ID NO: 1459 - DNA, 938 bp, Homo sapien
caagagagagagagaggtgcaagccccaaagcgagcgacatgtccctttggggagcagtccctctgcaccccagagtgaggaggacgcaggggtcagaggtggctacagggcaggcagaggaggcacctgtagggggtggtgggctggtggcccaggagaagtcaggaagggagcccagctggtgacaagagagcccagaggtgcctggggctgagtgtgagagcccggaagatttcagccatgcctcacagctccgacagcagtgactccagcttcagccgctctcctccccctggcaaacaggactcatctgatgatgtgagaagagttcagaggagggagaaaaatcgtattgccgcccagaagagccgacagaggcagacacagaaggccgacaccctgcacctggagagcgaagacctggagaaacagaacgcggctctacgcaaggagatcaagcagctcacagaggaactgaagtacttcacgtcggtgctgaacagccacgagcccctgtgctcggtgctggccgccagcacgccctcgccccccgaggtggtgtacagcgcccacgcattccaccaacctcatgtcagctccccgcgcttccagccctgagcttccgatgcggggagagcagagcctcgggaggggcacacagactgtggcagagctgcgcccatcccgcagaggcccctgtccacctggagacccggagacagaggcctggacaaggagtgaacacgggaactgtcacgactggaagggcgtgaggcctcccagcagtgccgcagcgtttcgaggggcgtgtgctggaccccaccactgtgggttgcaggcccaatgcagaagagtattaagaaagatgctcaagtcccatggcacagagcaaggcgggcagggaacggttatttttctaaataaatgctttaaaaga

SEQ ID NO: 1460 - protein, 125 aa, Homo sapien
MPHSSDSSDSSFSRSPPPGKQDSSDDVRRVQRREKNRIAAQKSRQRQTQKADTLHLESEDLEKQNAALRKEIKQLTEELKYFTSVLNSHEPLCSVLAASTPSPPEVVYSAHAFHQPHVSSPRFQP

SEQ ID NO: 1461 - DNA, 3299 bp, Homo sapien
ccacgcgtccgtgcttttccacagaaggttagaccctgaaagagatggctcagcaccacctatggatcttgctcctttgcctgcaaacctggccggaagcagctggaaaagactcagaaatcttcacagtgaatgggattctgggagagtcagtcactttccctgtaaatatccaagaaccacggcaagttaaaatcattgcttggacttctaaaacatctgttgcttatgtaacaccaggagactcagaaacagcacccgtagttactgtgacccacagaaattattatgaacggatacatgccttaggtccgaactacaatctggtcattagcgatctgaggatggaagacgcaggagactacaaagcagacataaatacacaggctgatccctacaccaccaccaagcgctacaacctgcaaatctatcgtcggcttgggaaaccaaaaattacacagagtttaatggcatctgtgaacagcacctgtaatgtcacactgacatgctctgtagagaaagaagaaaagaatgtgacatacaattggagtcccctgggagaagagggtaatgtccttcaaatcttccagactcctgaggaccaagagctgacttacacgtgtacagcccagaaccctgtcagcaacaattctgactccatctctgcccggcagctctgtgcagacatcgcaatgggcttccgtactcaccacaccgggttgctgagcgtgctggctatgttctttctgcttgttctcattctgtcttcagtgtttttgttccgtttgttcaagagaagacaagatgctgcctcaaagaaaaccatatacacatatatcatggcttcaaggaacacccagccagcagagtccagaatctatgatgaaatcctgcagtccaaggtgcttccctccaaggaagagccagtgaacacagtttattccgaagtgcagtttgctgataagatggggaaagccagcacacaggacagtaaacctcctgggacttcaagctatgaaattgtgatctaggctgctgggctgaattctccctctggaaactgagttacaaccaccaatactggcaggttccctggatccagatcttctctgcccaactcttactgggagattgcaaactgccacatctcagcctgtaagcaaagcaggaaaccttctgctgggcatagcttgtgcctaaatggacaaatggatgcatacccttcctgaaatgactcccttctgaatgaatgacaaagcaggttacctagtatagttttcccaaacttcttcccatcatagcacatgtagaaaataatatttttatggcacactgggataaacaagcaagattgctcacttctggaagctgcatatgactagaggcctcttgtgactggaggtaacaaccctgcccagtaactgtgggagaaggggatcaatattttgcacacctgtaataggccatggcacaccagccaagatgctctgctcacagtcagtatgtgtgaagatccctggtgcgtggccttcaccacgcatcttgagcaaattaggaaaatgtacccttcgcttgaggcagatgcagcccttcccccgagtgcatggcttggagagcagaatgtgggctgcatataagcacactcatccctttgtctgggaatctttgtgcagggcataacaggcttagtaagtccaaacacagatgacagtgctgtgtgggtctctgtcagagttgtggctctcagccatgtagacacactctccaaatggagtgttggaaaatgttctttctgcagggtctagagactgctgggacacttttcttggagtgctacttcagaagccttataggattttctttctggccaagatttccttctgtatcactccaagcagcctcagcagaagaagcagccatgcccagtattcccactctccaaaaggaactgaccagcttatatttctcacacttctggggaactgggtataatccaaccatcaaaatagaagaccttgcaagaagcagagtcattctccagaaggaacttgggagatgatggtgcagatgatgaaactgggttcatcccagttccaaagactcagagaactagagtttaagctgaggcagagtgccgccaccctggcatgccccacaaacagatcaccagccagcttacacaggcattaactctcctcaatgaggaagaatcattcacaactgagcaagacattcatatgatcatttaaggaagtgtttcccttatgtgttagcaagtataatcggctaactcctaaatcccaatgaatagtcctaggctggacagcaatgggctgcaattaggcagataaagacatcagtcccagtaaatgaatccatagactcatctagcaccaactaccattagcactatgttaggagctgcaaggccccaaagtagaagatgtgcataatgtctgctcttgtgtagctcaggagacaattccagcacagacactacagttaacgctgaactgcagctgcaagtaatagcatgaacagtcagaaaaataccttatgagggggcagggctgaagctgggccttgaaggatggatgaaatttggatagagaatgaggaagacagagggcctccaagtgagagaagcatgaaaaatgagcaggggcctggatcagtggggtgtattcagagcacctctccagatgcaccatgcatgctcacagtcccttgcctatgtgtggcagagtgtcccagccagatgtgtgcccccaccccatgtccatttacatgtccttcaatgcccacctcaaaaggtacctcttctgtaaagctttccctggtatcaggaatcaaaattaatcagggatcttttcacactgctgttttttcctctttggtccttctatcactaaaactcatctcattcagccttacagcataactaattatttgttttcctcactacattgtacatgtgggaattacagataaacggaagccggctggggtggtggctcacgcctgtaaccccaacactttgggaggccaaggcaggcggatcacctgaggtcaggagttcgagattagtctggccaacatggtgaaaccccatctctactaaaaatacgaaattagccaggtgtggtggcacacatctgtagtcccagctactctggaggctgagacaggagaatcgcttgaacccaggaagtggaggttgcagtgagctgagatcacaccactgcactccagcctgggagagagagagtgagtctccatctcaaaaaaaaaaaaaaaaa

SEQ ID NO: 1462 - protein, 328 aa, Homo sapien
MAQHHLWILLLCLQTWPEAAGKDSEIFTVNGILGESVTFPVNIQEPRQVKIIAWTSKTSVAYVTPGDSETAPVVTVTHRNYYERIHALGPNYNLVISDLRMEDAGDYKADINTQADPYTTTKRYNLQIYRRLGKPKITQSLMASVNSTCNVTLTCSVEKEEKNVTYNWSPLGEEGNVLQIFQTPEDQELTYTCTAQNPVSNNSDSISARQLCADIAMGFRTHHTGLLSVLAMFFLLVLILSSVFLFRLFKRRQDAASKKTIYTYIMASRNTQPAESRIYDEILQSKVLPSKEEPVNTVYSEVQFADKMGKASTQDSKPPGTSSYEIVI

SEQ ID NO: 1463 - DNA, 5041 bp, Homo sapien
gcggccgcgactattcggtacctgaaaacaacgatggcatggaaaacacttcccatttacctgttgttgctgctgtctgttttcgtgattcagcaagtttcatctcaagatttatcaagctgtgcagggagatgtggggaagggtattctagagatgccacctgcaactgtgattataactgtcaacactacatggagtgctgccctgatttcaagagagtctgcactgcggagctttcctgtaaaggccgctgctttgagtccttcgagagagggagggagtgtgactgcgacgcccaatgtaagaagtatgacaagtgctgtcccgattatgagagtttctgtgcagaagtgcataatcccacatcaccaccatcttcaaagaaagcacctccaccttcaggagcatctcaaaccatcaaatcaacaaccaaacgttcacccaaaccaccaaacaagaagaagactaagaaagttatagaatcagaggaaataacagaagaacattctgtttctgaaaatcaagagtcctcctcctcctcctcctcttcctcttcttcttcaacaatttggaaaatcaagtcttccaaaaattcagctgctaatagagaattacagaagaaactcaaagtaaaagataacaagaagaacagaactaaaaagaaacctacccccaaaccaccagttgtagatgaagctggaagtggattggacaatggtgacttcaaggtcacaactcctgacacgtctaccacccaacacaataaagtcagcacatctcccaagatcacaacagcaaaaccaataaatcccagacccagtcttccacctaattctgatacatctaaagagacgtctttgacagtgaataaagagacaacagttgaaactaaagaaactactacaacaaataaacagacttcaactgatggaaaagagaagactacttccgctaaagagacacaaagtatagagaaaacatctgctaaagatttagcacccacatctaaagtgctggctaaacctacacccaaagctgaaactacaaccaaaggccctgctctcaccactcccaaggagcccacgcccaccactcccaaggagcctgcatctaccacacccaaagagcccacacctaccaccatcaagtctgcacccaccacccccaaggagcctgcacccaccaccaccaagtctgcacccaccactcccaaggagcctgcacccaccaccaccaaggagcctgcacccaccactcccaaggagcctgcacccaccaccaccaaggagcctgcacccaccaccaccaagtctgcacccaccactcccaaggagcctgcacccaccacccccaagaagcctgccccaactacccccaaggagcctgcacccaccactcccaaggagcctacacccaccactcccaaggagcctgcacccaccaccaaggagcctgcacccaccactcccaaagagcctgcacccactgcccccaagaagcctgccccaactacccccaaggagcctgcacccaccactcccaaggagcctgcacccaccaccaccaaggagccttcacccaccactcccaaggagcctgcacccaccaccaccaagtctgcacccaccactaccaaggagcctgcacccaccactaccaagtctgcacccaccactcccaaggagccttcacccaccaccaccaaggagcctgcacccaccactcccaaggagcctgcacccaccacccccaagaagcctgccccaactacccccaaggagcctgcacccaccactcccaaggaacctgcacccaccaccaccaagaagcctgcacccaccgctcccaaagagcctgccccaactacccccaaggagactgcacccaccacccccaagaagctcacgcccaccacccccgagaagctcgcacccaccacccctgagaagcccgcacccaccacccctgaggagctcgcacccaccacccctgaggagcccacacccaccacccctgaggagcctgctcccaccactcccaaggcagcggctcccaacacccctaaggagcctgctccaactacccctaaggagcctgctccaactacccctaaggagcctgctccaactacccctaaggagactgctccaactacccctaaagggactgctccaactaccctcaaggaacctgcacccactactcccaagaagcctgcccccaaggagcttgcacccaccaccaccaaggagcccacatccaccacctctgacaagcccgctccaactacccctaaggggactgctccaactacccctaaggagcctgctccaactacccctaaggagcctgctccaactacccctaaggggactgctccaactaccctcaaggaacctgcacccactactcccaagaagcctgcccccaaggagcttgcacccaccaccaccaaggggcccacatccaccacctctgacaagcctgctccaactacacctaaggagactgctccaactacccccaaggagcctgcacccactacccccaagaagcctgctccaactactcctgagacacctcctccaaccacttcagaggtctctactccaactaccaccaaggagcctaccactatccacaaaagccctgatgaatcaactcctgagctttctgcagaacccacaccaaaagctcttgaaaacagtcccaaggaacctggtgtacctacaactaagactcctgcagcgactaaacctgaaatgactacaacagctaaagacaagacaacagaaagagacttacgtactacacctgaaactacaactgctgcacctaagatgacaaaagagacagcaactacaacagaaaaaactaccgaatccaaaataacagctacaaccacacaagtaacatctaccacaactcaagataccacaccattcaaaattactactcttaaaacaactactcttgcacccaaagtaactacaacaaaaaagacaattactaccactgagattatgaacaaacctgaagaaacagctaaaccaaaagacagagctactaattctaaagcgacaactcctaaacctcaaaagccaaccaaagcacccaaaaaacccacttctaccaaaaagccaaaaacaatgcctagagtgagaaaaccaaagacgacaccaactccccgcaagatgacatcaacaatgccagaattgaaccctacctcaagaatagcagaagccatgctccaaaccaccaccagacctaaccaaactccaaactccaaactagttgaagtaaatccaaagagtgaagatgcaggtggtgctgaaggagaaacacctcatatgcttctcaggccccatgtgttcatgcctgaagttactcccgacatggattacttaccgagagtacccaatcaaggcattatcatcaatcccatgctttccgatgagaccaatatatgcaatggtaagccagtagatggactgactactttgcgcaatgggacattagttgcattccgaggtcattatttctggatgctaagtccattcagtccaccatctccagctcgcagaattactgaagtttggggtattccttcccccattgatactgtttttactaggtgcaactgtgaaggaaaaactttcttctttaaggattctcagtactggcgttttaccaatgatataaaagatgcagggtaccccaaaccaattttcaaaggatttggaggactaactggacaaatagtggcagcgctttcaacagctaaatataagaactggcctgaatctgtgtattttttcaagagaggtggcagcattcagcagtatatttataaacaggaacctgtacagaagtgccctggaagaaggcctgctctaaattatccagtgtatggagaaatgacacaggttaggagacgtcgctttgaacgtgctataggaccttctcaaacacacaccatcagaattcaatattcacctgccagactggcttatcaagacaaaggtgtccttcataatgaagttaaagtgagtatactgtggagaggacttccaaatgtggttacctcagctatatcactgcccaacatcagaaaacctgacggctatgattactatgccttttctaaagatcaatactataacattgatgtgcctagtagaacagcaagagcaattactactcgttctgggcagaccttatccaaagtctggtacaactgtccttagactgatgagcaaaggaggagtcaactaatgaagaaatgaataataaattttgacactgaaaaacattttattaataaagaatattgacatgagtataccagtttatatataaaaatgtttttaaacttgacaatcattacactaaaacagatttgataatcttattcacagttgttattgtttacagaccatttaattaatatttcctctgtttattcctcctctccctcccattgcatggctcacacctgtaaaagaaaaaagaatcaaattgaatatatcttttaagaattcaaaactagtgtattcacttaccctagttcattataaaaaatatctaggcattgtggatataaaactgttgggtattctacaacttcaatggaaattattacaagcagattaatccctctttttgtgacacaagtacaatctaaaagttatattggaaaacatggaaatattaaaattttacacttttactagctaaaacataatcacaaagctttatcgtgttgtataaaaaaattaacaatataatggcaataggtagagatacaacaaatgaatataacactataacacttcatattttccaaatcttaatttggatttaaggaagaaatcaataaatataaaatataagcacatatttattatatatctaaggtatacaaatctgtctacatgaagtttacagattggtaaatatcacctgctcaacatgtaattatttaataaaactttggaacattaaaaaaataaattggaggcttaaaaaaaaaaaaaaaaa

SEQ ID NO: 1464 - protein, 1404 aa, Homo sapien
MAWKTLPIYLLLLLSVFVIQQVSSQDLSSCAGRCGEGYSRDATCNCDYNCQHYMECCPDFKRVCTAELSCKGRCFESFERGRECDCDAQCKKYDKCCPDYESFCAEVHNPTSPPSSKKAPPPSGASQTIKSTTKRSPKPPNKKKTKKVIESEEITEEHSVSENQESSSSSSSSSSSSTIWKIKSSKNSAANRELQKKLKVKDNKKNRTKKKPTPKPPVVDEAGSGLDNGDFKVTTPDTSTTQHNKVSTSPKITTAKPINPRPSLPPNSDTSKETSLTVNKETTVETKETTTTNKQTSTDGKEKTTSAKETQSIEKTSAKDLAPTSKVLAKPTPKAETTTKGPALTTPKEPTPTTPKEPASTTPKEPTPTTIKSAPTTPKEPAPTTTKSAPTTPKEPAPTTTKEPAPTTPKEPAPTTTKEPAPTTTKSAPTTPKEPAPTTPKKPAPTTPKEPAPTTPKEPTPTTPKEPAPTTKEPAPTTPKEPAPTAPKKPAPTTPKEPAPTTPKEPAPTTTKEPSPTTPKEPAPTTTKSAPTTTKEPAPTTTKSAPTTPKEPSPTTTKEPAPTTPKEPAPTTPKKPAPTTPKEPAPTTPKEPAPTTTKKPAPTAPKEPAPTTPKETAPTTPKKLTPTTPEKLAPTTPEKPAPTTPEELAPTTPEEPTPTTPEEPAPTTPKAAAPNTPKEPAPTTPKEPAPTTPKEPAPTTPKETAPTTPKGTAPTTLKEPAPTTPKKPAPKELAPTTTKEPTSTTSDKPAPTTPKGTAPTTPKEPAPTTPKEPAPTTPKGTAPTTLKEPAPTTPKKPAPKELAPTTTKGPTSTTSDKPAPTTPKETAPTTPKEPAPTTPKKPAPTTPETPPPTTSEVSTPTTTKEPTTIHKSPDESTPELSAEPTPKALENSPKEPGVPTTKTPAATKPEMTTTAKDKTTERDLRTTPETTTAAPKMTKETATTTEKTTESKITATTTQVTSTTTQDTTPFKITTLKTTTLAPKVTTTKKTITTTEIMNKPEETAKPKDRATNSKATTPKPQKPTKAPKKPTSTKKPKTMPRVRKPKTTPTPRKMTSTMPELNPTSRIAEAMLQTTTRPNQTPNSKLVEVNPKSEDAGGAEGETPHMLLRPHVFMPEVTPDMDYLPRVPNQGIIINPMLSDETNICNGKPVDGLTTLRNGTLVAFRGHYFWMLSPFSPPSPARRITEVWGIPSPIDTVFTRCNCEGKTFFFKDSQYWRFTNDIKDAGYPKPIFKGFGGLTGQIVAALSTAKYKNWPESVYFFKRGGSIQQYIYKQEPVQKCPGRRPALNYPVYGEMTQVRRRRFERAIGPSQTHTIRIQYSPARLAYQDKGVLHNEVKVSILWRGLPNVVTSAISLPNIRKPDGYDYYAFSKDQYYNIDVPSRTARAITTRSGQTLSKVWYNCP

SEQ ID NO: 1465 - DNA, 2337 bp, Homo sapien
  Unsure 61, 2277: Unknown base
cggaaggtgtgagccgcaaacccagcggagggcgggaagaaggaggaggcctctagggtgntcgggggactgggggccccgccggcagaggtccctcggcctcctgactgactgactgcggccgcctccggccaggacgctgggagctgcctgcgggaaggtgcggggagcggagccatggcctccggtgcgtataacccgtatatagagataattgaacaacccaggcagaggggaatgcgttttagatacaaatgtgaagggcgatcagcaggcagcattccaggggagcacagcacagacaacaaccgaacatacccttctatccagattatgaactattatggaaaaggaaaagtgagaattacattagtaacaaagaatgacccatataaacctcatcctcatgatttagttggaaaagactgcagagacggctactatgaagcagaatttggacaagaacgcagacctttgtttttccaaaatttgggtattcgatgtgtgaagaaaaaagaagtaaaagaagctattattacaagaataaaggcaggaatcaatccattcaatgtccctgaaaaacagctgaatgatattgaagattgtgacctcaatgtggtgagactgtgttttcaagtttttctccctgatgaacatggtaatttgacgactgctcttcctcctgttgtctcgaacccaatttatgacaaccgtgctccaaatactgcagaattaaggatttgtcgtgtaaacaagaattgtggaagtgtcagaggaggagatgaaatatttctactttgtgacaaagttcagaaagatgacatagaagttcgttttgtgttgaacgattgggaagcaaaaggcatcttttcacaagctgatgtacaccgtcaagtagccattgttttcaaaactccaccatattgcaaagctatcacagaacccgtaacagtaaaaatgcagttgcggagaccttctgaccaggaagttagtgaatctatggattttagatatctgccagatgaaaaagatacttacggcaataaagcaaagaaacaaaagacaactctgcttttccagaaactgtgccaggatcacgtagaaacagggtttcgccatgttgaccaggatggtcttgaactcctgacatcaggtgatccacccaccttggcctcccaaagtgctgggattacagttaattttcctgagagaccaagacctggtctcctcggttcaattggagaaggaagatacttcaaaaaagaaccaaacttgttttctcatgatgcagttgtgagagaaatgcctacaggggtttcaagtcaagcagaatcctactatccctcacctgggcccatctcaagtggattgtcacatcatgcctcaatggcacctctgccttcttcaagctggtcatcagtggcccaccccaccccacgctcaggcaatacaaacccactgagtagtttttcaacaaggacacttccttctaattcgcaaggtatcccaccattcctgagaatacctgttgggaatgatttaaatgcttctaatgcttgcatttacaacaatgccgatgacatagtcggaatggaagcgtcatccatgccatcagcagatttatatggtatttctgatcccaacatgctgtctaattgttctgtgaatatgatgacaaccagcagtgacagcatgggagagactgataatccaagacttctgagcatgaatcttgaaaacccctcatgtaattcagtgttagacccaagagacttgagacagctccatcagatgtcctcttccagtatgtcagcaggcgccaattccaatactactgtttttgtttcacaatcagatgcatttgagggatctgacttcagttgtgcagataacagcatgataaatgagtcgggaccatcaaacagtactaatccaaacagtcatggttttgttcaagatagtcagtattcaggtattggcagtatgcaaaatgagcaattgagtgactcctttccatatgaattttttcaagtataacttgcaagatttaaatccttttaaatcttgataccacctatatagatgcagcattttgtatttgtctaactggggatataatactatatttatactgtatatataatactgactgagaatataatactgtatttgagaatataaaaaacttttttcagggaagaagcatacaactttggacatagcgaatacaaaattggaagctgtcataaaaagacaactcagaggccaggcgcaggngctcacacctgtaatcctagcactttgggaggccaaggcgggtggatcacttgagaccag

SEQ ID NO: 1466 - protein, 619 aa, Homo sapien
  Unsure 61, 2277: Unknown amino acid
MASGAYNPYIEIIEQPRQRGMRFRYKCEGRSAGSIPGEHSTDNNRTYPSIQIMNYYGKGKVRITLVTKNDPYKPHPHDLVGKDCRDGYYEAEFGQERRPLFFQNLGIRCVKKKEVKEAIITRIKAGINPFNVPEKQLNDIEDCDLNVVRLCFQVFLPDEHGNLTTALPPVVSNPIYDNRAPNTAELRICRVNKNCGSVRGGDEIFLLCDKVQKDDIEVRFVLNDWEAKGIFSQADVHRQVAIVFKTPPYCKAITEPVTVKMQLRRPSDQEVSESMDFRYLPDEKDTYGNKAKKQKTTLLFQKLCQDHVETGFRHVDQDGLELLTSGDPPTLASQSAGITVNFPERPRPGLLGSIGEGRYFKKEPNLFSHDAVVREMPTGVSSQAESYYPSPGPISSGLSHHASMAPLPSSSWSSVAHPTPRSGNTNPLSSFSTRTLPSNSQGIPPFLRIPVGNDLNASNACIYNNADDIVGMEASSMPSADLYGISDPNMLSNCSVNMMTTSSDSMGETDNPRLLSMNLENPSCNSVLDPRDLRQLHQMSSSSMSAGANSNTTVFVSQSDAFEGSDFSCADNSMINESGPSNSTNPNSHGFVQDSQYSGIGSMQNEQLSDSFPYEFFQV

SEQ ID NO: 1467 - DNA, 347 bp, Homo sapien
cagagtggagcggccgccggagatgcctgacgcatctgtctgaggagcggtcagtgacgcgatggagcgggcaagggatcgcttacacctgagacgaactacagaacagcacgtaccagaggtggaagtccaagtcaaacgcagaaggactgcctcactgagcaaccaagagtgtcagttgtacccgaggcgttctcagcagcagcaagtacctgtggtggatttccaggctgaactgaggcaggcattcttagctgagacaccaagaggtggttaaagccatattggagtagcgaggaatctgattccaagcaaaaaccagacaatgtaataaaaatattattcat

SEQ ID NO: 1468 - protein, 71 aa, Homo sapien
MERARDRLHLRRTTEQHVPEVEVQVKRRRTASLSNQECQLYPRRSQQQQVPVVDFQAELRQAFLAETPRGG

SEQ ID NO: 1469 - DNA, 1054 bp, Homo sapien
gaattccgcgggaggccacgggctttccacagcgcgggggaacgggaggctgcaggatggtcaagctgacggcggagctgatcgagcaggcggcgcagtacaccaacgcggtgcgcgaccgggagctggacctccgggggtataaaattcccgtcattgaaaatctaggtgctacgttagaccagtttgatgctattgatttttctgacaatgagatcaggaaactggatggttttcctttgttgagaagactgaaaacattgttagtgaacaacaacagaatatgccgtataggtgagggacttgatcaggctctgccctgtctgacagaactcattctcaccaataatagtctcgtggaactgggtgatctggaccctctggcatctctcaaatcgctgacttacctaagtatcctaagaaatccggtaaccaataagaagcattacagattgtatgtgatttataaagttccgcaagtcagagtactggatttccagaaagtgaaactaaaagagcgtcaggaagcagagaaaatgttcaagggcaaacggggtgcacagcttgcaaaggatattgccaggagaagcaaaacttttaatccaggtgctggtttgccaactgacaaaaagagaggtgggccatctccaggggatgtagaagcaatcaagaatgccatagcaaatgcttcaactctggctgaagtggagaggctgaaggggttgctgcagtctggtcagatccctggcagagaacgcagatcagggcccactgatgatggtgaagaagagatggaagaagacacagtcacaaacgggtcctgagcagtgaggcagatgtataataataggccctcttggaacaagtcttgcttttcgaacatggtataatagccttgtttgtgttagcaaagtggaatctatcagcattgttgaaatgcttaagactgctgctgataattttgtaatataagttttgaaatctaaatgtcaattttctacaaattataaaaataaactccactctctatgctaaaaaaaaaaaaaaggaattc

SEQ ID NO: 1470 - protein, 255 aa, Homo sapien
MVKLTAELIEQAAQYTNAVRDRELDLRGYKIPVIENLGATLDQFDAIDFSDNEIRKLDGFPLLRRLKTLLVNNNRICRIGEGLDQALPCLTELILTNNSLVELGDLDPLASLKSLTYLSILRNPVTNKKHYRLYVIYKVPQVRVLDFQKVKLKERQEAEKMFKGKRGAQLAKDIARRSKTFNPGAGLPTDKKRGGPSPGDVEAIKNAIANASTLAEVERLKGLLQSGQIPGRERRSGPTDDGEEEMEEDTVTNGS

SEQ ID NO: 1471 - DNA, 3094 bp, Homo sapien
gtctcggccatgacacacatttgacatgccctccctcaacctacttatagactatttttcttgctctgcagcatggaccaaagagaaattctgcagaagttcctggatgaggcccaaagcaagaaaattactaaagaggagtttgccaatgaatttctgaagctgaaaaggcaatctaccaagtacaaggcagacaaaacctatcctacaactgtggctgagaagcccaagaatatcaagaaaaacagatataaggatattttgccctatgattatagccgggtagaactatccctgataacctctgatgaggattccagctacatcaatgccaacttcattaagggagtttatggacccaaggcttatattgccacccagggtcctttatctacaaccctcctggacttctggaggatgatttgggaatatagtgtccttatcattggtatggcatgcatggagtatgaaatgggaaagaaaaagtgtgagcgctactgggctgagccagtagagatgcagctggaatttggccctttctctgtatcctgtgaagctgaaaaaaggaaatctgattatataatcaggactctaaaagttaagttcaatagtgaaactcgaactatctaccagtttcattacaagaattggccagaccatgatgtaccttcatctatagaccctattcttgagctcatctgggatgtacgttgttaccaagaggatgacagtgttcccatatgcattcactgcagtgctggctgtggaaggactggtgttatttgtgctattgattatacatggatgttgctaaaagatgggataattcctgagaacttcagtgttttcagtttgatccgggaaatgcggacacagaggccttcattagttcaaacgcaggaacaatatgaactggtctacaatgctgtattagaactatttaagagacagatggatgttatcagagataaacattctggaacagagagtcaagcaaagcattgtattcctgagaaaaatcacactctccaagcagactcttattctcctaatttaccaaaaagtaccacaaaagcagcaaaaatgatgaaccaacaaaggacaaaaatggaaatcaaagaatcttcttcctttgactttaggacttctgaaataagtgcaaaagaagagctagttttgcaccctgctaaatcaagcacttcttttgactttctggagctaaattacagttttgacaaaaatgctgacacaaccatgaaatggcagacaaaggcatttccaatagttggggagcctcttcagaagcatcaaagtttggatttgggctctcctttgtttgagggatgttctaattctaaacctgtaaatgcagcaggaagatattttaattcaaaggtgccaataacacggaccaaatcaactccttttgaattgatacagcagagagaaaccaaggaggtggacagcaaggaaaacttttcttatttggaatctcaaccacatgattcttgttttgtagagatgcaggctcaaaaagtaatgcatgtttcttcagcagaactgaattattcactgccatatgactctaaacaccaaatacgtaatgcctctaatgtaaagcaccatgactctagtgctcttggtgtatattcttacatacctttagtggaaaatccttatttttcatcatggcctccaagtggtaccagttctaagatgtctcttgatttacctgagaagcaagatggaactgtttttccttcttctctgttgccaacatcctctacatccctcttctcttattacaattcacatgattctttatcactgaattctccaaccaatatttcctcactattgaaccaggagtcagctgtactagcaactgctccaaggatagatgatgaaatcccccctccacttcctgtatggacacctgaatcatttattgtggttgaggaagctggagaattctcaccaaatgttcccaaatccttatcctcagctgtgaaggtaaaaattggaacatcactggaatggggtggaacatctgaaccaaagaaatttgatgactctgtgatacttagaccaagcaagagtgtaaaactccgaagtcctaaatcagaactacatcaagatcgttcttctcccccacctcctctcccagaaagaactctagagtccttctttcttgccgatgaagattgtatgcaggcccaatctatagaaacatattctactagctatcctgacaccatggaaaattcaacatcttcaaaacagacactgaagacttctggaaaaagtttcacaaggagtaagagtttgaaaattttgcgaaacatgaaaaagagtatctgtaattcttgcccaccaaacaagcctgcagaatctgttcagtcaaataactccagctcatttctgaattttggttttgcaaaccgtttttcaaaacccaaaggaccaaggaatccaccaccaacttggaatatttaataaaactccagatttataataatatgggctgcaagtacacctgcaaataaaactactagaatactgctagttaaaataagtgctctatatgcataatatcaaatatgaagatatgctaatgtgttaatagcttttaaaagaaaagcaaaatgccaataagtgccagttttgcattttcatatcatttgcattgagttgaaaactgcaaataaaagtttgtcacttgagcttatgtacagaatgctatatgagaaacacttttagaatggatttatttttcatttttgccagttatttttattgtcttttacttttctacataaacataaacttcaaaaggtttgtaagatttggatctcaactaatttctacattgccagaatatactataaaaagttaaaaaaaaaaacttactttgtgggttgcaatacaaactgctcttgacaatgactattccctgacagttatttttgcctaaatggagtataccttgtaaatcttcccaaatgttgtggaaaactggaatattaagaaaatgagaaattatatttattagaataaaatgtgcaaataatgacaattatttgaatgtaacaag

SEQ ID NO: 1472 - protein, 807 aa, Homo sapien
MDQREILQKFLDEAQSKKITKEEFANEFLKLKRQSTKYKADKTYPTTVAEKPKNIKKNRYKDILPYDYSRVELSLITSDEDSSYINANFIKGVYGPKAYIATQGPLSTTLLDFWRMIWEYSVLIIGMACMEYEMGKKKCERYWAEPVEMQLEFGPFSVSCEAEKRKSDYIIRTLKVKFNSETRTIYQFHYKNWPDHDVPSSIDPILELIWDVRCYQEDDSVPICIHCSAGCGRTGVICAIDYTWMLLKDGIIPENFSVFSLIREMRTQRPSLVQTQEQYELVYNAVLELFKRQMDVIRDKHSGTESQAKHCIPEKNHTLQADSYSPNLPKSTTKAAKMMNQQRTKMEIKESSSFDFRTSEISAKEELVLHPAKSSTSFDFLELNYSFDKNADTTMKWQTKAFPIVGEPLQKHQSLDLGSPLFEGCSNSKPVNAAGRYFNSKVPITRTKSTPFELIQQRETKEVDSKENFSYLESQPHDSCFVEMQAQKVMHVSSAELNYSLPYDSKHQIRNASNVKHHDSSALGVYSYIPLVENPYFSSWPPSGTSSKMSLDLPEKQDGTVFPSSLLPTSSTSLFSYYNSHDSLSLNSPTNISSLLNQESAVLATAPRIDDEIPPPLPVWTPESFIVVEEAGEFSPNVPKSLSSAVKVKIGTSLEWGGTSEPKKFDDSVILRPSKSVKLRSPKSELHQDRSSPPPPLPERTLESFFLADEDCMQAQSIETYSTSYPDTMENSTSSKQTLKTSGKSFTRSKSLKILRNMKKSICNSCPPNKPAESVQSNNSSSFLNFGFANRFSKPKGPRNPPPTWNI

SEQ ID NO: 1473 - DNA, 3629 bp, Homo sapien
agcgggaagagacgcttggggctggggctcaccggacgggtaggtccggctctccagggagaggagctgcccggccctggagaaggggcgagtcctgcgcgagtccccgggaggcgccgcgcgcttggaagggacggtcgggcttccccggcccgctgagggctaggcggcgggctcccctcctttccacctcggcagggagggaaggaggggagggaaaagtcccacggaggaggcagaatggccagtcgaggggcgcttaggcgctgcctttccccagggctgcctcgactcctgcacctgtcccgagggctggcctgagacgggactcccggttctcccgctgcgaagcagcgcggccccccggggccggggcagcggcgccggcatgtcgtctggcaccatgaagttcaatggctatttgagggtccgcatcggtgaggcagtggggctgcagcccacccgctggtccctgcgccactcgctcttcaagaagggccaccagctgctggacccctatctgacggtgagcgtggaccaggtgcgcgtgggccagaccagcaccaagcagaagaccaacaaacccacgtacaacgaggagttttgcgctaacgtcaccgacggcggccacctcgagttggccgtcttccacgagacgcccctgggctacgaccacttcgtggccaactgcaccctgcagttccaggagctgctgcgcacgaccggcgcctcggacaccttcgagggttgggtggatctcgagccagaggggaaagtattcgtggtaataacccttaccgggagtttcactgaagctactctccagagagaccggatcttcaaacattttaccaggaagcgccaaagggctatgcgaaggcgagtccaccagatcaatggacacaagttcatggccacgtatctgaggcagcccacctactgctctcactgcagggagtttatctggggagtgtttgggaaacagggttatcagtgccaagtgtgcacctgtgtcgtccataaacgctgccatcatctaattgttacagcctgtacttgccaaaacaatattaacaaagtggattcaaagattgcagaacagaggttcgggatcaacatcccacacaagttcagcatccacaactacaaagtgccaacattctgcgatcactgtggctcactgctctggggaataatgcgacaaggacttcagtgtaaaatatgtaaaatgaatgtgcatattcgatgtcaagcgaacgtggcccctaactgtggggtaaatgcggtggaacttgccaagaccctggcagggatgggtctccaacccggaaatatttctccaacctcgaaactcgtttccagatcgaccctaagacgacagggaaaggagagcagcaaagaaggaaatgggattggggttaattcttccaaccgacttggtatcgacaactttgagttcatccgagtgttggggaaggggagttttgggaaggtgatgcttgcaagagtaaaagaaacaggagacctctatgctgtgaaggtgctgaagaaggacgtgattctgcaggatgatgatgtggaatgcaccatgaccgagaaaaggatcctgtctctggcccgcaatcaccccttcctcactcagttgttctgctgctttcagacccccgatcgtctgttttttgtgatggagtttgtgaatgggggtgacttgatgttccacattcagaagtctcgtcgttttgatgaagcacgagctcgcttctatgctgcagaaatcatttcggctctcatgttcctccatgataaaggaatcatctatagagatctgaaactggacaatgtcctgttggaccacgagggtcactgtaaactggcagacttcggaatgtgcaaggaggggatttgcaatggtgtcaccacggccacattctgtggcacgccagactatatcgctccagagatcctccaggaaatgctgtacgggcctgcagtagactggtgggcaatgggcgtgttgctctatgagatgctctgtggtcacgcgccttttgaggcagagaatgaagatgacctctttgaggccatactgaatgatgaggtggtctaccctacctggctccatgaagatgccacagggatcctaaaatctttcatgaccaagaaccccaccatgcgcttgggcagcctgactcagggaggcgagcacgccatcttgagacatcctttttttaaggaaatcgactgggcccagctgaaccatcgccaaatagaaccgcctttcagacccagaatcaaatcccgagaagatgtcagtaattttgaccctgacttcataaaggaagagccagttttaactccaattgatgagggacatcttccaatgattaaccaggatgagtttagaaacttttcctatgtgtctccagaattgcaaccatagccttatggggagtgagagagagggcacgagaacccaaagggaatagagattctccaggaatttcctctatgggaccttcccagcatcagccttagaacaagaaccttaccttcaaggagcaagtgaagaactctgtgaaggatggaactttcagatatcaactatttagagtccagagggagccatggcactagaaatagttgataatgaaatgagattttatgaagtataccgctccacctatgagcgtctgtctctgtgggcttgggatgttaacaggagccaaaaggagggaaagtgtgaagaataaagtagatctgagaaattctgagccaatcaggcttcttaattcaagagacaaaccaagacgttctgtcaactgtgctgtgctcttctttaagccaatgaaccccaattcctggcagtctacaagaagtctcttaatgctaatgaagaatttaaaggtctttttaaggaaatgaagggctttccaaatagaatgatttactctgaagaaacaaacaatggtatctctgaaactcacaacctaaagcccaatcttgaaaatatgttgtgcaccaagacgactgcttcagcttcttctcttatccttactttctttaatagatatttattaaactgtccagtgaaaaggtgccacaatgcccagtattgtaaacaacaggtttgcattcatgaagctttcattcattctggagtctactaatttacctgaatggtgtttgcattctgtgaaatgcctctccacgttgcatatgtcacacttttgtctgcacataactcttttttcacaagaagggtcactgccacaacagcacagtcagcgggtgaattacaggtgcctgctgcctgcctacctgggtaatctgatcttgtctgtatcgccgtgtgctcatcactgaagaattgcaggccactcatgtcagtgaccagatttgtggcttataaacattagcagtttatttatgttttaagatgcaaagatgtgtgtttgatattcactttaataattagaaatggatcttgtaaacagggcatatatcaaagatgaccttataatatgtacccgaatatacagttcaagaattttgtctgactggaaataaatgcattttgtagcaaaaaaaaaaaaaaaaaaaaaaaaaaaaaaaaaaaaaaaaaaaaaaaa

SEQ ID NO: 1474 - protein, 683 aa, Homo sapien
MSSGTMKFNGYLRVRIGEAVGLQPTRWSLRHSLFKKGHQLLDPYLTVSVDQVRVGQTSTKQKTNKPTYNEEFCANVTDGGHLELAVFHETPLGYDHFVANCTLQFQELLRTTGASDTFEGWVDLEPEGKVFVVITLTGSFTEATLQRDRIFKHFTRKRQRAMRRRVHQINGHKFMATYLRQPTYCSHCREFIWGVFGKQGYQCQVCTCVVHKRCHHLIVTACTCQNNINKVDSKIAEQRFGINIPHKFSIHNYKVPTFCDHCGSLLWGIMRQGLQCKICKMNVHIRCQANVAPNCGVNAVELAKTLAGMGLQPGNISPTSKLVSRSTLRRQGKESSKEGNGIGVNSSNRLGIDNFEFIRVLGKGSFGKVMLARVKETGDLYAVKVLKKDVILQDDDVECTMTEKRILSLARNHPFLTQLFCCFQTPDRLFFVMEFVNGGDLMFHIQKSRRFDEARARFYAAEIISALMFLHDKGIIYRDLKLDNVLLDHEGHCKLADFGMCKEGICNGVTTATFCGTPDYIAPEILQEMLYGPAVDWWAMGVLLYEMLCGHAPFEAENEDDLFEAILNDEVVYPTWLHEDATGILKSFMTKNPTMRLGSLTQGGEHAILRHPFFKEIDWAQLNHRQIEPPFRPRIKSREDVSNFDPDFIKEEPVLTPIDEGHLPMINQDEFRNFSYVSPELQP

SEQ ID NO: 1475 - DNA, 3107 bp, Homo sapien
aagcggcaggagcagcgttggcaccggcgaaccatggctgggattttctatttcgccctattttcgtgtctcttcgggatttgcgacgctgtcacaggttccagggtataccccgcgaatgaagttaccttattggattccagatctgttcagggagaacttgggtggatagcaagccctctggaaggagggtgggaggaagtgagtatcatggatgaaaaaaatacaccaatccgaacctaccaagtgtgcaatgtgatggaacccagccagaataactggctacgaactgattggatcacccgagaaggggctcagagggtgtatattgagattaaattcaccttgagggactgcaatagtcttccgggcgtcatggggacttgcaaggagacgtttaacctgtactactatgaatcagacaacgacaaagagcgtttcatcagagagaaccagtttgtcaaaattgacaccattgctgctgatgagagcttcacccaagtggacattggtgacagaatcatgaagctgaacaccgagatccgggatgtagggccattaagcaaaaaggggttttacctggcttttcaggatgtgggggcctgcatcgccctggtatcagtccgtgtgttctataaaaagtgtccactcacagtccgcaatctggcccagtttcctgacaccatcacaggggctgatacgtcttccctggtggaagttcgaggctcctgtgtcaacaactcagaagagaaagatgtgccaaaaatgtactgtggggcagatggtgaatggctggtacccattggcaactgcctatgcaacgctgggcatgaggagcggagcggagaatgccaagcttgcaaaattggatattacaaggctctctccacggatgccacctgtgccaagtgcccaccccacagctactctgtctgggaaggagccacctcgtgcacctgtgaccgaggctttttcagagctgacaacgatgctgcctctatgccctgcacccgtccaccatctgctcccctgaacttgatttcaaatgtcaacgagacatctgtgaacttggaatggagtagccctcagaatacaggtggccgccaggacatttcctataatgtggtatgcaagaaatgtggagctggtgaccccagcaagtgccgaccctgtggaagtggggtccactacaccccacagcagaatggcttgaagaccaccaaagtctccatcactgacctcctagctcataccaattacacctttgaaatctgggctgtgaatggagtgtccaaatataaccctaacccagaccaatcagtttctgtcactgtgaccaccaaccaagcagcaccatcatccattgctttggtccaggctaaagaagtcacaagatacagtgtggcactggcttggctggaaccagatcggcccaatggggtaatcctggaatatgaagtcaagtattatgagaaggatcagaatgagcgaagctatcgtatagttcggacagctgccaggaacacagatatcaaaggcctgaaccctctcacttcctatgttttccacgtgcgagccaggacagcagctggctatggagacttcagtgagcccttggaggttacaaccaacacagtgccttcccggatcattggagatggggctaactccacagtccttctggtctctgtctcgggcagtgtggtgctggtggtaattctcattgcagcttttgtcatcagccggagacggagtaaatacagtaaagccaaacaagaagcggatgaagagaaacatttgaatcaaggtgtaagaacatatgtggacccctttacgtacgaagatcccaaccaagcagtgcgagagtttgccaaagaaattgacgcatcctgcattaagattgaaaaagttataggagttggtgaatttggtgaggtatgcagtgggcgtctcaaagtgcctggcaagagagagatctgtgtggctatcaagactctgaaagctggttatacagacaaacagaggagagacttcctgagtgaggccagcatcatgggacagtttgaccatccgaacatcattcacttggaaggcgtggtcactaaatgtaaaccagtaatgatcataacagagtacatggagaatggctccttggatgcattcctcaggaaaaatgatggcagatttacagtcattcagctggtgggcatgcttcgtggcattgggtctgggatgaagtatttatctgatatgagctatgtgcatcgtgatctggccgcacggaacatcctggtgaacagcaacttggtctgcaaagtgtctgattttggcatgtcccgagtgcttgaggatgatccggaagcagcttacaccaccaggggtggcaagattcctatccggtggactgcgccagaagcaattgcctatcgtaaattcacatcagcaagtgatgtatggagctatggaatcgttatgtgggaagtgatgtcgtacggggagaggccctattgggatatgtccaatcaagatgtgattaaagccattgaggaaggctatcggttaccccctccaatggactgccccattgcgctccaccagctgatgctagactgctggcagaaggagaggagcgacaggcctaaatttgggcagattgtcaacatgttggacaaactcatccgcaaccccaacagcttgaagaggacagggacggagagctccagacctaacactgccttgttggatccaagctcccctgaattctctgctgtggtatcagtgggcgattggctccaggccattaaaatggaccggtataaggataacttcacagctgctggttataccacactagaggctgtggtgcacgtgaaccaggaggacctggcaagaattggtatcacagccatcacgcaccagaataagattttgagcagtgtccaggcaatgcgaacccaaatgcagcagatgcacggcagaatggttcccgtctgagccagtactgaataaactcaaaactcttgaaattagtttacctcatccatgcactttaattgaagaactgcactttttttacttcgtcttcgccctctgaaattaaagaaatg

SEQ ID NO: 1476 - protein, 986 aa, Homo sapien
MAGIFYFALFSCLFGICDAVTGSRVYPANEVTLLDSRSVQGELGWIASPLEGGWEEVSIMDEKNTPIRTYQVCNVMEPSQNNWLRTDWITREGAQRVYIEIKFTLRDCNSLPGVMGTCKETFNLYYYESDNDKERFIRENQFVKIDTIAADESFTQVDIGDRIMKLNTEIRDVGPLSKKGFYLAFQDVGACIALVSVRVFYKKCPLTVRNLAQFPDTITGADTSSLVEVRGSCVNNSEEKDVPKMYCGADGEWLVPIGNCLCNAGHEERSGECQACKIGYYKALSTDATCAKCPPHSYSVWEGATSCTCDRGFFRADNDAASMPCTRPPSAPLNLISNVNETSVNLEWSSPQNTGGRQDISYNVVCKKCGAGDPSKCRPCGSGVHYTPQQNGLKTTKVSITDLLAHTNYTFEIWAVNGVSKYNPNPDQSVSVTVTTNQAAPSSIALVQAKEVTRYSVALAWLEPDRPNGVILEYEVKYYEKDQNERSYRIVRTAARNTDIKGLNPLTSYVFHVRARTAAGYGDFSEPLEVTTNTVPSRIIGDGANSTVLLVSVSGSVVLVVILIAAFVISRRRSKYSKAKQEADEEKHLNQGVRTYVDPFTYEDPNQAVREFAKEIDASCIKIEKVIGVGEFGEVCSGRLKVPGKREICVAIKTLKAGYTDKQRRDFLSEASIMGQFDHPNIIHLEGVVTKCKPVMIITEYMENGSLDAFLRKNDGRFTVIQLVGMLRGIGSGMKYLSDMSYVHRDLAARNILVNSNLVCKVSDFGMSRVLEDDPEAAYTTRGGKIPIRWTAPEAIAYRKFTSASDVWSYGIVMWEVMSYGERPYWDMSNQDVIKAIEEGYRLPPPMDCPIALHQLMLDCWQKERSDRPKFGQIVNMLDKLIRNPNSLKRTGTESSRPNTALLDPSSPEFSAVVSVGDWLQAIKMDRYKDNFTAAGYTTLEAVVHVNQEDLARIGITAITHQNKILSSVQAMRTQMQQMHGRMVPV

SEQ ID NO: 1477 - DNA, 4289 bp, Homo sapien
gatcaatactgaggccgcgtcgacccccttgagccgagacccccccccagcccagcccccaccccaccccccgcacacgccccaccccccccacgacccagcctcataccgcaccagctgaggcacccaagaggattaccccctggggccctctcccgccccccaaaaaagagaagatcccctctcctggcccatcccttcccttcttccctcccccctccccccgaactttccctctcgcatgcttttcccctgcaccacggatcgcctctcggatgccgcttgcctggaagctgcgttaggagcgagcggcggcggtggcggcggtggcggcggcggcggcagctcgggagtgctatgaccggcaaactcgccgagaagctgccggtgaccatgagcagtttgctaaaccaactgcctgacaatctgtaccccgaggagatccccagcgcgctcaacctcttctccggcagcagcgactcggtagtccattacaatcagatggctacagagaatgtaatggacatcggtctgaccaacgagaagcccaacccggaactctcttactccggctccttccagccagcccccgggaacaagaccgtgacctacttgggaaagttcgccttcgactccccttccaactggtgccaggacaacatcattagcctcatgagcgccggcatcttgggggtgcccccggcttcaggggcgctaagcacgcagacgtccacggccagcatggtgcagccaccgcagggtgacgtggaggccatgtatcccgcgctacccccctactccaactgcggcgacctctactcagagcccgtgtctttccacgacccccagggcaatcccgggctcgcctattccccccaggattaccaatcggccaagccggcgttggacagcaatctcttccccatgattcctgactacaacctctaccaccaccccaacgacatgggctccattccggagcacaagcccttccagggcatggaccccatccgggtcaacccgccccctactacccctctggagaccatcaaggcattcaaagacaagcagatccacccgggctttggcagcctgccccagccgccgctcaccctcaagcccatccggccccgcaagtaccccaaccggcctagcaagacaccgctccacgaacggccccacgcgtgcccggccgagggctgcgaccgccgtttcagccgttcggacgagctgacccggcacctgcgcatccacacgggccacaagcccttccagtgccggatctgcatgcggagcttcagccgcagcgaccacctcaccactcacatccgcactcatacgggcgagaagccctttgcctgcgagttctgcgggcgcaagtttgcgcgcagcgacgagcgcaagcgccacgccaagatccacctcaagcaaaaggagaagaaggcggagaagggcggtgcaccctctgcatcctcggcgccccccgtgtcgctggcccccgtggtcaccacctgcgcctgaggatcgggcccccagatccccacttttcccctccagtgcctcccggctgctagcctgaaagcagcgggaaagccagccacggaggcgtaggggccgcgccctggcctctccatggacgtgcggccccttgcttccccttcgatgcccccggttcccaacctttcacgccggccagcggtcaggggccagggctggaggcgccttcccctcgcggtcccccacttagccaaggcgtgggggcggaaaggtggcgtctagcccgctttgttcagttcggatcgccttgatccaggggccgccgggccgcgccaaggacctgcaagggactgaaggcggagcccatccaaccctcgcccgacccaaacacctcattgtttcccccacgtctccctctataccccctcgaagactcgagagggggagggggtaaggagcgcaccaaagcgcagagcttgctgcccgccgcacgcacgcgcgcctgcgtgcggggatgcgcgcgagtgtgtgcgtgctcgcgtgtgtgtgtatgtgtgtgtgtgagtgtgtgtgtgtgcgcgcgcgcaagcgtgtgtgtttaagactcttgagctgaactgggctgtgtttaccccaaactcttccccacctcgggtccccaagccgctgggagatgtcccatgctgggggtccgcacgtggctggaggaggtggtcttccatccgctctgaaatcatgtttcttagagaaatgcctcggatgccgccgacgcggtgctgctgccgccgcttcgggtttggcccctcagaacccctccttttctgagcgcttccctcttaggcctcagggcagtttgatctgtggggagaaagagcagccatcgctgagcctgccttttaaaatatatgtgtatttccttagccccactctaagaaatctatgttcctgagtttgccccctgccctcccactccttccccttttcccctctaaaccttctcccatctctttcaaaatcttttcccagaaaggcaggcttcaaccagccactccagctttgtgtcttctctcaattacatagcaatttctccttcccaccatcatggggaagctggctctgcttttgccctttgtcatcaccaacacaacagatagaatttaaatataagtatatggtgtgcgtgtgtatgtatgtgtatgtatatgcatgcatgtgtataaagatgcacatgcgtacatatacataacatacacacaatatgtattcctagcaaaataaaatctctaaggtacttggttatccagtgcagtgcaccggaataaagagaatttgtaggcgtatacagctttaaatgatttattttttatgaaaatgttaactgatgagattatatctacatacgtgtgttatgtgtgtggatatagatgcacacatatctgtacatatacatgtgagtgtacatatatacacatatacacatctatgtatggatatgtgtgtatacacatatacacatctctgtccaaaatttcctcaaagatatggggattttttcatgaatccatgtggatgaatgaggtgtctcctttccatacccagtctcaccttctccccaccctacctcacctcttctcaggcacccctcttccccagctgtcctgccagcccttctcgtacagggtggctcctttgaagtggagtaatagggaaggttgctctctgccacagcttgcagcatggtcttgactgaatgtactgttcctgttagcgttacttctcctgtggtcagtaagttgcccagagagaaggaacaaaggtctggagtttacagaatgtctgtttttaaagtcactttatgcgttttccacttttttcttttttaagaaaaagaagtaccatttttgttttgttttgttttgatttttggtggtggataaataatactaaaaggactctagtggaaaggggggatatcgaagagcagggggttgtgaatttccaggtacttggactttttgtagaagtagagagaagaagatgaagtttgccaggagggcccatattttttcagctgaagggtaaaatctttctttgcagagacagtattttgctgaatactttttataatgtgatgattattaaaaaagcaaaaattttggtcacttccaagctagaaggaggaatcagataccctttaatattttttcctcgctccttctggtatatgcatgtcactgcatgataattgagttttcctttgttttaataaaactgttctcagacattaagctaaactaagagaaaaataactttgttgccaaaaggttgtgctatccagattttttatatgtctgcatgtttaaaaaaaaaaaagcaacaaaagaaaatgcactctaacttatgtgaactgagagaaaaaaatcaggttttaaacaggaaaacctatggggaatgatattttttgaaagacttttgtataaagttgagtacttagaaaaaagacaaaccagatgtaatatattttgtggatgtttttatttcttggatttatagtaccttatactaaggttaaaaaaatatgcttgatattgtgaaaaggtgaaattcttcaccaacatttcatttgctcctttgtcatattgtaatgccaatataatatagttaatgaaaacagcatttttaaaaaccgaaatattgaaatggtgtaatgttgtaccatttgcactgtgagcaaatgctaatacagtaaatatattgtgtttgctgacaatcaaaaaaaaaaaaaaaaaaaa

SEQ ID NO: 1478 - protein, 387 aa, Homo sapien [sequence omitted]

SEQ ID NO: 1479 - DNA, 2761 bp, Homo sapien
agaggacgcccggtgaaggggctccagcctggcagtttctgcgtgttagcatttctagaatagagtgggtgggaactgacccaagtaaagtcccagagactcgaacactgacgcacaggaaagcctcaagtgggaggagaaatgcaaatcccctactgatgatggcgtcagcggctttctcctagggactgtgaggggcgcttctgactttggacttgagcactgcctgggacctgtgctgagagagcgctagcatgtctcagtggaatcaagtccaacagttagaaatcaagtttttggagcaggtggatcaattctatgatgacaactttcccatggaaattcggcatctgttggcccaatggattgaaaatcaagactgggaggcagcttctaacaatgaaaccatggcaacgattcttcttcaaaacttgttaatacaactggatgaacagttaggtcgtgtttccaaagagaaaaacctactcttgatacacaatctaaaaagaattaggaaggtccttcagggaaaatttcatggaaatccaatgcatgtagctgtggttatttcaaactgtttaagggaagagaggagaatattggctgcagccaacatgcctgtccaggggcctctagagaaatccttacaaagttcttcagtttcagaaagacagaggaatgtggagcacaaagtggctgccattaaaaacagtgtgcagatgacagaacaagataccaaatacttagaagatctgcaagacgaatttgactacaggtataaaacaattcagacaatggatcagagtgacaagaatagtgccatggtgaatcaggaagttttgacactgcaggaaatgcttaacagcctcgatttcaagagaaaggaggctctcagtaaaatgacccaaatcatccatgagacagacctgttaatgaacaccatgctcatagaagagctgcaagactggaagcggcggcagcaaatcgcctgcatcgggggtccactccacaatgggctcgaccagcttcagaactgctttacactattggcagaaagtcttttccaactgagaaggcaattggagaaactagaggagcaatctaccaaaatgacatatgaaggtgatcccattccaatgcaaagaactcacatgctagaaagagtcaccttcttgatctacaaccttttcaagaactcatttgtggttgagcgacagccatgtatgccaacccaccctcagaggccgttggtacttaaaaccctaattcagttcactgtaaaactaaggctactaataaaattgccagaactaaactatcaggtaaaggttaaggcatcaattgacaagaatgtttcaactctaagcaaccgaagatttgtactttgtggaactaatgtcaaagccatgtctattgaagaatcttccaatgggagtctctcagtagaatttcgacatttgcaaccaaaggaaatgaagtccagtgctggaggtaaaggaaatgagggctgtcacatggtgactgaagaacttcattccataacgtttgaaacacagatctgcctctatggcctgaccatagatttggagaccagctcattgcctgtggtgatgatttccaatgtcagtcagttacctaatgcttgggcatccatcatttggtacaacgtgtcaaccaacgattcccagaacttggttttctttaataatcctccacctgccacattgagtcaactactggaggtgatgagctggcagttttcatcgtacgttggtcgtggtcttaactcagatcaactccatatgctggcagagaagcttacagtccaatctagctacagtgatggtcacctcacctgggccaagttctgcaaggaacatttacctggtaaatcatttaccttttggacatggcttgaagcaatattggatctaattaagaaacacattcttcccctttggattgatgggtatgtcatgggctttgttagcaaagagaaggaacggctgttgctaaaggataaaatgcctggcacctttttattaagattcagtgaaagccatctcggaggaataactttcacctgggtggaccattctgaaagtggggaagtgagattccactctgtagaaccctacaataaaggccggttgtctgctctgccattcgctgacatcctgcgagactacaaagttattatggctgaaaacattcctgaaaaccctctgaagtacctatatcctgacattcccaaagacaaagccttcggtaaacactacagctctcagccttgcgaagtttcaagaccaacagaaaggggtgacaaaggttatgttccttctgtttttatccccatctcaacaatccgaagtgattcaacagagccacattctccatcagaccttcttcccatgtctccaagtgtgtatgcggtgttgagagaaaacctgagtcccacaacaattgaaactgcaatgaagtctccttattctgctgaatgacaggataaactctgacgcaccaagaaaggaagcaaatgaaaaagtttaaagactgttctttgcccaataaccacattttatttcttcagctttgtaaataccaggttctaggaaatgtttgacatctgaagctctcttcacactcccgtggcactcctcaattgggagtgttgtgactgaaatgcttgaaaccaaagcttcagataaacttgcaagataagacaactttaagaaaccagtgttaataacaatattaacag

SEQ ID NO: 1480 - protein, 748 aa, Homo sapien
MSQWNQVQQLEIKFLEQVDQFYDDNFPMEIRHLLAQWIENQDWEAASNNETMATILLQNLLIQLDEQLGRVSKEKNLLLIHNLKRIRKVLQGKFHGNPMHVAVVISNCLREERRILAAANMPVQGPLEKSLQSSSVSERQRNVEHKVAAIKNSVQMTEQDTKYLEDLQDEFDYRYKTIQTMDQSDKNSAMVNQEVLTLQEMLNSLDFKRKEALSKMTQIIHETDLLMNTMLIEELQDWKRRQQIACIGGPLHNGLDQLQNCFTLLAESLFQLRRQLEKLEEQSTKMTYEGDPIPMQRTHMLERVTFLIYNLFKNSFVVERQPCMPTHPQRPLVLKTLIQFTVKLRLLIKLPELNYQVKVKASIDKNVSTLSNRRFVLCGTNVKAMSIEESSNGSLSVEFRHLQPKEMKSSAGGKGNEGCHMVTEELHSITFETQICLYGLTIDLETSSLPVVMISNVSQLPNAWASIIWYNVSTNDSQNLVFFNNPPPATLSQLLEVMSWQFSSYVGRGLNSDQLHMLAEKLTVQSSYSDGHLTWAKFCKEHLPGKSFTFWTWLEAILDLIKKHILPLWIDGYVMGFVSKEKERLLLKDKMPGTFLLRFSESHLGGITFTWVDHSESGEVRFHSVEPYNKGRLSALPFADILRDYKVIMAENIPENPLKYLYPDIPKDKAFGKHYSSQPCEVSRPTERGDKGYVPSVFIPISTIRSDSTEPHSPSDLLPMSPSVYAVLRENLSPTTIETAMKSPYSAE

SEQ ID NO: 1481 - DNA, 2824 bp, Homo sapien
gctgccacctctctagaggcacctggcggggagcctctcaacataagacagtgaccagtctggtgactcacagccggcacagccatgaactacccgctaacgctggaaatggacctcgagaacctggaggacctgttctgggaactggacagattggacaactataacgacacctccctggtggaaaatcatctctgccctgccacagaggggcccctcatggcctccttcaaggccgtgttcgtgcccgtggcctacagcctcatcttcctcctgggcgtgatcggcaacgtcctggtgctggtgatcctggagcggcaccggcagacacgcagttccacggagaccttcctgttccacctggccgtggccgacctcctgctggtcttcatcttgccctttgccgtggccgagggctctgtgggctgggtcctggggaccttcctctgcaaaactgtgattgccctgcacaaagtcaacttctactgcagcagcctgctcctggcctgcatcgccgtggaccgctacctggccattgtccacgccgtccatgcctaccgccaccgccgcctcctctccatccacatcacctgtgggaccatctggctggtgggcttcctccttgccttgccagagattctcttcgccaaagtcagccaaggccatcacaacaactccctgccacgttgcaccttctcccaagagaaccaagcagaaacgcatgcctggttcacctcccgattcctctaccatgtggcgggattcctgctgcccatgctggtgatgggctggtgctacgtgggggtagtgcacaggttgcgccaggcccagcggcgccctcagcggcagaaggcagtcagggtggccatcctggtgacaagcatcttcttcctctgctggtcaccctaccacatcgtcatcttcctggacaccctggcgaggctgaaggccgtggacaatacctgcaagctgaatggctctctccccgtggccatcaccatgtgtgagttcctgggcctggcccactgctgcctcaaccccatgctctacactttcgccggcgtgaagttccgcagtgacctgtcgcggctcctgacgaagctgggctgtaccggccctgcctccctgtgccagctcttccctagctggcgcaggagcagtctctctgagtcagagaatgccacctctctcaccacgttctaggtcccagtgtccccttttattgctgcttttccttggggcaggcagtgatgctggatgctccttccaacaggagctgggatcctaagggctcaccgtggctaagagtgtcctaggagtatcctcatttggggtagctagaggaaccaacccccatttctagaacatccctgccagctcttctgccggccctggggctaggctggagcccagggagcggaaagcagctcaaaggcacagtgaaggctgtccttacccatctgcacccccctgggctgagagaacctcacgcacctcccatcctaatcatccaatgctcaagaaacaacttctacttctgcccttgccaacggagagcgcctgcccctcccagaacacactccatcagcttaggggctgctgacctccacagcttcccctctctcctcctgcccacctgtcaaacaaagccagaagctgagcaccaggggatgagtggaggttaaggctgaggaaaggccagctggcagcagagtgtggccttcggacaactcagtccctaaaaacacagacattctgccaggcccccaagcctgcagtcatcttgaccaagcaggaagctcagactggttgagttcaggtagctgcccctggctctgaccgaaacagcgctgggtccaccccatgtcaccggatcctgggtggtctgcaggcagggctgactctaggtgcccttggaggccagccagtgacctgaggaagcgtgaaggccgagaagcaagaaagaaacccgacagagggaagaaaagagctttcttcccgaaccccaaggagggagatggatcaatcaaacccggcggtcccctccgccaggcgagatggggtggggtggagaactcctagggtggctgggtccaggggatgggaggttgtgggcattgatggggaaggaggctggcttgtcccctcctcactcccttcccataagctatagacccgaggaaactcagagtcggaacggagaaaggtggactggaaggggcccgtgggagtcatctcaaccatcccctccgtggcatcaccttaggcagggaagtgtaagaaacacactgaggcagggaagtccccaggccccaggaagccgtgccctgcccccgtgaggatgtcactcagatggaaccgcaggaagctgctccgtgcttgtttgctcacctggggtgtgggaggcccgtccggcagttctgggtgctccctaccacctccccagcctttgatcaggtggggagtcagggacccctgcccttgtcccactcaagccaagcagccaagctccttgggaggccccactggggaaataacagctgtggctcacgtgagagtgtcttcacggcaggacaacgaggaagccctaagacgtcccttttttctctgagtatctcctcgcaagctgggtaatcgatgggggagtctgaagcagatgcaaagaggcaagaggctggattttgaattttctttttaataaaaaggcacctataaaacaggtcaatacagtacaggcagcacagagacccccggaacaagcctaaaaattgtttcaaaataaaaaccaagaagatgtcttcaaaaaaaaaaaaaaaaaaaaaaa

SEQ ID NO: 1482 - protein, 372 aa, Homo sapien
MNYPLTLEMDLENLEDLFWELDRLDNYNDTSLVENHLCPATEGPLMASFKAVFVPVAYSLIFLLGVIGNVLVLVILERHRQTRSSTETFLFHLAVADLLLVFILPFAVAEGSVGWVLGTFLCKTVIALHKVNFYCSSLLLACIAVDRYLAIVHAVHAYRHRRLLSIHITCGTIWLVGFLLALPEILFAKVSQGHHNNSLPRCTFSQENQAETHAWFTSRFLYHVAGFLLPMLVMGWCYVGVVHRLRQAQRRPQRQKAVRVAILVTSIFFLCWSPYHIVIFLDTLARLKAVDNTCKLNGSLPVAITMCEFLGLAHCCLNPMLYTFAGVKFRSDLSRLLTKLGCTGPASLCQLFPSWRRSSLSESENATSLTTF

SEQ ID NO: 1483 - DNA, 2674 bp, Homo sapien
cacacacgggcgcacgcacacggcagccgggccagggacgaccctgtcagctgcagccccagaggtccggggcgcgcagccgggtcccctcgagggcgcagccggccgccccgccccgcccctcgaagcagccgggccgggcgcgcagtgggctacaaactttcgcagcgcgagtccgccaaggcagcgcgccgactcgggctcggctcggctctgcgctgctccggacggctgtgaccgctggccgggggctcgggccgccggtacccacggaccgcgcgcccgggtgcctgctccgctaagcccctcgccccgcgcggacctcggtatccagcgccctgctgcccgggctctccccgcgcgccctactgccgcgaggtcagtccgcagcctccggtgcgccagcgctcgccttcctcctcctggacttcggccctttgccgccctcaccacgccatggctcatgtccccgctcggaccagcccgggacccgggccccagctgctgctgctgctgctgccgttgtttctgctgttgctccgggatgtggccggcagccacagggcccccgcctggtccgcactgcccgcggccgccgacggcctgcagggggacagggatctccagcggcaccctggggacgcggccgccacgttgggccccagcgcccaggacatggtcgctgtccacatgcacaggctctatgagaagtacagccggcagggcgcgcggccgggagggggcaacacggtccgcagcttcagggccaggctggaagtggtcgaccagaaggccgtgtatttcttcaacctgacttccatgcaagactcggaaatgatccttacggccactttccacttctactcagagccgcctcggtggcctcgagcgctcgaggtgctatgcaagccgcgggccaagaacgcttcaggccgcccgctgcccctgggcccgcccacacgccagcacctgctcttccgcagcctctcgcagaacacggccacacaggggctactccgcggggccatggccctggcgcccccaccgcgcggcctgtggcaggccaaggacatctcccccatcgtcaaggcggcccgccgggatggcgagctgctcctctccgcccagctggattctgaggagagggacccgggggtgccccggcccagcccctatgcgccctacatcctagtctatgccaacgatctggccatctcggagcccaacagcgtggcagtgacgctgcagagatacgaccccttccctgccggagaccccgagccccgcgcagcccccaacaactcagcggacccccgcgtgcgccgagccgcgcaggccactgggcccctccaggacaacgagctgccggggctggatgagaggccgccgcgcgcccacgcacagcacttccacaagcaccagctgtggcccagccccttccgggcgctgaaaccccggccagggcgcaaagaccgcaggaagaagggccaggaggtgttcatggccgcctcgcaggtgctggactttgacgagaagacgatgcagaaagcccggaggaagcagtgggatgagccgagggtgtgctcccggaggtacctgaaggtggacttcgcagacatcggctggaatgaatggataatctcaccgaaatcttttgatgcctactactgcgcgggagcatgtgagttccccatgcctaagatcgttcgtccatccaaccatgccaccatccagagcattgtcagggctgtgggcatcatccctggcatcccagagccctgctgtgttcccgataagatgaactcccttggggtcctcttcctggatgagaatcggaatgtggttctgaaggtgtaccccaacatgtccgtggacacctgtgcctgccggtgagaccactccagggtggaaagaagccacgcccagcagagctgccttctcggagccttctgcaaccaggacttgtggtgcagctgcagacacagagcacagctcatgggcaacatcactggggcccagagagagctgtccgccagtgcatcattagggggtctttcattgctagtgactagccccttaaatgccagcctgagtacctgaaggaatctgggaattagccctggcctgaaagtggcccatcattcatacccactgttctgaaggcttgaaaacaaaacatatccacaacattggcttgatgtgatcatcatctcataactgagcaagaagactatgcaaatcttagggcgctcgctccctgcacacggaaagaactctgtttaaatgctcagttcagaacactttgggccacatagtgattttggaaaacaggataatcgtggtgtaaatgagtgtttcctttcaaagtccactgcagagcttttatccatatggtatgcacatgtagccaatattggtttctttttcttaatatatatattttattttaaaacaacaaaaagggagggcgttgacaccattccccacagagatagtcatgctgagtgtgggttgtttaaacatgcatattgaaataacacatatagtaacgtgggaatactaaaaaataaccaagattttatatttttgtaaattatactttctatactgtagattgtgtatgttatgtgtttttatggaaagctaataaattaaaggtacagtggtatcttga

SEQ ID NO: 1484 - protein, 478 aa, Homo sapien
MAHVPARTSPGPGPQLLLLLLPLFLLLLRDVAGSHRAPAWSALPAAADGLQGDRDLQRHPGDAAATLGPSAQDMVAVHMHRLYEKYSRQGARPGGGNTVRSFRARLEVVDQKAVYFFNLTSMQDSEMILTATFHFYSEPPRWPRALEVLCKPRAKNASGRPLPLGPPTRQHLLFRSLSQNTATQGLLRGAMALAPPPRGLWQAKDISPIVKAARRDGELLLSAQLDSEERDPGVPRPSPYAPYILVYANDLAISEPNSVAVTLQRYDPFPAGDPEPRAAPNNSADPRVRRAAQATGPLQDNELPGLDERPPRAHAQHFHKHQLWPSPFRALKPRPGRKDRRKKGQEVFMAASQVLDFDEKTMQKARRKQWDEPRVCSRRYLKVDFADIGWNEWIISPKSFDAYYCAGACEFPMPKIVRPSNHATIQSIVRAVGIIPGIPEPCCVPDKMNSLGVLFLDENRNVVLKVYPNMSVDTCACR

SEQ ID NO: 1485 - DNA, 1789 bp, Homo sapien
ggttcaggaacctgctggttctgatacataaatcagacagcctctgctgcatgacacgaagcttgcttctgcctggcatctgtgagcagctgccaggctccggccaggatcccttccttctcctcattggctgatggatcccaaggggctcctctccttgaccttcgtgctgtttctctccctggcttttggggcaagctacggaacaggtgggcgcatgatgaactgcccaaagattctccggcagttgggaagcaaagtgctgctgcccctgacatatgaaaggataaataagagcatgaacaaaagcatccacattgtcgtcacaatggcaaaatcactggagaacagtgtcgagaacaaaatagtgtctcttgatccatccgaagcaggccctccacgttatctaggagatcgctacaagttttatctggagaatctcaccctggggatacgggaaagcaggaaggaggatgagggatggtaccttatgaccctggagaaaaatgtttcagttcagcgcttttgcctgcagttgaggctttatgagcaggtctccactccagaaattaaagttttaaacaagacccaggagaacgggacctgcaccttgatactgggctgcacagtggagaagggggaccatgtggcttacagctggagtgaaaaggcgggcacccacccactgaacccagccaacagctcccacctcctgtccctcaccctcggcccccagcatgctgacaatatctacatctgcaccgtgagcaaccctatcagcaacaattcccagaccttcagcccgtggcccggatgcaggacagacccctcagaaacaaaaccatgggcagtgtatgctgggctgttagggggtgtcatcatgattctcatcatggtggtaatactacagttgagaagaagaggtaaaacgaaccattaccagacaacagtggaaaaaaaaagccttacgatctatgcccaagtccagaaaccaggtcctcttcagaagaaacttgactccttcccagctcaggacccttgcaccaccatatatgttgctgccacagagcctgtcccagagtctgtccaggaaacaaattccatcacagtctatgctagtgtgacacttccagagagctgacaccagagaccaacaaagggactttctgaaggaaaatggaaaaaccaaaatgaacactgaacttggccacaggcccaagtttcctctggcagacatgctgcacgtctgtacccttctcagatcaactccctggtgatgtttcttccacatacatctgtgaaatgaacaaggaagtgaggcttcccaagaatttagcttgctgtgcagtggctgcaggcgcagaacagagcgttacttgataacagcgttccatctttgtgttgtagcagatgaaatggacagtaatgtgagttcagactttgggcatcttgctcttggctggaactgataataaaaatcagactgaaagccaggacatctgagtacctatctcacacactgaccaccagtcacaaagtctggaaaagtttacattttggctatctttactttgttctgggagctgatcatgataacctgcagacctgatcaagcctctgtgcctcagtttctctctcaggataaagagtgaatagaggccgaagggtgaatttcttattatacataaaacactctgatattattgtataaaggaagctaagaatattattttatttgcaaaacccagaagctaaaaagtcaataaacagaaagaatgattttgagaaa

SEQ ID NO: 1486 - protein, 335 aa, Homo sapien
MDPKGLLSLTFVLFLSLAFGASYGTGGRMMNCPKILRQLGSKVLLPLTYERINKSMNKSIHIVVTMAKSLENSVENKIVSLDPSEAGPPRYLGDRYKFYLENLTLGIRESRKEDEGWYLMTLEKNVSVQRFCLQLRLYEQVSTPEIKVLNKTQENGTCTLILGCTVEKGDHVAYSWSEKAGTHPLNPANSSHLLSLTLGPQHADNIYICTVSNPISNNSQTFSPWPGCRTDPSETKPWAVYAGLLGGVIMILIMVVILQLRRRGKTNHYQTTVEKKSLTIYAQVQKPGPLQKKLDSFPAQDPCTTIYVAATEPVPESVQETNSITVYASVTLPES

SEQ ID NO: 1487 - DNA, 5871 bp, Homo sapien
gcaccacagaccagtctgtcctggtgttggatgttaaaagtggagccacaaagaagccatcttatgtgggacaggcttgggtgtgagaccagagctgtgggtagcagcatgttgggtcaggatgaggggcagaggaaacactttccacctcttggatatggattttatcctgccctgattcaggagatccccatctattaagtaaggggaaagatgattttgttgtcttttgtttcagattctaatgtaggaactggtgagaagaaggtgactgaagcctggatttctgaggatgaaaactcacataggacgacgtcagacagactcacggtgatggagctcccctctcccgagtctgaggaagtccacgagcccagattaggggagctcttgggaaatccagaaggtcagagcctggggagttccccctctcaggacaggggctgcaagcaggtgacagtgacccattggaagatccagacaggagagacagctcaagtgtgcaccaagtcaggaagaaaccatattctgaactcagaccttcttctgcttcagagagagctcatagagggggaagccaatccttgcgatatctgtggcaaaaccttcacgtttaattcggacctagttaggcatcggatttcgcatgctggggagaaaccttacacgtgcgatcagtgtgggaaaggctttggccagagctcacaccttatggagcatcagagaattcacactggagagagactctacgtctgtaatgtgtgtgggaaagacttcattcactattcaggtctcattgagcatcagcgcgttcattcaggagaaaagcccttcaaatgtgcgcagtgtgggaaggcgttttgtcacagttcagacctgattaggcaccagagagttcacaccagagagagaccttttgaatgcaaagagtgtgggaaaggcttcagtcagagctccttacttattcgccatcagaggattcacacgggagaaaggccctatgagtgcaatgaatgtgggaaatccttcataaggagctcgagcctcattcgccattatcagatccacacagaagtgaaacagtatgaatgcaaagaatgtgggaaggcattccgtcatcgctcagaccttattgaacaccagagaattcacaccggagagagaccctttgaatgcaatgagtgtgggaaagcctttattcggagttcaaagctcattcagcatcagaggatccatactggggagaggccttacgtatgcaatgagtgtgggaagcgcttcagccagacgtcaaacttcacccagcatcagagaattcacactggagagaaactctatgaatgtaacgagtgtgggaaagctttctttctgagttcataccttattcgacaccagaaaatccacactggagagagagtgtatgaatgtaaggaatgtgggaaagcgtttctccagaaagcccatctcactgagcaccagaagatccactctggggacaggcccttcgaatgtaaagactgtgggaaagccttcatccagagctccaagctgcttctgcaccagattattcacactggagaaaagccctatgtgtgcagttattgtgggaaaggctttattcagaggtcaaacttccttcaacaccagaaaattcatactgaagagaagctctatgaatgtagtcagtatgggagagattttaactcaactacaaacgttaaaaataatcaaagggttcaccaagagggactctccttgagtaaggcccccatacatttgggtgagaggtctgtagataagggggaacacacaggtaacttataaaataattactttcccgcccagtgagtgatgtttggaaatgcgtggaattaggattcatgtggtttctaagatttggacatgtcagaattttgtgagtcatggatggggctgcttttgcagtgggtgccacctgccactgtgcagccctactcggctcagcccttctcctcagctgtgagcactgtcctcaggagagtcacagggcttgacacctgactctgagctggaacagtaggggcagggagaagacaggtctcaagaaaaggtttttaagaagtttcatccccagttaagcagagtccatccttgacttaaatcccttattacagcacaactgtgtatctaatcttacgatttaggagaatgttacctaggacattttgatgtgttaagttgaagaaaggtaactcgtgtatgaaccccgagccatttccctgttgtcctgaggaggaactccaggcctcccatcgtgtgccctaaggcctcctgcgtcctggagccctgcctcccactgcctgacttcctgccacacggttaatgctgcagcaacaccgactgcttcatcttccctgtgctccacgtggcttcctacctctctcgcctttgttcttgttgaagggtctcttctcagctaattaactctgaatcatggttcaagacaagcctcaggcatcatgtcaatgggtgtttccctcaagcttagttggcagcactctccacacttctgtggctcagtgattactgctattactatatttacttgcatatgtcagaatgatgtgatagactatctctgtcactatgctgttgggttcctgaggacagtgatcatatctgattgatttccatgtgtccactgtctagcacagggcaataaaaaatacacccctaaatctatgtgtaattggcatctctcttgctttgtcctttctatactgccattctaaaaattttcagctgttggctgtttttttttgttgtttgttcattttgtatcagtataatctacgattctgttagaagtatcttctcagccctgctactgtctgctgctcctacttagaagttgcaggcaatatcctgtgcacatccacgccctcctgtgtgccaccttacagctcatgcagaactgtctacttgatctggagggcattgacacctggctcagctggaacagtggggacaggaggaggcaggtctcaagagaaggtctttacttacttgtctgtatctttctgtctcactcgaaaggcacagtctcaatgcgctacgtaactcttctgttgtagcagttctgaggttgaactgagctcttgtcattttccatgctctctggctcattgtgtcatttcaaaatgtattgatatctataaggaatagtcctcaatgttgggaaaacagatgagcaacccactaccctgaagtcatccaccgtgtagtggggaagacggagatcacagtagggtgagttaagtatgtgccctcaggtgtgaaggagcacaggtgagggggtgcctgctgtggcacagagctgggaaggccttacagaagaggtgacatttcagctgggccagagatcagtagagagcagctgaagaagaaaatagggtccaggagaggaatctgcagaaacatggagccatgacagatggctttttggctaggactgttcgaaagcaggcgaggtaaatggacagtggacagccgcctcgccaaactgttagtctttacctctgaatttcatctggacatgaaccccaaagtccagttttgtaacgatataatttttttctcatgaggccatattttgagttcttaaatactaccaaccctgaacgtctcaggacaaataattcaaaaaagagatctacattttctggaaaatcagcattactagagatgtttcaaatgtagattttaccagaccattttaatcaactttattgagattcaattttcatatagtaaaacgcctatttaagtgtacaaggttttgaaaaatctatacacctgtgtaaccaccaccacctgtgtaaccaccaccgccagaaccaaaaacgtttctgtcacccaaagaagttcccttttgccttttcctagttaagcccactccagccccagataaccactttctatcctcatagattagtgttgcttggtttagagcctcatacaaatggattcatttactatgtgttcttttgcgtctgatgtctcactttggcatgtttttagactcatccaagctgttttgtgtttcagtagttctccttgctgaatagtattccattgtgtggataagccatcatttgtttattcatccacgtgttaatgggtttccagtctcggctcttaaaactatgagcatttgtgtaaaagtatgtatttgcacatgtgtttttatttctcttgggtaagtacctaggactttaattgctgtgttgtaagtgtcttagttcattcaggctgccataacaaaataccatcaactgggaggcttataaacaacagaaatttatgttttacagttctggaggctgggaagtccaagatgagggtgtcaacatttggtgtctagtgagggcctgcttccttttaagtagatgtctttttactgtgactgcacgtggtggaaagggactagcaagcttaccccattcatgagggctctccccttgtgattctgtcccctccccaagaccccacctcatatcatcttatgggttaggaatttgacatgaattgtgcaaggatgtaaacattcagtccattgcaatgcgtgtttctaacttcctaagaaattgtcacacagccctctgtagtggttgaatcattttacactattactacattatgggaagattccagttgctccatatctttgctaacacttggcattgtcagtctcttaaaatttaatccactctagcctccttatgattttaatttgtatttgcccactgaataatgtatgtctatgatttcatctgcttattgcttttccgtgtcgtcttttgtgatgtgtctgttcgtgccttttgcctgtttttaagttgggatgcttattgttgactcaagttctttccatattctgcatgaaaaacatacatgtaatatatagaattctttgtctccatttgtgacaaatattgtgaatattttcatgtttggtttgcctgttcattttcttaatggtgtcttttgaatattttttattaagccaccactcctggccaactgtagttgaactcaggtattggaagggcttccgttttgttcttttcccattttttttttttgacttctagatcctttgcattttcgtataaaatttgaagtcaacttctatcaacttcaggccaggcccgtggctcatgcctgtataatcccagcactttgggaggccgaggcgggcggatcgcttgaggtcaggagttcaagaccagcctggccggggtggtgaaaccccatctctactaaaaatgcggaagagttagccaggcgtggtggcaggcgcctgtagaatcccagctgctcgggaggctgaggcaggagaattgcttgagcctgggaggtggaggtttcagtgagctgggatcgtggcattgcactctagcctgggcaaccaagagtgaaactgtctcaaaaaacaacttttatcaatgtctgcaaaaagaaagtcttctgggatttatagatcaatttagggagaaatgacattttaacaattctgagttttccaattgttgaacatggtgtactgccccatttatttagatctgttaatttctctcagtttgcagctctcacattttgttaaattcatgtatttaatatttctgcatgctattgcaagtggtaaggttttcaaaaagctgttttctagttattgctagtatatagaaatgcattagacttgtacattgatcttgtatcaagcaacttagatcagttaacttattctagtagcttttttctagattctttagcattttctatgtagataatcatgtcatctgtgaataaagtattttacttttccaattt

SEQ ID NO: 1488 - protein, 536 aa, Homo sapien
MILLSFVSDSNVGTGEKKVTEAWISEDENSHRTTSDRLTVMELPSPESEEVHEPRLGELLGNPEGQSLGSSPSQDRGCKQVTVTHWKIQTGETAQVCTKSGRNHILNSDLLLLQRELIEGEANPCDICGKTFTFNSDLVRHRISHAGEKPYTCDQCGKGFGQSSHLMEHQRIHTGERLYVCNVCGKDFIHYSGLIEHQRVHSGEKPFKCAQCGKAFCHSSDLIRHQRVHTRERPFECKECGKGFSQSSLLIRHQRIHTGERPYECNECGKSFIRSSSLIRHYQIHTEVKQYECKECGKAFRHRSDLIEHQRIHTGERPFECNECGKAFIRSSKLIQHQRIHTGERPYVCNECGKRFSQTSNFTQHQRIHTGEKLYECNECGKAFFLSSYLIRHQKIHTGERVYECKECGKAFLQKAHLTEHQKIHSGDRPFECKDCGKAFIQSSKLLLHQIIHTGEKPYVCSYCGKGFIQRSNFLQHQKIHTEEKLYECSQYGRDFNSTTNVKNNQRVHQEGLSLSKAPIHLGERSVDKGEHTGNL

SEQ ID NO: 1489 - DNA, 4137 bp, Homo sapien
ggcacgagcggcggaggcagtgtctcccggtcgcgcgtggaggtcggtcgctcagagctgctgggcgcagtttctccgcctgctgcttcggcgcggctgtatcggcgagcgagcgagttcccgcgagttctcggtggcgctcccccttcctttcagtctccacggactggcccctcgtccttctacttgaccgctcccgtcttccgccgccttctggcgctttccgttgggccgattcccgcccgcttcctcctgcttcccatcgaagctctagaaatgaatgtttccatctcttcagagatgaaccagattatgatgcatcattatcacagaagaaattcgtgtctatagcttttaaggacttgattacatcattttcaagcctgatagttttggaatcaccattagagcttaagacacacctgccttcatttcaaccacctgtcttcataccctgacgaagtgcaccttttaacactcctttgtccttggattacttaagagttcccagaaatacatttgccaccaacagagtagccaaatttataaggaaaaatgattcccaatggatatttgatgtttgaggatgaaaattttattgagtcttctgttgccaaattaaatgccctgaggaaaagtggccagttctgtgatgttcgacttcaggtctgtggccatgaaatgttagcacacagagcagtgctagcttgctgcagtccctatttatttgaaatctttaatagtgatagtgatcctcatggaatttctcacgttaaatttgatgatctcaatccagaagctgttgaagtcttgttgaattatgcctacactgctcagttgaaagcagataaggaattggtaaaagatgtttattctgcagcaaaaaagctgaagatggatcgagtaaagcaggtttgtggtgattatttactgtctagaatggatgttaccagctgcatctcttaccgaaattttgcaagttgtatgggagactcccgtttgttgaataaggttgatgcttatattcaggagcatttgttacaaatttctgaagaggaggagtttcttaagcttccaaggctaaagttggaggtaatgcttgaagataatgtttgcttgcccagcaatggcaaattatatacaaaggtaatcaactgggtgcagcgtagcatctgggagaatggagacagtctggaagagctgatggaagaggttcaaaccttgtactactcagctgatcacaagctgcttgatgggaacctactagatggacaggctgaggtgtttggcagtgatgatgaccacattcagtttgtgcagaaaaagccaccacgtgagaatggccataagcagataagtagcagttcaactggatgtctctcttctccaaatgctacagtacaaagccctaagcatgagtggaaaatcgttgcttcagaaaagacttcaaataacacttacttgtgcctggctgtgctggatggtatattctgtgtcatttttcttcatgggagaaacagcccacagagctcaccaacaagtactccaaaactaagtaagagtttaagctttgagatgcaacaagatgagctaatcgaaaagcccatgtctcctatgcagtacgcacgatctggtctgggaacagcagagatgaatggcaaactcatagctgcaggtggctataacagagaggaatgtcttcgaacagtcgaatgctataatccacatacagatcactggtcctttcttgctcccatgagaacaccaagagcccgatttcaaatggctgtactcatgggccagctctatgtggtaggtggatcaaatggccactcagatgacctgagttgtggagagatgtatgattcaaacatagatgactggattcctgttccagaattgagaactaaccgttgtaatgcaggagtgtgtgctctgaatggaaagttatacatcgttggtggctctgatccatatggtcaaaaaggactgaaaaattgtgatgtatttgatcctgtaacaaagttgtggacaagctgtgcccctcttaacattcggagacaccagtctgcagtctgtgagcttggtggttatttgtacataatcggaggtgcagaatcttggaattgtctgaacacagtagaacgatacaatcctgaaaataatacctggactttaattgcacccatgaatgtggctaggcgaggagctggagtggctgttcttaatggaaaactgtttgtatgtggtggctttgatggttctcatgccatcagttgtgtggaaatgtatgatccaactagaaatgaatggaagatgatgggaaatatgacttcaccaaggagcaatgctgggattgcaactgtagggaacaccatttatgcagtgggaggattcgatggcaatgaatttctgaatacggtggaagtctataaccttgagtcaaatgaatggagcccctatacaaagattttccagttttaacaaatttaagaccctctcaaactaacaggcttagtgatgtaattatggttagcagaggtacacttgtgaataaagagggtgggtgggtatagatgttgctaacagcaacacaaagcttttgcatattgcatactattaaacatgctgtacatactttttgggtttatttggaaaggaatgcaaagatgaaggtctgttttgtgtacttttaagactttggttattttactttttggaaaagaataaaccaagaattgattgggcacatcatttcaagaagtcccctctcctccacatttgttttgccaatttgcacattaaatgactcttccctcaaatgtgtactatggggtaaaaggggtagggtttaaagatgtagacagttgggttttttaagggccctttttcaataactggaacactctataacaaaggatacttatttaaatagatgacattgactatttttgtttttattaaaaggaagcttacatgcctaccaatatttaatcttttatgattgcctttttataactttttatattctcagcagagtgctttaccaattgaagtaaaatgtggcaggctggagttattgaagcagagtggcagtcttcagtttgcagagtaggggtctgtcttttaaactctgagtgcaaacttcagagttcttgccttggctgcagtttttttccttcaagaatgcagtactaacatttatttgagtggagttactgaacagtaacatagctgtgatttttggtatttgaaacactggttttaaatattttgacttgttgagggtatgttttatatagcaagacattatatagcagtaaaaaatggtgttttatcttctatataattcctgtttttattattaacaaaacagtcctaaatagcagccctcaattgtgaaaaaatttactttaaactacattaggttgtgaatgcaggttttatcagaactatgtttttgttcagtttatctgttcatatggataaatattggttgggatgacttggtgtctaatgtgtagtgctacacacctaacttatggggccaaaatagcatgtcctaatgcttgctgctgatttaaacacattaaaggtactttgcaggaaatccttgcaccatgggattaatatccaattgctgcttgtacactcattcattactaaaagttttgagaaatttttttttccagtaatgagcttaagaaatttgtggaaaataactcacctggcatcttacatctgaaataaggaatgatataaggtttttttttctcacagaagatgaagcacacaggaacctaatgggccaactgggatgaggtgactattctgagatgactattcagtggctaacttgggttaggaagaaaataattaggtattttctccaaatgttcactggtactctgccactttatttctctcatctgttacacaaagaaccaccaggaaagcaaatcagtttggttggtaactctgtaattcctaactatcactggtttggttctggactaaaactacattgacagattgaatttgcctaatatgatgactgtttttaatatggatctgtatgtgttctattcagcccaaggaaataaaattttagttgaggattcaaaaaaaaaaaaaaaa

SEQ ID NO: 1490 - protein, 642 aa, Homo sapien
MIPNGYLMFEDENFIESSVAKLNALRKSGQFCDVRLQVCGHEMLAHRAVLACCSPYLFEIFNSDSDPHGISHVKFDDLNPEAVEVLLNYAYTAQLKADKELVKDVYSAAKKLKMDRVKQVCGDYLLSRMDVTSCISYRNFASCMGDSRLLNKVDAYIQEHLLQISEEEEFLKLPRLKLEVMLEDNVCLPSNGKLYTKVINWVQRSIWENGDSLEELMEEVQTLYYSADHKLLDGNLLDGQAEVFGSDDDHIQFVQKKPPRENGHKQISSSSTGCLSSPNATVQSPKHEWKIVASEKTSNNTYLCLAVLDGIFCVIFLHGRNSPQSSPTSTPKLSKSLSFEMQQDELIEKPMSPMQYARSGLGTAEMNGKLIAAGGYNREECLRTVECYNPHTDHWSFLAPMRTPRARFQMAVLMGQLYVVGGSNGHSDDLSCGEMYDSNIDDWIPVPELRTNRCNAGVCALNGKLYIVGGSDPYGQKGLKNCDVFDPVTKLWTSCAPLNIRRHQSAVCELGGYLYIIGGAESWNCLNTVERYNPENNTWTLIAPMNVARRGAGVAVLNGKLFVCGGFDGSHAISCVEMYDPTRNEWKMMGNMTSPRSNAGIATVGNTIYAVGGFDGNEFLNTVEVYNLESNEWSPYTKIFQF

SEQ ID NO: 1491 - DNA, 2644 bp, Homo sapien
gaccgcggcagctcagcctcccgccgattgtatgttccaggcctcaatgaggagtccaaacatggagccattcaagcagcagaaggtggaggacttttatgacatcggagaggagctggggagtggccagtttgccatcgtgaagaagtgccgggagaagagcacggggcttgagtatgcagccaagttcatcaagaagcggcagagccgggcgagccggcgcggtgtgagccgggaggagatcgagcgggaggtgagcatcctgcggcaggtgctgcaccacaatgtcatcacgctgcacgacgtctatgagaaccgcaccgacgtggtgctcatccttgagctagtgtctggaggagagctcttcgatttcctggcccagaaggagtcactgagtgaggaggaggccaccagcttcattaagcagatcctggatggggtgaactaccttcacacaaagaaaattgctcactttgatctcaagccagaaaacattatgttgttagacaagaatattcccattccacacatcaagctgattgactttggtctggctcacgaaatagaagatggagttgaatttaagaatatttttgggacgccggaatttgttgctccagaaattgtgaactacgagcccctgggtctggaggctgacatgtggagcataggcgtcatcacctacatcctcttaagtggagcatcccctttcctgggagacacgaagcaggaaacactggcaaatatcacagcagtgagttacgactttgatgaggaattcttcagccagacgagcgagctggccaaggactttattcggaagcttctggttaaagagacccggaaacggctcacaatccaagaggctctcagacacccctggatcacgccggtggacaaccagcaagccatggtgcgcagggagtctgtggtcaatctggagaacttcaggaagcagtatgtccgcaggcggtggaagctttccttcagcatcgtgtccctgtgcaaccacctcacccgctcgctgatgaagaaggtgcacctgaggccggatgaggacctgaggaactgtgagagtgacactgaggaggacatcgccaggaggaaagccctccacccacggaggaggagcagcacctcctaactggcctgacctgcagtggccgccagggaggtctgggcccagcggggctcccttctgtgcagacttttggacccagctcagcaccagcacccgggcgtcctgagcactttgcaagagagatgggcccaaggaattcagaagagcttgcaggcaagccaggagaccctgggagctgtggctgtcttctgtggaggaggctccagcattcccaaagctcttaattctccataaaatgggctttcctctgtctgccatcctcagagtctggggtgggagtgtggacttaggaaaacaatataaaggacatcctcatcatcacggggtgaaggtcagactaaggcagccttcttcacaggctgagggggttcagaaccagcctggccaaaaattacaccagagagacagagtcctccccattgggaacagggtgattgaggaaagtgaaccttgggtgtgagggaccaatcctgtgacctcccagaaccatggaagccaggacgtcaggctgaccaacacctcagaccttctgaagcagcccattgctggcccgccatgttgtaattttgctcatttttattaaacttctggtttacctgatgcttggcttcttttagggctacccccatctcatttcctttagcccgtgtgcctgtaactctgagggggggcacccagtggggtgctgagtgggcagaatctcagaaggtcctcctgaaccgtccgcgcaggcctgcagtgggcctgcctcctccttgcttccctaacaggaaggtgtccagttcaagagaacccacccagagactgggagtggtggctcacgcctataatccctgcgctttggcagtccgaggcaggggaattgcttgaactcaggagttggagaccagcctgggcaacatggcaaaactcagtctgtacaaaaaatacaaaaaattagccaggtgtaggggtaggcacctggcatcccagctactccaggggctgaggtgacagcattgcttaagcccagaaggtcgaggctgcagtgagctgagatcacgccactgcactccagtctgggtgacagagagagaccatatccaaaaaaaaaaaaagttgccagagacgagtatgcccatgctccctctacctcactgccaccactcctgcttttaggagctgagtgtgtctccctaaaatttctatgttgaagtcttaacccttggtaccacagaatatcactgtatttggagatggggtctttagaaaggcacttaaattaaaatgagctcactgatatgggccccgatgcaatataattggtgtccttataagaaggggaggttaggacacgcaggaaagaccacatgaaggcccaggagtgggagggggaatagccatcgacaaactaagggggcctcagaggaaaccaaccctgctgacacctcaatcttagactctggcctcaaaaattgtaagaaaataaacttctgtcttttaagccaaaaaaaaaaaaaaaaa

SEQ ID NO: 1492 - protein, 370 aa, Homo sapien
MFQASMRSPNMEPFKQQKVEDFYDIGEELGSGQFAIVKKCREKSTGLEYAAKFIKKRQSRASRRGVSREEIEREVSILRQVLHHNVITLHDVYENRTDVVLILELVSGGELFDFLAQKESLSEEEATSFIKQILDGVNYLHTKKIAHFDLKPENIMLLDKNIPIPHIKLIDFGLAHEIEDGVEFKNIFGTPEFVAPEIVNYEPLGLEADMWSIGVITYILLSGASPFLGDTKQETLANITAVSYDFDEEFFSQTSELAKDFIRKLLVKETRKRLTIQEALRHPWITPVDNQQAMVRRESVVNLENFRKQYVRRRWKLSFSIVSLCNHLTRSLMKKVHLRPDEDLRNCESDTEEDIARRKALHPRRRSSTS

SEQ ID NO: 1493 - DNA, 2139 bp, Homo sapien
gtgagacaggggtagtgcgaggccgggcacagccttcctgtgtggttttaccgcccagagagcgtcatggacctggggaaaccaatgaaaagcgtgctggtggtggctctccttgtcattttccaggtatgcctgtgtcaagatgaggtcacggacgattacatcggagacaacaccacagtggactacactttgttcgagtctttgtgctccaagaaggacgtgcggaactttaaagcctggttcctccctatcatgtactccatcatttgtttcgtgggcctactgggcaatgggctggtcgtgttgacctatatctatttcaagaggctcaagaccatgaccgatacctacctgctcaacctggcggtggcagacatcctcttcctcctgacccttcccttctgggcctacagcgcggccaagtcctgggtcttcggtgtccacttttgcaagctcatctttgccatctacaagatgagcttcttcagtggcatgctcctacttctttgcatcagcattgaccgctacgtggccatcgtccaggctgtctcagctcaccgccaccgtgcccgcgtccttctcatcagcaagctgtcctgtgtgggcatctggatactagccacagtgctctccatcccagagctcctgtacagtgacctccagaggagcagcagtgagcaagcgatgcgatgctctctcatcacagagcatgtggaggcctttatcaccatccaggtggcccagatggtgatcggctttctggtccccctgctggccatgagcttctgttaccttgtcatcatccgcaccctgctccaggcacgcaactttgagcgcaacaaggccatcaaggtgatcatcgctgtggtcgtggtcttcatagtcttccagctgccctacaatggggtggtcctggcccagacggtggccaacttcaacatcaccagtagcacctgtgagctcagtaagcaactcaacatcgcctacgacgtcacctacagcctggcctgcgtccgctgctgcgtcaaccctttcttgtacgccttcatcggcgtcaagttccgcaacgatctcttcaagctcttcaaggacctgggctgcctcagccaggagcagctccggcagtggtcttcctgtcggcacatccggcgctcctccatgagtgtggaggccgagaccaccaccaccttctccccataggcgactcttctgcctggactagagggacctctcccagggtccctggggtggggatagggagcagatgcaatgactcaggacatccccccgccaaaagctgctcagggaaaagcagctctcccctcagagtgcaagccctgctccagaagttagcttcaccccaatcccagctacctcaaccaatgccgaaaaagacagggctgataagctaacaccagacagacaacactgggaaacagaggctattgtcccctaaaccaaaaactgaaagtgaaagtccagaaactgttcccacctgctggagtgaaggggccaaggagggtgagtgcaaggggcgtgggagtggcctgaagagtcctctgaatgaaccttctggcctcccacagactcaaatgctcagaccagctcttccgaaaaccaggccttatctccaagaccagagatagtggggagacttcttggcttggtgaggaaaagcggacatcagctggtcaaacaaactctctgaacccctccctccatcgttttcttcactgtcctccaagccagcgggaatggcagctgccacgccgccctaaaagcacactcatcccctcacttgccgcgtcgccctcccaggctctcaacaggggagagtgtggtgtttcctgcaggccaggccagctgcctccgcgtgatcaaagccacactctgggctccagagtggggatgacatgcactcagctcttggctccactgggatgggaggagaggacaagggaaatgtcaggggcggggagggtgacagtggccgcccaaggccacgagcttgttctttgttctttgtcacagggactgaaaacctctcctcatgttctgctttcgattcgttaagagagcaacattttacccacacacagataaagttttcccttgaggaaacaacagctttaaaag

SEQ ID NO: 1494 - protein, 378 aa, Homo sapien
MDLGKPMKSVLVVALLVIFQVCLCQDEVTDDYIGDNTTVDYTLFESLCSKKDVRNFKAWFLPIMYSIICFVGLLGNGLVVLTYIYFKRLKTMTDTYLLNLAVADILFLLTLPFWAYSAAKSWVFGVHFCKLIFAIYKMSFFSGMLLLLCISIDRYVAIVQAVSAHRHRARVLLISKLSCVGIWILATVLSIPELLYSDLQRSSSEQAMRCSLITEHVEAFITIQVAQMVIGFLVPLLAMSFCYLVIIRTLLQARNFERNKAIKVIIAVVVVFIVFQLPYNGVVLAQTVANFNITSSTCELSKQLNIAYDVTYSLACVRCCVNPFLYAFIGVKFRNDLFKLFKDLGCLSQEQLRQWSSCRHIRRSSMSVEAETTTTFSP

SEQ ID NO: 1495 - DNA, 1314 bp, Homo sapien
cggctgtgttgcgcagtcttcatgggttcccgacgaggaggtctctgtggctgcggcggcggctgctaactgcgccacctgctgcagcctgtccccgccgctctgaagcggccgcgtcgaagccgaaatgccgccaccccggaccggccgaggccttctctggctgggtctggttctgagctccgtctgcgtcgccctcggatccgaaacgcaggccaactcgaccacagatgctctgaacgttcttctcatcatcgtggatgacctgcgcccctccctgggctgttatggggataagctggtgaggtccccaaatattgaccaactggcatcccacagcctcctcttccagaatgcctttgcgcagcaagcagtgtgcgccccgagccgcgtttctttcctcactggcaggagacctgacaccacccgcctgtacgacttcaactcctactggagggtgcacgctggaaacttctccaccatcccccagtacttcaaggagaatggctatgtgaccatgtcggtgggaaaagtctttcaccctgggatatcttctaaccataccgatgattctccgtatagctggtcttttccaccttatcatccttcctctgagaagtatgaaaacactaagacatgtcgagggccagatggagaactccatgccaacctgctttgccctgtggatgtgctggatgttcccgagggcaccttgcctgacaaacagagcactgagcaagccatacagttgttggaaaagatgaaaacgtcagccagtcctttcttcctggccgttgggtatcataagccacacatccccttcagataccccaaggaatttcagaagttgtatcccttggagaacatcaccctggcccccgatcccgaggtccctgatggcctaccccctgtggcctacaacccctggatggacatcaggcaacgggaagacgtccaagccttaaacatcagtgtgccgtatggtccaattcctgtggactttcagcggaaaatccgccagagctactttgcctctgtgtcatatttggatacacaggtcggccgcctcttgagtgctttggacgatcttcagctggccaacagcaccatcattgcatttacctcggatcatggtttcctcatgaggacaaatacctgattttgaataaagcagcattcagttgaaataaccctttctgtggtaattccaagtgaatatttttcttctaggtgatgagtttctacttcctctggtttttacaacaggaaatgaaatggtatctaaaataaacaagctgtggtatgatgataatt

SEQ ID NO: 1496 - protein, 343 aa, Homo sapien
MPPPRTGRGLLWLGLVLSSVCVALGSETQANSTTDALNVLLIIVDDLRPSLGCYGDKLVRSPNIDQLASHSLLFQNAFAQQAVCAPSRVSFLTGRRPDTTRLYDFNSYWRVHAGNFSTIPQYFKENGYVTMSVGKVFHPGISSNHTDDSPYSWSFPPYHPSSEKYENTKTCRGPDGELHANLLCPVDVLDVPEGTLPDKQSTEQAIQLLEKMKTSASPFFLAVGYHKPHIPFRYPKEFQKLYPLENITLAPDPEVPDGLPPVAYNPWMDIRQREDVQALNISVPYGPIPVDFQRKIRQSYFASVSYLDTQVGRLLSALDDLQLANSTIIAFTSDHGFLMRTNT

SEQ ID NO: 1497 - DNA, 2901 bp, Homo sapien
cagcctccctctcccacctctgtctgcccgctgcctcttgtctagctgctgtcaggagctgactgcctccagggctggaatcctgtgctccctctgtgcccagagccccacgatgtcggccaacgccacactgaagccactctgccccatcctggagcagatgagccgtctccagagccacagcaacaccagcatccgctacatcgaccacgcggccgtgctgctgcacgggctggcctcgctgctgggcctggtggagaatggagtcatcctcttcgtggtgggctgccgcatgcgccagaccgtggtcaccacctgggtgctgcacctggcgctgtccgacctgttggcctctgcttccctgcccttcttcacctacttcttggccgtgggccactcgtgggagctgggcaccaccttctgcaaactgcactcctccatcttctttctcaacatgttcgccagcggcttcctgctcagcgccatcagcctggaccgctgcctgcaggtggtgcggccggtgtgggcgcagaaccaccgcaccgtggccgcggcgcacaaagtctgcctggtgctttgggcactagcggtgctcaacacggtgccctatttcgtgttccgggacaccatctcgcggctggacgggcgcattatgtgctactacaatgtgctgctcctgaacccggggcctgaccgcgatgccacgtgcaactcgcgccaggcggccctggccgtcagcaagttcctgctggccttcctggtgccgctggcgatcatcgcctcgagccacgcggccgtgagcctgcggttgcagcaccgcggccgccggcggccaggccgcttcgtgcgcctggtggcagccgtcgtggccgccttcgcgctctgctgggggccctaccacgtgttcagcctgctggaggcgcgggcgcacgcaaacccggggctgcggccgctcgtgtggcgcgggctgcccttcgtcaccagcctggccttcttcaacagcgtggccaacccggtgctctacgtgctcacctgccccgacatgctgcgcaagctgcggcgctcgctgcgcacggtgctggagagcgtgctggtggacgacagcgagctgggtggcgcgggaagcagccgccgccgccgcacctcctccaccgcccgctcggcctcccctttagctctctgcagccgcccggaggaaccgcggggccccgcgcgtctcctcggctggctgctgggcagctgcgcagcgtccccgcagacgggccccctgaaccgggcgctgagcagcacctcgagttagaacccggcccacgtagggcggcactcacacgcgaaagtatcaccagggtgccgcggttcaattcgatatccggactcctgccgcagtgatcaaagtccgaggggcgggacccaggcacctgcattttaaagcgccccgggagactctgaatctttttcagaaacagtgagttaaagcagtgcttctcaaaccttgatgtgcctgtgaatcacctaggggtcttgttaagtgcagtctgatccaggaggccggggccgggtactgagagtctgcacttaacaagctcccaggccgagaagccagtgcggcaggttcacaggcgaggcctggagtaacacaaagtgaaactcgtaatagacttcccactctagggcagtggagtcggaagggcacacggggtgcgtctccccggagttcagttttaccagatgatgggggaggggggaaggagttttatgttaaaccatccatgtatttttggagaagagagaggaaaggtttgagaagcactgttccagcctgccctcttcatttagccaatgcttactgcgctagacgcttcatcccacaatcttaaggggcagcttctattagccagtctttacagctgagcacattctggctcagggaggttaagtgacttgcccagtttcagggctaacgaccacagggtctgcactctaaccctaggcatcacatgctcaatgactctctggtgagcgaggacattctctgacctactcgagggacttaagatgctaccttgtgacccagcactgcccaaagtgcttccaaggcagaagcagcaggggatggcgtggtcaagcactcgggaaacctggggctaatcaaatccaatgggggaaatgactaaaagtcttcggtcgttagaagttgaatgggcacagcaactctaagactacagcacacgtcatttcttagctaagcggaccagcctccctgtcggcctggtgttctgtgggatccctctgggcactggtaatcccaagatctgtgcagccccgcctccaggccacatggggctgggcagctaccatttcccttttgcggatgggaggggtaacttgcacctctgacctatcacttccactgcaccccgtctcattcctccacctgccgtggacttggggtcagagactgctgtgtttgagctctgcagcccagggaccgaaaagttggtgtcaatgaattttgcttggtggatgaaatgtcagtggaagaagcagatgagaaactcttgagatcttggtcctgtgttttttctgccaccaaaggccagggtcactgaaggcctggcccacagcaggtgctgagcaaagggaacagtgaggtgcccagctagctgcagagccaccctgtgttgacacctcgcccctgctccctcccatcccttccccctttactcatagcacttcccccattggacacgtggtgcattttgcttgtttattatgttttctctccatcagaatgaaagctcctcgagggcagggactttggtctattgtctgtatttgccggtgcctaggattgtgcctgtatgcaacaggcactcaataaatatttttgctgtagactgg

SEQ ID NO: 1498 - protein, 395 aa, Homo sapien
MSANATLKPLCPILEQMSRLQSHSNTSIRYIDHAAVLLHGLASLLGLVENGVILFVVGCRMRQTVVTTWVLHLALSDLLASASLPFFTYFLAVGHSWELGTTFCKLHSSIFFLNMFASGFLLSAISLDRCLQVVRPVWAQNHRTVAAAHKVCLVLWALAVLNTVPYFVFRDTISRLDGRIMCYYNVLLLNPGPDRDATCNSRQAALAVSKFLLAFLVPLAIIASSHAAVSLRLQHRGRRRPGRFVRLVAAVVAAFALCWGPYHVFSLLEARAHANPGLRPLVWRGLPFVTSLAFFNSVANPVLYVLTCPDMLRKLRRSLRTVLESVLVDDSELGGAGSSRRRRTSSTARSASPLALCSRPEEPRGPARLLGWLLGSCAASPQTGPLNRALSSTSS

SEQ ID NO: 1499 - DNA, 2145 bp, Homo sapien
atcttttttcatcttctagctgtagctcgggctgcttgtcggcttggctccccctcccccctttgctctctgcctcgtctttccccaggacttcgctattttgcttttttaaaaaaaggcaagaaagaactaaactcccccctccctctcctccagtcgggctgcacctctgccttgcactttgcacagaggtagagagcgcgcgagggagagagaggaaagaaaaaaaataataaagagagccaagcagaagaggaggcgagaagcatgaagtgttaactcccccgtgccaaggcccgcgccgcccggacagacgcccgccgcgccttccagccccgagcggacgccgcgcgccgccctgcctgcagcccgggccggcgacggcgagcccttccttatgcaaagcgcgccagcagcgcgaaggcgggacgccgcgcaccgggccgggctcctccagcttcgccgccgcagccaccaccgccgccaccgcagctcgcggaggatcttcccgagcctgaagccgccggctcggcgcgcaaggaggcgagcgcaaggaggggccggggcgagcgagggagcacattggcgtgagcaggggggagggagggcgggcgcggggggcgcgggcagggcgggggggtgtgtgtgtgagcgcgcttggaggtttcgggccagccaccgccgcgcaagctagaagcgccccagcccggcaagctggctcacccgctggccacccagcacagcccgctggcccctctcctgcagcccatctggcggagcggcggcggcggcggcggcggcaggagaatggcatcagaactggcaatgagcaactccgacctgcccaccagtcccctggccatggaatatgttaatgacttcgatctgatgaagtttgaagtgaaaaaggaaccggtggagaccgaccgcatcatcagccagtgcggccgtctcatcgccgggggctcgctgtcctccacccccatgagcacgccgtgcagctcggtgcccccttcccccagcttctcggcgcccagcccgggctcgggcagcgagcagaaggcgcacctggaagactactactggatgaccggctacccgcagcagctgaaccccgaggcgctgggcttcagccccgaggacgcggtcgaggcgctcatcagcaacagccaccagctccagggcggcttcgatggctacgcgcgcggggcgcagcagctggccgcggcggccggggccggtgccggcgcctccttgggcggcagcggcgaggagatgggccccgcggccgccgtggtgtccgccgtgatcgccgcggccgccgcgcagagcggcgcgggcccgcactaccaccaccaccaccaccacgccgccggccaccaccaccacccgacggccggcgcgcccggcgccgcgggcagcgcggccgcctcggccggtggcgctgggggcgcgggcggcggtggcccggccagcgctgggggcggcggcggcggcggcggcggcggaggcggcgggggcgcggcgggggcggggggcgccctgcacccgcaccacgccgccggcggcctgcacttcgacgaccgcttctccgacgagcagctggtgaccatgtctgtgcgcgagctgaaccggcagctgcgcggggtcagcaaggaggaggtgatccggctgaagcagaagaggcggaccctgaaaaaccgcggctatgcccagtcctgccgcttcaagagggtgcagcagagacacgtcctggagtcggagaagaaccagctgctgcagcaagtcgaccacctcaagcaggagatctccaggctggtgcgcgagagggacgcgtacaaggagaaatacgagaagttggtgagcagcggcttccgagaaaacggctcgagcagcgacaacccgtcctctcccgagtttttcataactgagcccactcgcaagttggagccatcagtgggatacgccacattttggaagccccagcatcgtgtacttaccagtgtgttcacaaaatgaaatttgtgtgagagctgtacattaaaaaaaacatcattattattattatttgcagtcatggagaaccacctacccctgacttctgtttagtctcctttttaaataatactgtgttagaaaaaaaaa

SEQ ID NO: 1500 - protein, 403 aa, Homo sapien
MASELAMSNSDLPTSPLAMEYVNDFDLMKFEVKKEPVETDRIISQCGRLIAGGSLSSTPMSTPCSSVPPSPSFSAPSPGSGSEQKAHLEDYYWMTGYPQQLNPEALGFSPEDAVEALISNSHQLQGGFDGYARGAQQLAAAAGAGAGASLGGSGEEMGPAAAVVSAVIAAAAAQSGAGPHYHHHHHHAAGHHHHPTAGAPGAAGSAAASAGGAGGAGGGGPASAGGGGGGGGGGGGGGAAGAGGALHPHHAAGGLHFDDRFSDEQLVTMSVRELNRQLRGVSKEEVIRLKQKRRTLKNRGYAQSCRFKRVQQRHVLESEKNQLLQQVDHLKQEISRLVRERDAYKEKYEKLVSSGFRENGSSSDNPSSPEFFITEPTRKLEPSVGYATFWKPQHRVLTSVFTK

SEQ ID NO: 1501 - DNA, 6586 bp, Homo sapien
ctggggagccggcgctggaggtggtgagtggcgtggggactgtgtcgagggggtccccaaggtgccggaccctgcggaggggcgaagtttcggcactggggagggcgtgcggacgctttccctacaggcgaccactgctctgcgggcgggtggtcttagctccagtcccccattcagttcctcagcattccaggtcggcggcgaaggggtccccgaacgaagggcgcaaggcagcgtctctgctgggaccgggaagccggacttcagggcctctcggcccgtgggcttctccccgagtctccccgagtcggttggcattaagagtttagcagatactttcagaaatggatacataagaaatggctggaaatcaaatgaatgtccaaagaagagcttagggtcttagtaacattcttttttaaaataactgtctgccaaaatgtcattacacagtactcataatagaaataacagcggtgatattcttgatattccttcttcccaaaatagttcatcactgaatgccctcacccacagtagccgacttaagctgcatttgaagtcggatatgtcagaatgtgaaaatgatgatccattattgagatctgcaggtaaagtcagagacataaatagaacttatgttatttctgccagtagaaaaacagcagacatgccccttacccctaatcctgtaggtagattggcacttcagaggagaactacaaggaacaaagaatcatctttgcttgttagtgagttggaagacacaactgaaaaaacagcagaaacacgtcttacattacaacgtcgtgctaaaacagattctgcagaaaagtggaaaacagctgaaatagattctgtcaaaatgacactgaatgtgggaggtgaaacagaaaataatggtgtttctaaggaaagtagaacaaatgtaaggattgtaaataatgctaaaaactcttttgttgcctcttctgtacctttagatgaagatccacaggtcattgaaatgatggctgataagaaatacaaagaaacattttctgcccccagtagagcaaatgaaaatgttgcacttaagtactcaagtaatagaccacccattgcttccctgagtcagactgaagttgttagatcaggacacttgacaacgaaacctactcagagcaagttggatatcaaagtgttgggaacaggaaacttgtatcatagaagtattgggaaggaaattgcaaaaacttcaaataaatttgggagcttagaaaaaagaacacctacaaaatgtacaacagaacacaaactgacaacaaagtgcagcctgcctcagcttaagagcccagctccatcaatactgaagaatagaatgtctaaccttcaagttaaacaaagaccaaaaagttcctttcttgcaaataaacaggaaagatccgcagaaaatacaattcttcccgaagaagaaactgtagttcagaacacctctgcaggaaaagaccccttaaaagtagagaatagtcaagtgacagtggcagtacgcgtaagacctttcaccaagagagagaagattgaaaaagcatcccaggtagtcttcatgagtgggaaagaaataactgtggaacaccctgacacgaaacaagtttataattttatttatgatgtttcattctggtcttttgatgaatgtcatcctcactacgctagccagacaactgtctatgagaagctagcagcaccactcctagaaagagccttcgaaggcttcaatacctgtctttttgcttatggtcagactggctctggaaaatcatatacgatgatgggatttagtgaagaaccaggaataattccaagattttgtgaagatcttttttctcaagtagccagaaaacaaacccaagaggtcagctatcacattgaaatgagcttctttgaagtatataatgaaaaaattcacgaccttctggtttgtaaagatgaaaatgggcagagaaagcaaccactgagagtgagggaacatcctgtttatggaccatatgttgaagcactgtcaatgaacattgtcagttcttacgctgatatccagagttggctagaattgggaaataaacaaagagctactgctgctactggtatgaatgataaaagttcccgatctcattcagttttcaccctggtgatgacccagaccaagacagaatttgtggaaggggaagaacacgatcacagaataacaagtcgaattaacctaatagatctggcaggcagtgagcgctgctctacggctcacactaatggagatcgactaaaggaaggtgtgagtattaataagtccttgctaactttgggaaaagttatatctgcactttcggaacaagcaaaccaaaggagtgtttttattccttatcgtgaatctgttcttacatggctgttaaaagaaagtctgggtggaaattcaaaaactgcaatgattgctacgattagtcccgctgccagcaacatagaagaaacattaagcacacttagatatgctaaccaagcccgtttaatagtcaacattgctaaagtaaatgaagatatgaacgctaagttaattagagaattgaaggcagaaattgcaaagctaaaagctgctcagagaaacagtcggaatattgaccctgaacgatacaggctctgtcggcaagaaataacatccttaagaatgaaactgcatcaacaggagagagacatggcagaaatgcaaagagtgtggaaagaaaagtttgaacaagctgaaaaaagaaaacttcaagaaacaaaagagttacagaaagcaggaattatgtttcaaatggacaatcatttaccaaaccttgttaatctgaatgaagatccacaactatctgagatgctgctatatatgataaaagaaggaacaactacagttggaaagtataaaccaaactcaagccatgatattcagttatctggggtgctgattgctgatgatcattgtactatcaaaaattttggtgggacagtgagtattatcccagttggggaagcaaagacatatgtaaatggaaaacatattttggaaatcacagtattacgtcatggtgatcgagtgattcttggtggagatcattattttagatttaatcatccagtagaagtccagaaaggaaaaaggccatctggaagagatactcctataagtgagggtccaaaagactttgaatttgcaaaaaatgagttgctcatggcacagagatcacaacttgaagcagaaataaaagaggctcagttgaaggcaaaggaagaaatgatgcaaggaatccagattgcaaaagaaatggctcagcaagagctttcttctcaaaaagctgcatatgaaagcaaaataaaagcactggaagcagaactgagagaagagtctcaaaggaaaaaaatgcaggaaataaataaccagaaggctaatcacaaaattgaggaattagaaaaggcaaagcagcatcttgaacaggaaatatatgtcaacaaaaagcgattagaaatggagacattggctacaaaacaggctttagaagaccatagcatccgccatgcaagaattctggaagctttagaaactgaaaagcaaaaaattgctaaagaagtacaaattctacagcagaatcggaataatagggataaaacttttacagtgcagacaacttggagctctatgaaactctcaatgatgattcaggaagccaatgctatcagcagcaaattgaaaacatactatgtttttggcagacatgatatatcagataaaagtagttctgacacttctattcgggttcgtaacctgaaactaggaatctcaacattctggagtctggaaaagtttgaatctaaacttgcagcaatgaaagaactttatgagagtaatggtagtaacaggggtgaagatgccttttgtgatcctgaagatgaatgggaacccgacattacagatgcaccagtttcttcactttctagaaggaggagtaggagtttgatgaagaacagaagaatttctggttgtttacatgacatacaagtccatccaattaagaatttgcattcttcacattcatcaggtttaatggacaaatcaagcactatttactcaaattcagcagagtcctttcttcctggaatttgcaaagaattgattggttcttcgttagatttttttggacagagttatgatgaagaaagaactatagcagacagcctaattaatagttttcttaaaatttataatgggctatttgccatttccaaggctcatgaagaacaagatgaagaaagtcaagataacttgttttcttctgatcgagcaatccagtcacttactattcagactgcatgtgcttttgagcagctagtagtgctaatgaaacactggctgagtgatttactgccttgtaccaacatagcaagacttgaggatgagttgagacaagaagttaaaaaactgggaggctacttacagttatttttgcagggatgctgtttggatatttcatcaatgataaaagaggctcaaaagaatgcaatccaaattgtacaacaagctgtaaagtatgtggggcagttagcagttctgaaagggagcaagctacattttctagaaaacggtaacaataaagctgccagtgtccaggaggaattcatggatgctgtttgtgatggtgtaggcttaggaatgaagattttattagattctggactggaaaaagcaaaagaacttcagcatgaactctttaggcagtgtacaaaaaatgaggttaccaaagaaatgaaaactaatgccatgggattgattagatctcttgaaaacatctttgctgaatcgaaaattaaaagtttcagaaggcaagtacaagaagaaaactttgaataccaagatttcaagaggatggttaatcgtgctccagaattcttaaagttaaaacattgcttagagaaagctattgaaattattatttctgcactgaaaggatgccatagtgatataaatcttctccagacttgtgttgaaagtattcgcaacttggccagtgatttttacagtgacttcagtgtgccttctacttctgttggcagctatgagagtagagtaactcacattgtccaccaggaactagaatctctagctaagtctctcctcttttgttttgaatctgaagaaagccctgatttgttgaaaccctgggaaacttataatcaaaataccaaagaagaacaccaacaatctaaatcaagcgggattgacggcagtaagaataaaggtgtaccaaagcgtgtctatgagctccatggctcatccccagcagtgagctcagaggaatgcacacccagtaggattcagtgggtgtgaatactgatgtgtaggcacttttatgaccacccatgaaagaaaaagaacacttgctcggtaattttctttatgcaggagagtttaagagaaatcagcacagatatttcaaaaaagtccatgtctttttatctttaaaatatctatttatcaaaggccagacacagtggctcacgcctgtaatcccagcactttgggaggcgggcagatcacaaggtcaggagtttgagaccggcctggccaacatggtgaaaccccgtctctactaaaaatacaaaaatttgctgggcatggtggcgcgtgcctgtaatcccagctactaggggggctgaggcaggaggatcgcttgaacctgagaggcagaggttgcagtgagccaagatcatgccactttactccagtctgagcaacagaacgagacttagtcaaaataaataaataaataagtaaataaataaataaataaaatatcttttatctttaaagtgtttaacattggtatactgtctgtagttggttcattagtcgtttataaagggttattttctcatgagtggaaacctgaacaatcagttacctttgtgcctatgccttctctctcctcagacagctgggatgtttatggtgaaatggcctgtacaagtttaactaagacaacttaacttgcattgttaatcaaaaattcttttctcaaagggttaactggttgccattttgaatagtatgttcaagggtgtagcttcctgtttctttccaaattataagtagctacctaaatatagtataattatatattaataatatggcttgctggcacagtagtttaccctgttatctgtgtttcataatgggggctgtatgaatattatttaaaactaataaaatgttgccagaattatactaaactgttggatgagattaggagatcagaggctggaccttctcttgataatgcttgttttgttaaaggtataatgaaataatttgtatatgatttgatgaagattaaagacccttattttccacagctttaaaaaaaaacctttatttatgatcaagtaataaagataatattctacttgtgggatcttacattatggaaatagtttgacgtttttgacctcaagagtatgtataatttgaagagatactttgtaactatgcttgggtgatattgagcagttcctaaagaataattcattt

SEQ ID NO: 1502 - protein, 1648 aa, Homo sapien
MSLHSTHNRNNSGDILDIPSSQNSSSLNALTHSSRLKLHLKSDMSECENDDPLLRSAGKVRDINRTYVISASRKTADMPLTPNPVGRLALQRRTTRNKESSLLVSELEDTTEKTAETRLTLQRRAKTDSAEKWKTAEIDSVKMTLNVGGETENNGVSKESRTNVRIVNNAKNSFVASSVPLDEDPQVIEMMADKKYKETFSAPSRANENVALKYSSNRPPIASLSQTEVVRSGHLTTKPTQSKLDIKVLGTGNLYHRSIGKEIAKTSNKFGSLEKRTPTKCTTEHKLTTKCSLPQLKSPAPSILKNRMSNLQVKQRPKSSFLANKQERSAENTILPEEETVVQNTSAGKDPLKVENSQVTVAVRVRPFTKREKIEKASQVVFMSGKEITVEHPDTKQVYNFIYDVSFWSFDECHPHYASQTTVYEKLAAPLLERAFEGFNTCLFAYGQTGSGKSYTMMGFSEEPGIIPRFCEDLFSQVARKQTQEVSYHIEMSFFEVYNEKIHDLLVCKDENGQRKQPLRVREHPVYGPYVEALSMNIVSSYADIQSWLELGNKQRATAATGMNDKSSRSHSVFTLVMTQTKTEFVEGEEHDHRITSRINLIDLAGSERCSTAHTNGDRLKEGVSINKSLLTLGKVISALSEQANQRSVFIPYRESVLTWLLKESLGGNSKTAMIATISPAASNIEETLSTLRYANQARLIVNIAKVNEDMNAKLIRELKAEIAKLKAAQRNSRNIDPERYRLCRQEITSLRMKLHQQERDMAEMQRVWKEKFEQAEKRKLQETKELQKAGIMFQMDNHLPNLVNLNEDPQLSEMLLYMIKEGTTTVGKYKPNSSHDIQLSGVLIADDHCTIKNFGGTVSIIPVGEAKTYVNGKHILEITVLRHGDRVILGGDHYFRFNHPVEVQKGKRPSGRDTPISEGPKDFEFAKNELLMAQRSQLEAEIKEAQLKAKEEMMQGIQIAKEMAQQELSSQKAAYESKIKALEAELREESQRKKMQEINNQKANHKIEELEKAKQHLEQEIYVNKKRLEMETLATKQALEDHSIRHARILEALETEKQKIAKEVQILQQNRNNRDKTFTVQTTWSSMKLSMMIQEANAISSKLKTYYVFGRHDISDKSSSDTSIRVRNLKLGISTFWSLEKFESKLAAMKELYESNGSNRGEDAFCDPEDEWEPDITDAPVSSLSRRRSRSLMKNRRISGCLHDIQVHPIKNLHSSHSSGLMDKSSTIYSNSAESFLPGICKELIGSSLDFFGQSYDEERTIADSLINSFLKIYNGLFAISKAHEEQDEESQDNLFSSDRAIQSLTIQTACAFEQLVVLMKHWLSDLLPCTNIARLEDELRQEVKKLGGYLQLFLQGCCLDISSMIKEAQKNAIQIVQQAVKYVGQLAVLKGSKLHFLENGNNKAASVQEEFMDAVCDGVGLGMKILLDSGLEKAKELQHELFRQCTKNEVTKEMKTNAMGLIRSLENIFAESKIKSFRRQVQEENFEYQDFKRMVNRAPEFLKLKHCLEKAIEIIISALKGCHSDINLLQTCVESIRNLASDFYSDFSVPSTSVGSYESRVTHIVHQELESLAKSLLFCFESEESPDLLKPWETYNQNTKEEHQQSKSSGIDGSKNKGVPKRVYELHGSSPAVSSEECTPSRIQWV

SEQ ID NO: 1503 - DNA, 1222 bp, Homo sapien
agctcagcaggacctcagccatgagacttctcatcctggccctccttggcatctgctctctcactgcatacattgtggaaggtgtagggagtgaagtctcagataagaggacctgtgtgagcctcactacccagcgactgccggttagcagaatcaagacctacaccatcacggaaggctccttgagagcagtaatttttattaccaaacgtggcctaaaagtctgtgctgatccacaagccacatgggtgagagacgtggtcaggagcatggacaggaaatccaacaccagaaataacatgatccagaccaagccaacaggaacccagcaatcgaccaatacagctgtgactctgactggctagtagtctctggcaccctgtccgtctccagccagccagctcatttcactttacacgctcatggactgagtttatactcaccttttatgaaagcactgcatgaataaaattattcctttgtatttttacttttaaatgtcttctgtattcacttatatgttctaattaataaattatttattattaagaatagttccctagtctattcattatatttagggaaaggtagtgtatcattgttgtttgatttctgaccttgtacctctctttgatggtaaccataatggaagagattctggctagtgtctatcagaggtgaaagctatatcaatctctcttagagtccagcttgtaatggttctttacacatcagtcacaagttacagctgtgacaatggcaacaatttgagatgtatttcaacttgtctctataatagaattctgtttatagaataagggagaaaataatccagtcttcactgggttcccattctgagggtccactactcaaaaatttgcttcactcaatttttttcacctctttgtgttttattttggtgtcctattaaaggaataaaatgacacaacttgtcccttttttgtcccattagcaaaaattagaattttggtataaagaaactttattcaagtaaaaatcaataccctttgaattggacaataatctcactaccttattaggatttctgtatttgccattacgctagttatcatgcatgttatgctttactgcgaataagcttttaatgctccaaatgctgacccatgcaatatttcctcatgtgatcacaatttgcagtaaacttttaattaaatgctcatctggtaactcaacaccccag

SEQ ID NO: 1504 - protein, 114 aa, Homo sapien
MRLLILALLGICSLTAYIVEGVGSEVSDKRTCVSLTTQRLPVSRIKTYTITEGSLRAVIFITKRGLKVCADPQATWVRDVVRSMDRKSNTRNNMIQTKPTGTQQSTNTAVTLTG

SEQ ID NO: 1505 - DNA, 1222 bp, Homo sapien; identical to SEQ ID NO: 1503

SEQ ID NO: 1506 - protein, 114 aa, Homo sapien; identical to SEQ ID NO: 1504

SEQ ID NO: 1507 - DNA, 5379 bp, Homo sapien
gcacttccttctcggctagattatctgaaactgttgtcggttcttgagatgatactaccaccgaatgtctgtgtttcattgtctagtccaacctgtattgtggatatctacaacgttccggcaatagttttgcaggtgcatcacatttttgtttttgttttgggaggaaaagggagggcacggcagccaggcttcatattcctacaagtgcatgcttcaagattactgtacttacagtgtttccaacatcttctcataaaaggggaaagcttcatagcctcaaccatgaaggaaaccagtcgcatagggcatggagctggagaactataaacagcccgtggtgctgagagaggacaactgccgaaggcgccggaggatgaagccgcgcagtgctgcggccagcctgtcctccatggagctcatccccatcgagttcgtgctgcccaccagccagcgcaaatgcaagagccccgaaacggcgctgctgcacgtggccggccacggcaacgtggagcagatgaaggcccaggtgtggctgcgagcgctggagaccagcgtggcggcggacttctaccaccggctgggaccgcatcacttcctcctgctctatcagaagaaggggcagtggtacgagatctacgacaagtaccaggtggtgcagactctggactgcctgcgctactggaaggccacgcaccggagcccgggccagatccacctggtgcagcggcacccgccctccgaggagtcccaagccttccagcggcagctcacggcgctgattggctatgacgtcactgacgtcagcaacgtgcacgacgatgagctggagttcacgcgccgtggcttggtgaccccgcgcatggcggaggtggccagccgcgaccccaagctctacgccatgcacccgtgggtgacgtccaagcccctcccggagtacctgtggaagaagattgccaacaactgcatcttcatcgtcattcaccgcagcaccaccagccagaccattaaggtctcacccgacgacacccccggcgccatcctgcagagcttcttcaccaagatggccaagaagaaatctctgatggatattcccgaaagccaaagcgaacaggattttgtgctgcgcgtctgtggccgggatgagtacctggtgggcgaaacgcccatcaaaaacttccagtgggtgaggcactgcctcaagaacggagaagagattcacgtggtactggacacgcctccagacccggccctagacgaggtgaggaaggaagagtggccgctggtggatgactgcacgggagtcaccggctaccatgagcagcttaccatccacggcaaggaccacgagagtgtgttcaccgtgtccctgtgggactgcgaccgcaagttcagggtcaagatcagaggcattgatatccccgtcctgcctcggaacaccgacctcacagtttttgtagaggcaaacatccagcatgggcaacaagtcctttgccaaaggagaaccagccccaaacccttcacagaggaggtgctgtggaatgtgtggcttgagttcagtatcaaaatcaaagacttgcccaaaggggctctactgaacctccagatctactgcggtaaagctccagcactgtccagcaaggcctctgcagagtcccccagttctgagtccaagggcaaagttcagcttctctattatgtgaacctgctgctgatagaccaccgtttcctcctgcgccgtggagaatacgtcctccacatgtggcagatatctgggaagggagaagaccaaggaagcttcaatgctgacaaactcacgtctgcaactaacccagacaaggagaactcaatgtccatctccattcttctggacaattactgccacccgatagccctgcctaagcatcagcccacccctgacccggaaggggaccgggttcgagcagaaatgcccaaccagcttcgcaagcaattggaggcgatcatagccactgatccacttaaccctctcacagcagaggacaaagaattgctctggcattttagatacgaaagccttaagcacccaaaagcatatcctaagctatttagttcagtgaaatggggacagcaagaaattgtggccaaaacataccaattgttggccagaagggaagtctgggatcaaagtgctttggatgttgggttaacaatgcagctcctggactgcaacttctcagatgaaaatgtaagagccattgcagttcagaaactggagagcttggaggacgatgatgttctgcattaccttctacaattggtccaggctgtgaaatttgaaccataccatgatagcgcccttgccagatttctgctgaagcgtggtttaagaaacaaaagaattggtcactttttgttttggttcttgagaagtgagatagcccagtccagacactatcagcagaggttcgctgtgattctggaagcctatctgaggggctgtggcacagccatgctgcacgactttacccaacaagtccaagtaatcgagatgttacaaaaagtcacccttgatattaaatcgctctctgctgaaaagtatgacgtcagttcccaagttatttcacaacttaaacaaaagcttgaaaacctgcagaattctcaactccccgaaagctttagagttccatatgatcctggactgaaagcaggagcgctggcaattgaaaaatgtaaagtaatggcctccaagaaaaaaccactatggcttgagtttaaatgtgccgatcctacagccctatcaaatgaaacaattggaattatctttaaacatggtgatgatctgcgccaagacatgcttattttacagattctacgaatcatggagtctatttgggagactgaatctttggatctatgcctcctgccatatggttgcatttcaactggtgacaaaataggaatgatcgagattgtgaaagacgccacgacaattgccaaaattcagcaaagcacagtgggcaacacgggagcatttaaagatgaagtcctgaatcactggctcaaagaaaaatcccctactgaagaaaagtttcaggcagcagtggagagatttgtttattcctgtgcaggctactgtgtggcaacctttgttcttggaataggcgacagacacaatgacaatattatgatcaccgagacaggaaacctatttcatattgacttcgggcacattcttgggaattacaaaagtttcctgggcattaataaagagagagtgccatttgtgctaacccctgacttcctctttgtgatgggaacttctggaaagaagacaagcccacacttccagaaatttcaggacatctgtgttaaggcttatctagcccttcgtcatcacacaaacctactgatcatcctgttctccatgatgctgatgacaggaatgccccagttaacaagcaaagaagacattgaatatatccgggatgccctcacagtggggaaaaatgaggaggatgctaaaaagtattttcttgatcagatcgaagtttgcagagacaaaggatggactgtgcagtttaattggtttctacatcttgttcttggcatcaaacaaggagagaaacattcagcctaatactttaggctagaatcaaaaacaagttagtgttctatggtttaaattagcatagcaatcatcgaacttggatttcaaatgcaatagacattgtgaaagctggcatttcagaagtatagctcttttcctacctgaactcttccctggagaaaagatgttggcattgctgattgtttggttaagcaatgtccagtgctaggattatttgcaggtttggttttttctcatttgtctgtggcattggagaatattctcggtttaaacagactaatgacttccttattgtccctgatattttgactatcttactattgagtgcttctggaaattctttggaataattgatgacatctattttcatctgggtttagtctcaattttggttatctttgtgttcctcaagctctttaaagaaaaagatgtaatcgttgtaacctttgtctcattccttaaatgatgcttccaaacatctccttagtgtctgcaggtgttagtggtgtgctaaaagcaaggaaagcgagttagtcttttcagtgtcttttgcaattcaattcttttgtcatgtataactgagacacacaaacacagcaggagaaatctaaaccgttgtgccttgaccttcctctgctggtcttgttccagggttatgaatatgaaaaaatagagatgagactttttgtgtcaactctgtccacaagagtgagttatctagtatgattagtatagctttctccagcatggcagcaggaagtaactacagggcctcttttatgcctgacatttcttcccttcctttttccctgcctccctttttcatcaattgcaatgctcccacaactctttacagacttgtgaaatcttcaagaacacctttactctataactcaaaaattagttgaaaaataattacttctcaaggattattagaatcttaggtacttatttgtaaagatgtttagtgacttttttttcaagtatcttattaaaggaggcattctagaaaatatgaattagtttccaaatgccttaattttaaactttggcctgaacagttttttctttttcttaatggaagaagatatttaatatcttaaaaatattccaagttaggaagaacactacttgccttatccatttcccatttaaaggacttttaaactttgacacatccttcagatttcctgaaaataattgaaatatcttactttaaaaatattttcatctctgaaatatctcgttatttattggaggtattgtttaaccttagagagaccattaaattatttataaaatattttgtaattacctgtagctaatacattacatagaaaaaaactatgttaacagtgtctctgtttaagtataatcagatataaatatatacttaattttttaattttaaaaatagatacctgtttgactttgaggtagtccagaccttttctttttttttttttttttaatgtgtgcaaaagcccaaaggttcctaagcctggctgcaaagaagaatcaacagggacactttttaaaaacactcttatcagcctgggcaacacagtgagactccatctcttaaaaaaaaaattagctgggtatagtggtatgtgcctgtagtcccaggtactcaggaggctgaggcaggaggattgcctgagcccaggaggtggaaactgcagagagtcatgatcatgtccttacactccagcctggataacagagcgagaccctgtctcaaaaaaataaaataaaaaataaaaaca

SEQ ID NO: 1508 - protein, 1102 aa, Homo sapien
MELENYKQPVVLREDNCRRRRRMKPRSAAASLSSMELIPIEFVLPTSQRKCKSPETALLHVAGHGNVEQMKAQVWLRALETSVAADFYHRLGPHHFLLLYQKKGQWYEIYDKYQVVQTLDCLRYWKATHRSPGQIHLVQRHPPSEESQAFQRQLTALIGYDVTDVSNVHDDELEFTRRGLVTPRMAEVASRDPKLYAMHPWVTSKPLPEYLWKKIANNCIFIVIHRSTTSQTIKVSPDDTPGAILQSFFTKMAKKKSLMDIPESQSEQDFVLRVCGRDEYLVGETPIKNFQWVRHCLKNGEEIHVVLDTPPDPALDEVRKEEWPLVDDCTGVTGYHEQLTIHGKDHESVFTVSLWDCDRKFRVKIRGIDIPVLPRNTDLTVFVEANIQHGQQVLCQRRTSPKPFTEEVLWNVWLEFSIKIKDLPKGALLNLQIYCGKAPALSSKASAESPSSESKGKVQLLYYVNLLLIDHRFLLRRGEYVLHMWQISGKGEDQGSFNADKLTSATNPDKENSMSISILLDNYCHPIALPKHQPTPDPEGDRVRAEMPNQLRKQLEAIIATDPLNPLTAEDKELLWHFRYESLKHPKAYPKLFSSVKWGQQEIVAKTYQLLARREVWDQSALDVGLTMQLLDCNFSDENVRAIAVQKLESLEDDDVLHYLLQLVQAVKFEPYHDSALARFLLKRGLRNKRIGHFLFWFLRSEIAQSRHYQQRFAVILEAYLRGCGTAMLHDFTQQVQVIEMLQKVTLDIKSLSAEKYDVSSQVISQLKQKLENLQNSQLPESFRVPYDPGLKAGALAIEKCKVMASKKKPLWLEFKCADPTALSNETIGIIFKHGDDLRQDMLILQILRIMESIWETESLDLCLLPYGCISTGDKIGMIEIVKDATTIAKIQQSTVGNTGAFKDEVLNHWLKEKSPTEEKFQAAVERFVYSCAGYCVATFVLGIGDRHNDNIMITETGNLFHIDFGHILGNYKSFLGINKERVPFVLTPDFLFVMGTSGKKTSPHFQKFQDICVKAYLALRHHTNLLIILFSMMLMTGMPQLTSKEDIEYIRDALTVGKNEEDAKKYFLDQIEVCRDKGWTVQFNWFLHLVLGIKQGEKHSA

SEQ ID NO: 1509 - DNA, 14770 bp, Homo sapien
gggacaccatcatttgggtttttaaaagcttcagcttctccagcatctttgcattgtgaatatcttcctgcttctagtcaaagctttctctctagtgattggaatgctgctgtaagcctattagaggtgcctgaggatatcaccttttacaaggaagccgtgtgtgcttgagaggatctttttaaatgcattatggctcatgcagcctcacaattaaagaaaaacagggatttagaaatcaatgctgaagaagagcctgagaaaaaaaggaaacaccgcaaacggtcccgggatcggaagaaaaagtctgatgccaatgcaagttacttaagagcagctcgagctggacaccttgaaaaggccctcgactacataaaaaatggagttgacatcaacatttgcaatcagaatgggttgaacgctctccaccttgcttccaaagaaggccatgtagaggttgtttctgagctgctgcagagagaagccaatgtggatgcagctacaaagaaaggaaacacagcattgcacatcgcatctttggctgggcaagcagaggtggtaaaagtcttggttacaaatggagccaatgtcaatgcacaatctcagaatggtttcacgccattgtatatggcagcccaggaaaatcacctggaagttgtcaagtttcttcttgacaatggtgcaagccagagcctagccacagaggatggcttcacaccattggcagtggctttgcaacaaggtcacgaccaagtcgtttcgctcctgctagagaatgacaccaaaggaaaagtgcgtctcccagctcttcatatcgcggcccgcaaagacgacacaaaagccgccgccctgctgctgcagaatgacaacaatgcagatgtggaatcaaagagtggcttcactccgctccacatagctgctcactatggaaatatcaatgtagccacgttgctgttaaaccgagcggctgctgtggatttcaccgcaaggaatgacatcactcctttacatgttgcatcaaaaagaggaaatgcaaatatggtaaaactattgctcgatcgaggagctaaaatcgatgccaaaaccagggatggtctgacaccactgcactgtggagcaaggagtggccacgagcaggtggtagaaatgttgcttgatcgagctgcccccattctttcaaaaaccaagaatggattatctccattgcacatggccacacaaggggatcatttaaactgcgtccagcttctcctccagcataatgtacccgtggatgatgtcaccaatgactacctgactgccctacacgtggctgcccactgtggccattacaaagttgccaaggttctcttggataagaaagctaaccccaatgccaaagccctgaatggctttacccctcttcatatcgcctgcaagaagaatcgaattaaagtaatggaactccttctgaaacacggtgcatccatccaagctgtaaccgagtcgggccttaccccaatccatgttgctgccttcatggggcatgtaaatattgtatcacaactaatgcatcatggagcctcaccaaacaccaccaatgtgagaggagaaacagcactgcacatggcagctcgctccggccaagctgaagttgtgcggtatctggtacaagacggagctcaggtagaagctaaagctaaggatgaccaaacaccactccacatttcagcccgactggggaaagcagacatagtacaacagctgttgcagcaaggggcatctccaaatgcagccacaacttctgggtacaccccacttcacctttccgcccgagaggggcatgaggatgtggccgcgttccttttggatcatggagcgtctttatctataacaacaaagaaaggatttactcctcttcatgtggcagcaaaatatggaaagcttgaagtcgccaatctcctgctacagaaaagtgcatctccagatgctgctgggaagagcgggctaacaccactgcatgtagctgcacattacgataatcagaaagtggcccttctgcttttggaccaaggagcctcacctcacgcagccgcaaagaatggttatacgccactgcacatcgctgccaaaaagaaccagatggacatagcgacaactctgctggaatatggtgctgatgccaacgcagttacccggcaaggaattgcttccgtccatctcgcagctcaggaagggcacgtggacatggtgtcgctgctcctcggtagaaatgcgaatgtgaacctgagcaataagagcggcctgaccccactccatttggctgctcaagaagatcgagtgaatgtggcagaagtcctcgtaaaccaaggggctcatgtggacgcccagacaaagatgggatacacaccactgcatgtgggctgccactatggaaatatcaagattgttaatttcctgctccagcattctgcaaaagttaatgccaaaacaaagaatgggtatacgccattacatcaagcagcacagcaggggcatacgcatataataaatgtcttacttcagaacaacgcctcccccaatgaactcactgtgaatgggaatactgcccttggcattgcccggcgcctcggctacatctcagtagtggacaccctgaagatagtgaccgaagaaaccatgaccacaactactgtcacagagaagcacaaaatgaatgttccagaaacgatgaatgaagttcttgatatgtctgatgatgaagttcgtaaagccaatgcccctgaaatgctcagtgatggcgaatatatctcagatgttgaagaaggtgaagatgcaatgaccggggacacagacaaatatcttgggccacaggaccttaaggaattgggtgatgattccctgcctgcagagggttacatgggctttagtctcggagcgcgttctgccagcctccgctccttcagttcggataggtcttacaccttgaacagaagctcctatgcacgggacagcatgatgattgaagaactccttgtgccatccaaagagcagcatctaacattcacaagggaatttgattcagattctcttagacattacagctgggctgcagacaccttagacaatgtcaatcttgtttcaagccccattcattctgggtttctggttagctttatggtggacgcgagagggggctccatgagaggaagccgtcatcacgggatgagaatcatcattcctccacgcaagtgtacggcccccactcgaatcacctgccgtttggtaaagagacataaactggccaacccacccccacatggtgaaaggagagggattagcagtaggctggtagaaatgggtcctgcaggggcacaatttttaggccctgtcatagtggaaatccctcactttgggtccatgagaggaaaagagagagaactcattgttcttcgaagtgaaaatggtgaaacttggaaggagcatcagtttgacagcaaaaatgaagatttaaccgagttacttaatggcatggatgaagaacttgatagcccagaagagttagggaaaaagcgtatctgcaggattatcacgaaagatttcccccagtattttgcagtggtttcccggattaagcaggaaagcaaccagattggtcctgaaggtggaattctgagcagcaccacagtgccccttgttcaagcatctttcccagagggtgccctaactaaaagaattcgagtgggcctccaggcccagcctgttccagatgaaattgtgaaaaagatccttggaaacaaagcaacttttagcccaattgtcactgtggaaccaagaagacggaaattccataaaccaatcacaatgaccattccggtgcccccgccctcaggagaaggtgtatccaatggatacaaaggggacactacacccaatctgcgtcttctctgtagcattacagggggcacttcgcctgctcagtgggaagacatcacaggaacaactcctttgacgtttataaaagattgtgtctcctttacaaccaatgtttcagccagattttggcttgcagactgccatcaagttttagaaactgtggggttagccacgcaactgtacagagaattgatatgtgttccatatatggccaagtttgttgtttttgccaaaatgaatgatcccgtagaatcttccttgcgatgtttctgcatgacagatgacaaagtggacaaaactttagagcaacaagagaattttgaggaagtcgcaagaagcaaagatattgaggttctggaaggaaaacctatttatgttgattgttatggaaatttggccccacttaccaaaggaggacagcaacttgtttttaacttttattctttcaaagaaaatagactgccattttccatcaagattagagacaccagccaagagccctgtggtcgtctgtcttttctgaaagaaccaaagacaacaaaaggactgcctcaaacagcggtttgcaacttaaatatcactctgccagcacataaaaaggagacagagtcagatcaagatgatgagattgagaaaacagatagacgacagagcttcgcatccttagctttacgtaagcgctacagctacttgactgagcctggaatgattgaacggagtacaggagcaacaagatccctccccaccacttactcatacaagccattcttttctacaagaccataccagtcctggacaacagctccgattacagtgcctgggccagccaagtcaggcttcacttccttatcaagttcttcctctaatacgccatcagcttctccgttaaaatcaatatggtctgtttcgacaccttctccaatcaaatccacattaggcgcgtcaactacatcttcagttaaatccattagtgacgtggcatctccaattagatccttacggacaatgtcttcgccgataaaaactgtggtgtcacaatctccatacaatatccaggtttcctctggtaccctggctagagctccagcagtcacggaagctacgcccttaaaagggctggcatccaattctacgttttcctctcgaacctctccagtgactacagcagggtctcttttggagaggtcatcaattactatgacaccccctgcctcccccaaatcaaacattaatatgtattcctcaagtttgccatttaagtcaattattacatcagcagcaccgctaatatcttcacctttaaagtcagtggtgtctccagttaaatcacgagttgatgtcatttcatcagccaaaattacaatggcatcttctctctcatcacctgtgaagcagatgcctggacatgcagaggtagcattagtcaatggatctatttcccctctaaaatatgcatcatcctcaactttaattaatggatgcaaagccactgccacgttacaggaaaaaatttcttctgctacaaactctgtgagctctgtggtcagtgcagccactgacacagttgagaaagtgttttctaccacgactgcaatgccattttccccactcaggtcatatgtttctgcagcaccatcagcttttcagtctctaagaactccttccgcaagtgcactctatacatcccttgggtcgtcaatatctgcaactacctcatctgtaacttcatcaattataacagtgccagtatactctgtagtcaatgttttgccagaaccagcattaaagaaacttccagactctaattcatttacaaaatcagcagcagccttgctgtcacccattaaaacattgactacggagacacatcctcagcctcacttcagtcgaacttcatctccagttaagtcatctttgttccttgcaccctctgcccttaagttgtctacaccatcttctttatcttccagtcaggagatactaaaagatgtagctgaaatgaaagaggacctaatgcggatgaccgcaatactacagacagatgtgcctgaggagaagccattccaacctgaactcccaaaggaagggagaatagatgatgaagaacctttcaaaattgtagagaaagtaaaggaagacttagtgaaagttagtgaaatccttaaaaaggatgtatgtgtagataataaaggatcacccaaatcaccaaagagtgacaaaggacactctcctgaagatgactggatagaatttagttcggaagaaatccgggaagccagacaacaagctgctgcgagccagtctccatctctgccagagagagtgcaagtaaaagcaaaagccgcctccgaaaaggattataacttgaccaaagttattgattacctaacaaatgatattgggagtagttcactgacaaacttaaaatacaagtttgaggatgcaaagaaggatggtgagggaggacagaaaagagttttaaaaccagcaattgctttgcaggaacacaaactcaaaatgcctccagcctccatgaggacttccacctctgagaaagaattgtgtaaaatggctgattccttttttggaacagatactattttagagtctcctgatgacttttctcaacacgaccaagataaaagtcccttgtctgacagtggctttgaaacaagaagtgaaaagacaccttcagccccacaaagcgctgaaacgactggtcctaaaccactttttcatgaagttcccatccctcctgttattacagaaacaagaactgaagtggttcatgttatcaggagctatgatccctcagctggggatgttccccagacccaaccagaggagcctgtgtcacctaaaccttcacctacttttatggaattggaaccaaagcccaccacctctagtattaaagaaaaggttaaagcatttcaaatgaaagccagtagtgaagaagatgaccacaatcgggttttaagcaaaggcatgcgtgttaaagaagagactcacataaccacaaccaccagaatggtttatcattctccaccaggcggtgaaggtgcatctgaaagaattgaagaaaccatgtcagtccatgacatcatgaaggcctttcagtccgggcgggatccttccaaagaactggcaggtctgtttgaacataagtcggcagtgtctccagatgttcacaagtctgctgctgaaacctcagcccagcatgcagagaaggacaaccaaatgaaacccaaactggagcgtataatagaagtccacatcgaaaaaggtaaccaagctgagcccactgaagtcattattagagaaaccaaaaagcatccagaaaaagaaatgtatgtatatcagaaagacttatcccggggagatattaacctaaaagattttctgccagaaaaacacgatgcttttccttgttcagaggaacagggtcagcaagaagaagaagaacttactgctgaagagtcattgccttcttatctggagtcttccagagtaaacactcctgtgtcccaagaagaagatagccgccctagttctgctcaactcatatctgatgactcttataaaacattgaagcttttgagtcaacactcaatagaataccatgacgatgagttgtcagaactaagaggggagtcttacaggtttgctgagaaaatgcttctgtcagaaaagctagatgtgtctcattctgatactgaggaatcggttacagaccatgcaggaccccctagctcagagttacaggggtctgataagcggtccagagaaaaaatagccactgcccccaaaaaagaaattctctccaaaatctataaagatgtttctgaaaatggtgtaggtaaagtgtctaaagatgagcattttgataaagtgacagtgttgcactattctggcaatgttagtagtccaaaacatgccatgtggatgcgctttactgaggacagattagacagaggtagagagaagttgatatatgaagatagggtggacaggactgtgaaggaggctgaagaaaaactgactgaagtgtcacagttttttcgtgacaaaactgaaaagctaaatgatgaactgcagtccccagagaaaaaggcacgccctaaaaatggcaaagaatattcttctcaaagccctaccagtagcagccctgagaaagtgctactgacagaactgctggcatccaatgatgagtgggttaaggcaagacagcatggccctgatggacaaggcttccccaaggccgaggagaaggcacccagtctgcccagcagcccagagaagatggttctctcccaacagactgaggacagcaagtccacagtggaagccaaaggaagtatttcacagagcaaagcaccagatgggccccagtctggattccagctcaaacaatctaaactcagttccattagattaaaatttgaacaaggcacacacgcaaaaagtaaggacatgtctcaagaagacagaaagtcagatggccagtccagaatcccagttaaaaaaatacaggagagcaagctacccgtctaccaagtttttgctagagaaaaacagcagaaggccatagacctcccagatgaaagtgtatctgtgcaaaaagattttatggtattaaaaaccaaagatgagcatgcccaaagcaacgaaattgttgtaaatgattctggctctgataatgtgaaaaaacagagaactgaaatgtcaagtaaagcaatgcctgactctttttctgagcagcaggctaaagacttggcatgtcatataacctcagatttagcaactaggggaccatgggacaaaaaggtctttagaacatgggagagttcgggagccactaacaataagtctcagaaagaaaaactttcgcatgtacttgttcatgatgtaagagagaatcacattggtcaccctgagagtaaaagtgttgatcaaaagaatgaatttatgtctgtgactgagagagaacgcaaattgttaacaaacggctctctctcagaaattaaagaaatgactgtaaaatctccctccaaaaaagtcttatatagggaatatgttgtgaaagaaggggaccatccaggcggattgcttgatcagccttccaggaggagcgagagctcagcagtgtcacacattcccgtcagagttgctgatgagaggagaatgctgtcttctaatattcccgatggtttttgtgaacagtcggcatttccaaaacatgaactatcacaaaaattgtcccagtcaagcatgagtaaagagacagttgagacacagcactttaattctatagaagatgaaaaagttacctattcagaaatcagcaaagtttccaaacaccagagttatgtaggtttatgcccacctctcgaggaaaccgaaacctcccccaccaaatctcctgattctttagagtttagcccaggaaaggaatctccctctagtgatgtattcgaccacagtcccattgatggattggaaaaactcgcaccactagcccagacagagggagggaaagagataaaaactttacccgtttatgtcagttttgtacaagtggggaagcaatatgaaaaggagatacaacaaggaggtgtaaaaaaaatcataagtcaggaatgtaagacagtacaagaaaccagggggaccttttatacaactagacagcaaaagcaacctccttctccccaaggtagtccagaagatgatactctagagcaagtatcctttctagacagctctgggaaaagccctttaaccccagaaacacccagttcagaggaagtgagttatgaatttacatctaagacacctgactcgctcatagcttatataccaggcaaacccagcccaattcccgaggtttctgaggagtcagaggaggaggaacaggccaagtcaacctcccttaagcagactacagtggaggaaacagcagttgagcgtgaaatgcctaatgacgtgagcaaagactctaaccaaagacccaaaaataacagagttgcctatattgaatttccccctcctccaccactggatgcggaccagattgagtcagataagaagcatcattatctcccagaaaaagaggttgacatgattgaagtcaatctgcaagatgagcatgacaagtaccagctggctgaacctgtcattagagtgcagccaccttcaccagttcctcccggggcagacgtcagtgattcaagcgatgacgaatctatttatcagccagtcccagttaaaaaatataccttcaaattaaaggaagtggacgatgaacaaaaagaaaaacccaaagcttctgctgaaaaggcttccaaccagaaagaactggaaagtaatggatctggaaaagataatgaatttggccttggccttgattcacctcagaatgaaattgcccagaatgggaacaacgaccagtccatcacagagtgttccattgccaccacagcagagttttctcatgacacggatgccacagagatcgactctctggatggctatgacctgcaagatgaagatgatggcttgacagagagtgattctaaactcccaattcaagccatggaaattaagaaagatatctggaacacagagggcattctgaagccagctgaccgctcttttagccaaagtaaacttgaagttatcgaggaggagggaaaggtgggaccagatgaggacaagccaccttctaaaagttcttcatctgaaaagactcctgataagactgatcagaagtcaggggcccagttcttcacactggaaggcagacatcctgacagatcagtgtttcctgatacttacttcagttacaaagtagatgaagaatttgccactccttttaaaacagtagctaccaaaggtctagattttgacccttggtctaataaccgaggggatgatgaagtttttgacagtaaatcacgggaagatgaaactaagccatttgggctggcggtagaagaccgctctccagcaacaacccctgatacaacgccagccagaacgccaactgatgaaagtaccccaactagtgagcctaaccccttcccatttcatgaaggaaaaatgtttgagatgactcgcagtggtgcaattgacatgagcaagagggattttgttgaagagaggctccaatttttccagattggtgagcatacttctgaagggaagtcaggggaccagggggaaggggataaaagtatggtcactgccacaccacagccacagtcaggggacaccactgtagaaaccaatctagagagaaatgtagagacacctacagtggaacctaaccccagcatcccgaccagcggagagtgtcaggaaggcacatccagtagtggctccctggagaaatcagcagcagccactaacacctctaaagttgaccccaagttgcgcacgcctataaaaatgggaatttctgcatccaccatgaccatgaagaaagaaggccctggagaaataacagataagatagaagcggtgatgaccagttgtcagggattagaaaatgaaactataacaatgatttcaaatacagccaatagccagatgggcgttaggccccatgaaaaacatgattttcaaaaagataactttaataacaacaacaatttggattcttccactatacagacagataacattatgagtaatatagttctgacagaacattctgcacccacttgtaccacagagaaagataacccagtgaaagtctcatcaggaaaaaagacaggggtactacaaggacactgtgtaagagataagcagaaagttcttggagaacagcaaaaaacaaaggaattgatagggattaggcaaaaatccaaacttcccataaaggccacttcaccaaaagataccttcccaccgaaccatatgtcaaacactaaagcaagtaaaatgaagcaggttagtcaatccgagaaaaccaaagcccttactacttcttcatgtgtagatgtaaagtccagaattccagtgaaaaacacacccagggataacataattgcagttagaaaagcatgtgccacacaaaagcaagggcagccagagaaaggcaaggccaaacagcttccatccaagttgccagtaaaggtaagatccacctgtgtcactaccaccaccaccactgccaccaccaccaccactaccaccactaccaccaccaccagctgcacagttaaagttaggaaaagtcagctcaaggaagtatgtaaacattccattgaatattttaagggaattagtggtgagaccttaaagcttgtggaccgcctctctgaagaagaaaaaaagatgcagtccgagttgtccgatgaggaagaaagtacctcaagaaacacgtcgttgtccgagacttcccggggtggccagccttcggttacaacgaagtctgctagagataagaaaacagaggcagcacctttaaaatcaaagagtgaaaaggccggcagtgagaaaaggagcagtagaaggactggtccacagagtccatgtgaacggacagatatcaggatggcaatagtagccgatcacctgggacttagttggacagaactggcaagggaactgaatttttcagtggatgaaatcaatcaaatacgtgtggaaaatccaaattctttaatttctcagagcttcatgttattaaaaaaatgggttaccagagacggaaaaaatgccacaactgatgccttaacttcggtcttgacaaaaattaatcgaatagatatagtgacactgctagaaggaccaatatttgattatggaaatatttcaggcaccagaagttttgcagatgagaacaatgttttccatgaccctgttgatggttggcagaatgagacatcaagtggaaacctagagtcctgcgctcaagctcgaagagtaactggtgggttactagatcgactggatgacagccctgaccagtgtagagattccattacctcatatctcaaaggagaagctggcaaatttgaagcaaatggaagccatacagaaatcactccagaagcaaagacaaaatcttactttccagaatcccaaaatgatgtaggaaaacagagtaccaaggaaactctgaaaccaaaaatacatggatctggtcatgttgaagaaccagcatcaccactagcagcatatcagaaatctctagaagaaaccagcaagcttataatagaagagactaaaccctgtgtgcctgtcagtatgaaaaagatgagtaggacttctccagcagatggcaagccaaggcttagcctccatgaagaagaggggtccagtgggtctgagcaaaagcagggagaaggttttaaggtgaaaacgaagaaagaaatccggcatgtggaaaagaagagccactcgtaacagcgaacggtcagtcaaggatcataagtttttactgccagtattgagaaattcgtggaagaaatgtcagcaggaagtaaaaattcaccgagaagtgtgtgtgtgttcgctgcttccacacattaatggcatgattttttttatgcaaaaagaaaagaaaagaaaaccacccacattttaatttagcatgagccaatttacagagcatggaaatcactttcatttccggattggcgcgtgtgcaattagcaatgcagtgtatatacaagaagccatgctgttaacagtttatctcaagtaatttggtgtcatttacaaaaggaagaaattcttgccatcagaagggacagaaggagatggaatgatcaaatcacagagaaacactaaaattactaaatctacaacagctcgccttatttttcttggacccaaactgtcagggtataaacactatttgtttcttttttaaaacatcgatagttttgctgtaaataataacactgtataaattctaacagaaaaatagaataaaatgttgataaggcactgcctcttagaacacaaacagaatattgcaaatgcatttaacaaataggggtctcaagtgacttcaccctagaagaggagggagggattctgggtgggggtgactcttcactgattcttgtatattagcaattataatgtttgtatatgcaaaactgctagcttgattttaaaaaaaaacaaatctttaaaatctgctgcaaatttaaataattcccaaaatgaggaattctgtagttctgtgaaaaatttttttcttcagaatactaatattttgatgcatgtgtatcaccttattttgattaaatcttttccaattttgcaaacactacagtatactgcaacacaaaagattttatctgtaaacacaaagcccttcatctaatatttgttgctattgccaatttttcaatgaaatgacctaaaaacaacaaaaaaaaataacctatacggtagttgctttagggggtggggggatgctatctgttagtgcttaaaagggggtaaatgcttgccgctttagaggtggatggtgctcataaaaggccccagtcgggggtatttaaaaaggactgaacagaaatccttagctagtagaatggcagcacgctgtaaaattattactgtattgtgtactggctataagatgtagacacctttcagtaagccaatcatttgtaaccattctagcagtgtcatattaggttaataaggctgctgtgttttaaagggcatttttatttgggttttggtgaaattctttaatttgttgattatattcacataaaatcagcattcattgacacatagctctaatgacatatgtatgaaaaaccatacactggatgacctagtcgattatttaagcataaaataaattgtgttaaactcttcacct

SEQ ID NO: 1510 - protein, 2000 aa, Homo sapien
MAHAASQLKKNRDLEINAEEEPEKKRKHRKRSRDRKKKSDANASYLRAARAGHLEKALDYIKNGVDINICNQNGLNALHLASKEGHVEVVSELLQREANVDAATKKGNTALHIASLAGQAEVVKVLVTNGANVNAQSQNGFTPLYMAAQENHLEVVKFLLDNGASQSLATEDGFTPLAVALQQGHDQVVSLLLENDTKGKVRLPALHIAARKDDTKAAALLLQNDNNADVESKSGFTPLHIAAHYGNINVATLLLNRAAAVDFTARNDITPLHVASKRGNANMVKLLLDRGAKIDAKTRDGLTPLHCGARSGHEQVVEMLLDRAAPILSKTKNGLSPLHMATQGDHLNCVQLLLQHNVPVDDVTNDYLTALHVAAHCGHYKVAKVLLDKKANPNAKALNGFTPLHIACKKNRIKVMELLLKHGASIQAVTESGLTPIHVAAFMGHVNIVSQLMHHGASPNTTNVRGETALHMAARSGQAEVVRYLVQDGAQVEAKAKDDQTPLHISARLGKADIVQQLLQQGASPNAATTSGYTPLHLSAREGHEDVAAFLLDHGASLSITTKKGFTPLHVAAKYGKLEVANLLLQKSASPDAAGKSGLTPLHVAAHYDNQKVALLLLDQGASPHAAAKNGYTPLHIAAKKNQMDIATTLLEYGADANAVTRQGIASVHLAAQEGHVDMVSLLLGRNANVNLSNKSGLTPLHLAAQEDRVNVAEVLVNQGAHVDAQTKMGYTPLHVGCHYGNIKIVNFLLQHSAKVNAKTKNGYTPLHQAAQQGHTHIINVLLQNNASPNELTVNGNTALGIARRLGYISVVDTLKIVTEETMTTTTVTEKHKMNVPETMNEVLDMSDDEVRKANAPEMLSDGEYISDVEEGEDAMTGDTDKYLGPQDLKELGDDSLPAEGYMGFSLGARSASLRSFSSDRSYTLNRSSYARDSMMIEELLVPSKEQHLTFTREFDSDSLRHYSWAADTLDNVNLVSSPIHSGFLVSFMVDARGGSMRGSRHHGMRIIIPPRKCTAPTRITCRLVKRHKLANPPPHGERRGISSRLVEMGPAGAQFLGPVIVEIPHFGSMRGKERELIVLRSENGETWKEHQFDSKNEDLTELLNGMDEELDSPEELGKKRICRIITKDFPQYFAVVSRIKQESNQIGPEGGILSSTTVPLVQASFPEGALTKRIRVGLQAQPVPDEIVKKILGNKATFSPIVTVEPRRRKFHKPITMTIPVPPPSGEGVSNGYKGDTTPNLRLLCSITGGTSPAQWEDITGTTPLTFIKDCVSFTTNVSARFWLADCHQVLETVGLATQLYRELICVPYMAKFVVFAKMNDPVESSLRCFCMTDDKVDKTLEQQENFEEVARSKDIEVLEGKPIYVDCYGNLAPLTKGGQQLVFNFYSFKENRLPFSIKIRDTSQEPCGRLSFLKEPKTTKGLPQTAVCNLNITLPAHKKETESDQDDEIEKTDRRQSFASLALRKRYSYLTEPGMIERSTGATRSLPTTYSYKPFFSTRPYQSWTTAPITVPGPAKSGFTSLSSSSSNTPSASPLKSIWSVSTPSPIKSTLGASTTSSVKSISDVASPIRSLRTMSSPIKTVVSQSPYNIQVSSGTLARAPAVTEATPLKGLASNSTFSSRTSPVTTAGSLLERSSITMTPPASPKSNINMYSSSLPFKSIITSAAPLISSPLKSVVSPVKSRVDVISSAKITMASSLSSPVKQMPGHAEVALVNGSISPLKYASSSTLINGCKATATLQEKISSATNSVSSVVSAATDTVEKVFSTTTAMPFSPLRSYVSAAPSAFQSLRTPSASALYTSLGSSISATTSSVTSSIITVPVYSVVNVLPEPALKKLPDSNSFTKSAAALLSPIKTLTTETHPQPHFSRTSSPVKSSLFLAPSALKLSTPSSLSSSQEILKDVAEMKEDLMRMTAILQTDVPEEKPFQPELPKEGRIDDEEPFKIVEKVKEDLVKVSEILKKDVCVDNKGSPKSPKSDKGHSPEDDWIEFSSEEIREA

SEQ ID NO: 1511 - DNA, 1313 bp, Homo sapien
gtgggcagccgaggccgcgaactgcatcatggagaattttgtagccaccttggctaatgggatgagcctccagccgcctcttgaagaagtgtcctgtggccaggcggaaagcagtgagaagcccaacgctgaggacatgacatccaaagattactactttgactcctacgcacactttggcatccacgaggagatgctgaaggacgaggtgcgcaccctcacttaccgcaactccatgtttcataaccggcacctcttcaaggacaaggtggtgctggacgtcggctcgggcaccggcatcctctgcatgtttgctgccaaggccggggcccgcaaggtcatcgggatcgtgtgttccagtatctctgattatgcggtgaagatcgtcaaagccaacaagttagaccacgtggtgaccatcatcaaggggaaggtggaggaggtggagctcccagtggagaaggtggcatcatcatcagcgagtggatgggctactgcctcttctacgagtccatgctcaacaccgtgctctatgcccgggacaagtgtggcgcccgatggcctcatcttcccagaccgggccacgctgtatgtgacggccatcgaggaccggcagtacaaagactacaagatccactggtgggagaacgtgtatggcttcgacatgtcttgcatcaaagatgtggccattaaggagcccctagtggatgtcgtggaccccaaacagctggtcaccaacgcctgcctcataaaggaggtggacatctataccgtcaaggtggaagacctgaccttcacctccccgttctgcctgcaagtgaagcggaatgactacgtgcacgccctggtggcctacttcaacatcgagttcacacgctgccacaagaggaccggcttctccaccagccccgagtccccgtacacgcactggaagcagacggtgttctacatggaggactacctgaccgtgaagacgggcgaggagatcttcggcaccatcggcatgcggcccaacgccaagaacaaccgggacctggacttcaccatcgacctggacttcaagggccagctgtgcgagctgtcctgctccaccgactaccggatgcgctgaggcccggctctcccgccctgcacgagcccaggggctgagcgttcctaggcggtttcggggctcccccttcctctccctccctcccgcagaagggggttttaggggcctgggctggggggatggggagggcacatcgtgactgtgtttttcataacttatgtttttatatggttgcatttacgccaataaatcctcagctggg

SEQ ID NO: 1512 - protein, 360 aa, Homo sapien
MENFVATLANGMSLQPPLEEVSCGQAESSEKPNAEDMTSKDYYFDSYAHFGIHEEMLKDEVRTLTYRNSMFHNRHLFKDKVVLDVGSGTGILCMFAAKAGARKVIGIVCSSISDYAVKIVKANKLDHVVTIIKGKVEEVELPVEKVASSSASGWATASSTSPCSTPCSMPGTSVAPDGLIFPDRATLYVTAIEDRQYKDYKIHWWENVYGFDMSCIKDVAIKEPLVDVVDPKQLVTNACLIKEVDIYTVKVEDLTFTSPFCLQVKRNDYVHALVAYFNIEFTRCHKRTGFSTSPESPYTHWKQTVFYMEDYLTVKTGEEIFGTIGMRPNAKNNRDLDFTIDLDFKGQLCELSCSTDYRMR

SEQ ID NO: 1513 - DNA, 367 bp, Homo sapien
ctccagtctcacctcggcttgcaatggaccccaactgctcctgcgaggctggtggctcctgcgcctgcgccggctcctgcaagtgcaaaaagtgcaaatgcacctcctgcaagaagagctgctgctcctgttgccccctgggctgtgccaagtgtgcccagggctgcatctgcaaaggggcgtcagagaagtgcagctgctgtgcctgatgtcgggacagccctgctgtcagatgaaaacagaatgacacgtaaaatccgaggttttttttttctacaactccgactcatttgctacattcctttttttctgtgaaatatgtgaataataattaaacacttagacttgaaaaaaaaaaaaaaaaaaa

SEQ ID NO: 1514 - protein, 61 aa, Homo sapien
MDPNCSCEAGGSCACAGSCKCKKCKCTSCKKSCCSCCPLGCAKCAQGCICKGASEKCSCCA

SEQ ID NO: 1515 - DNA, 1991 bp, Homo sapien
acaggggtgaaggcccagagaccagcagaacggcatcccagccacgacggccactttgctctgtctgctgtccgccacggccctgctctgttccctgggacacccccgcccccacctcctcaggctgcctgatctgcccagctttccagctttcctctggattccggcctctggtcatccctccccaccctctctccaaggccctctcctggtctcccttcttctagaaccccttcctccacctccctctctgcagaacttctcctttaccccccaccccccaccactgccccctttccttttctgacctccttttggagggctcagcgctgcccagaccataggagagatgtgggaggctcagttcctgggcttgctgtttctgcagccgctttgggtggctccagtgaagcctctccagccaggggctgaggtcccggtggtgtgggcccaggagggggctcctgcccagctcccctgcagccccacaatccccctccaggatctcagccttctgcgaagagcaggggtcacttggcagcatcagccagacagtggcccgcccgctgccgcccccggccatcccctggcccccggccctcacccggcggcgccctcctcctgggggcccaggccccgccgctacacggtgctgagcgtgggtcccggaggcctgcgcagcgggaggctgcccctgcagccccgcgtccagctggatgagcgcggccggcagcgcggggacttctcgctatggctgcgcccagcccggcgcgcggacgccggcgagtaccgcgccgcggtgcacctcagggaccgcgccctctcctgccgcctccgtctgcgcctgggccaggcctcgatgactgccagccccccaggatctctcagagcctccgactgggtcattttgaactgctccttcagccgccctgaccgcccagcctctgtgcattggttccggaaccggggccagggccgagtccctgtccgggagtccccccatcaccacttagcggaaagcttcctcttcctgccccaagtcagccccatggactctgggccctggggctgcatcctcacctacagagatggcttcaacgtctccatcatgtataacctcactgttctgggtctggagcccccaactcccttgacagtgtacgctggagcaggttccagggtggggctgccctgccgcctgcctgctggtgtggggacccggtctttcctcactgccaagtggactcctcctgggggaggccctgacctcctggtgactggagacaatggcgactttacccttcgactagaggatgtgagccaggcccaggctgggacctacacctgccatatccatctgcaggaacagcagctcaatgccactgtcacattggcaatcatcacagtgactcccaaatcctttgggtcacctggatccctggggaagctgctttgtgaggtgactccagtatctggacaagaacgctttgtgtggagctctctggacaccccatcccagaggagtttctcaggaccttggctggaggcacaggaggcccagctcctttcccagccttggcaatgccagctgtaccagggggagaggcttcttggagcagcagtgtacttcacagagctgtctagcccaggtgcccaacgctctgggagagccccaggtgccctcccagcaggccacctcctgctgtttctcacccttggtgtcctttctctgctccttttggtgactggagcctttggctttcacctttggagaagacagtggcgaccaagacgattttctgccttagagcaagggattcaccctccgcaggctcagagcaagatagaggagctggagcaagaaccggagccggagccggagccggaaccggagcccgagcccgagcccgagccggagcagctctgacctggagctgaggcagccagcagatctcagcagcccagtccaaataaacgtcctgtctagcagc

SEQ ID NO: 1516 - protein, 525 aa, Homo sapien
MWEAQFLGLLFLQPLWVAPVKPLQPGAEVPVVWAQEGAPAQLPCSPTIPLQDLSLLRRAGVTWQHQPDSGPPAAAPGHPLAPGPHPAAPSSWGPRPRRYTVLSVGPGGLRSGRLPLQPRVQLDERGRQRGDFSLWLRPARRADAGEYRAAVHLRDRALSCRLRLRLGQASMTASPPGSLRASDWVILNCSFSRPDRPASVHWFRNRGQGRVPVRESPHHHLAESFLFLPQVSPMDSGPWGCILTYRDGFNVSIMYNLTVLGLEPPTPLTVYAGAGSRVGLPCRLPAGVGTRSFLTAKWTPPGGGPDLLVTGDNGDFTLRLEDVSQAQAGTYTCHIHLQEQQLNATVTLAIITVTPKSFGSPGSLGKLLCEVTPVSGQERFVWSSLDTPSQRSFSGPWLEAQEAQLLSQPWQCQLYQGERLLGAAVYFTELSSPGAQRSGRAPGALPAGHLLLFLTLGVLSLLLLVTGAFGFHLWRRQWRPRRFSALEQGIHPPQAQSKIEELEQEPEPEPEPEPEPEPEPEPEQL

SEQ ID NO: 1517 - DNA, 2559 bp, Homo sapien
agattcgcagtggtcgcttcttctccttggatttgttaaggattccaagtaactcttatttggagagaagacgatctgcacttcgcattttggcattgacatttaattttagggtcctttatatagaagggagactacatgaatgtgtaagatcttggaggaagacagcagagagagagagagagagcagagatcccagggttaaaagttggagaaatttcacagtacatcatccaaaagaggagtccatgatggaggcagaggtaaacttggagaggacaggaagatgtcacccaagcgcatagctaaaagaaggtcccccccagcagatgccatccccaaaagcaagaaggtgaaggtctcacacaggtcccacagcacagaacccggcttggtgctgacactaggccagggcgacgtgggccagctggggctgggtgagaatgtgatggagaggaagaagccggccctggtatccattccggaggatgttgtgcaggctgaggctgggggcatgcacaccgtgtgtctaagcaaaagtggccaggtctattccttcggctgcaatgatgagggtgccctgggaagggacacatcagtggagggctcggagatggtccctgggaaagtggagctgcaagagaaggtggtacaggtgtcagcaggagacagtcacacagcagccctcaccgatgatggccgtgtcttcctctggggctccttccgggacaataacggtgtgattggactgttggagcccatgaagaagagcatggtgcctgtgcaggtgcagctggatgtgcctgtggtaaaggtggcctcaggaaacgaccacttggtgatgctgacagctgatggtgacctctacaccttgggctgcggggaacagggccagctaggccgtgtgcctgagttatttgccaaccgtggtggccggcaaggcctcgaacgactcctggtccccaagtgtgtgatgctgaaatccaggggaagccggggccacgtgagattccaggatgccttttgtggtgcctatttcacctttgccatctcccatgagggccacgtgtacggcttcggcctctccaactaccatcagcttggaactccgggcacagaatcttgcttcataccccagaacctaacatccttcaagaattccaccaagtcctgggtgggcttctctggtggccagcaccatacagtctgcatggattcggaaggaaaagcatacagcctgggccgggctgagtatgggcggctgggccttggagagggtgctgaggagaagagcatacccaccctcatctccaggctgcctgctgtctcctcggtggcttgtggggcctctgtggggtatgctgtgaccaaggatggtcgtgttttcgcctggggcatgggcaccaactaccagctgggcacagggcaggatgaggacgcctggagccctgtggagatgatgggcaaacagctggagaaccgtgtggtcttatctgtgtccagcgggggccagcatacagtcttattagtcaaggacaaagaacagagctgatgaagcctctgagggcctggcttctgtcctgcacaacctccctcacagaacagggaagcagtgacagctgcagatggcagcgggcctctccccagccctgagcactgtgtcagttcctgccttttctcatcagcagaacagaatccttttcctcttttccttcctcctctttggaattttcctgggacctacagaataaagggggggatggacagggggttttcaaaaggaacatggctcactcagagctatatggttagacgtttctccccttttccctaccttccatggtcctggttggccctggctttgcctactagaaaaccaaaacttcccccctggggttttgtgcccactctctgagaagttggggctccatcaagccccattctagtcatgtgcccctttcctgtccctaacagtccacaggcaaacaaatggtacagtcataagagccatctgtcacggacccacgcccagaggaacgtgcagaaaaaagcagagctacatggctgtgggcaactataagccaaatatttggctcagaacaggtgtccatgggacaaaaaagaacgatcctccacttgaccaagaaaaaagtgattctcccagaagcacaaagcatactcttgcccctcaggtgttgcttgtgtacatcgtacccatccattcggcttcacctgcagccaacggcctggaatcgcaaagagacaccactctgggcagagcagagcagggtatggggtggggagagagggtggagggttttataaacaaacttaacagcaatattgaaaggaggtgggggattgagggagggacagagtgttggagggccagagactagtcctgagatggaaacagcaacttgtacagtggctgagaaaataggatatagttttgatttttttaattgtaaaatattttggagggagaacaaaatcttttaacattttgaataaatttagagttttataaaatagaaaaaaaaaaaaaaaaaaaaaaaa

SEQ ID NO: 1518 - protein, 421 aa, Homo sapien
MSPKRIAKRRSPPADAIPKSKKVKVSHRSHSTEPGLVLTLGQGDVGQLGLGENVMERKKPALVSIPEDVVQAEAGGMHTVCLSKSGQVYSFGCNDEGALGRDTSVEGSEMVPGKVELQEKVVQVSAGDSHTAALTDDGRVFLWGSFRDNNGVIGLLEPMKKSMVPVQVQLDVPVVKVASGNDHLVMLTADGDLYTLGCGEQGQLGRVPELFANRGGRQGLERLLVPKCVMLKSRGSRGHVRFQDAFCGAYFTFAISHEGHVYGFGLSNYHQLGTPGTESCFIPQNLTSFKNSTKSWVGFSGGQHHTVCMDSEGKAYSLGRAEYGRLGLGEGAEEKSIPTLISRLPAVSSVACGASVGYAVTKDGRVFAWGMGTNYQLGTGQDEDAWSPVEMMGKQLENRVVLSVSSGGQHTVLLVKDKEQS

SEQ ID NO: 1519 - DNA, 2251 bp, Homo sapien
ctgggatcaggcaaccctctcacctcagcctcccaagtagctgggactacaggtgcacgctaccatgcctggctaatttttttgtacttttagtaaagacggggttttgtcatgttgctcgggctagcctcaaactcctgggctcaagcgatcctccctcctcggcctcccaaagtgctgggattacaggcttgagccaccgcacctggccttccccatttttctcttaatccatatctcagacaggaatctgtatctctcactctacagatcattctgtaggcactatgctaaactgacaccagtttcaaatttagtccttaattgatcttggcctttaggtgagcaaagttacagtggtaaattacgctccttcgcttacaaaatctcttgcttggtatttattccccaggggttacatagaatagagtggaggcagtagacatggagaaatcctatcttttaagaaagaaaaaaatgggcatttttctcatggggaaggatttttatttttcaaataggtgtttgaactgtaatgatttcatgacatctgcctaacggttttgtttctttgtcttacagaaacaaacagtcgttgctgtcaaaaaagagatcatgtattaccaacaggccttgatgaggtccacagtgaagtcttctgtgtccctgggagggattgtgaaatacagtgagcagttctcatccaacgatgccatcatgtcaggctgcctccccagcaacccctggatcaccgatgacacccagttctgggacttaaatgccaaattggtggaaatcccaaccaagatgcgagtggaacgatgggccttcaacttcagcgaattgatccgagaccccaaaggtcgacagagcttccagtacttcctcaagaaagaattcagtggagagaatctgggattctgggaagcctgcgaggatctgaagtatggagatcagtccaaagtcaaggagaaagcagaggagatttacaagctgttcctggccccgggggcgaggcgctggatcaacatagatggcaaaaccatggacatcaccgtgaaggggctgaagcacccccaccgctatgtgctggacgccgcacaaacccacatttacatgctcatgaagaaggattcttatgctcgctatttaaaatctccgatctataaggacatgcaggccaaagctattgaccctcaggaaacaaccaagaaaagctccaccctcccttttatgcggcgtcacctgcgctccagcccaagccctgtcatcctgagacagctggaagaggaagccaaggcccgagaagcagccaacactgtggacatcacccagccgggccagcacatggctcccagcccccatctgaccgtgtacaccgggacctgcatgcccccgtctccttctagccccttctcctcctcctgccgctcccccaggaagcctttcgcctcacccagccgcttcatccggcgaccaaccatctgcccctcaccgatcctagtggtcttggatagctcatcgggcttggagcagaaaggggagtgcagctggtctggtgccaaccctgggccctctgtcaccgacagcagcgaggcctcccgcgacacctcctggactcgcagccggcccagggcccctctcaaggcccgcatggctctgtccttcagcaggtttctgagacgaggctgtctggcttcacctgtctttgccagggtgtcacccaagtgccctgctgtgtcccacgggagggtgcagcccctgggggacgtgggccagcagctgccacgattgaaatccaagagagtagcaaactttttccagatcaaaatggatgtgcccacggggagcgggacctgcttgatggactcggaggatgctggaacaggagagtcgggtgaccgggccacagaaaaggaggtcatctgcccctgggagagcctgtaaggaaagaggcaggctgagttgggggctctggaccaggaagatgttctgacagatgccatggtatgggccacaggacacacttgctcgagaaccaaagtgcatttgggtgacatttgaagattggggagacaagatggggtagattgtggcaaagaatgctctggctggttaccaggggccaactccttctcctcttcctgaccctccctcccctgggcagaagaaacgcatgtggaccagaagactttccctgctgccttaaaaccaataaaaggttaaattgaaaaaaaaaaaaaaaaaaaaa

SEQ ID NO: 1520 - protein, 443 aa, Homo sapien
MYYQQALMRSTVKSSVSLGGIVKYSEQFSSNDAIMSGCLPSNPWITDDTQFWDLNAKLVEIPTKMRVERWAFNFSELIRDPKGRQSFQYFLKKEFSGENLGFWEACEDLKYGDQSKVKEKAEEIYKLFLAPGARRWINIDGKTMDITVKGLKHPHRYVLDAAQTHIYMLMKKDSYARYLKSPIYKDMQAKAIDPQETTKKSSTLPFMRRHLRSSPSPVILRQLEEEAKAREAANTVDITQPGQHMAPSPHLTVYTGTCMPPSPSSPFSSSCRSPRKPFASPSRFIRRPTICPSPILVVLDSSSGLEQKGECSWSGANPGPSVTDSSEASRDTSWTRSRPRAPLKARMALSFSRFLRRGCLASPVFARVSPKCPAVSHGRVQPLGDVGQQLPRLKSKRVANFFQIKMDVPTGSGTCLMDSEDAGTGESGDRATEKEVICPWESL

SEQ ID NO: 1521 - DNA, 4967 bp, Homo sapien
aaatgaagtcaaaatgccaataagaccagatctccagcagttggaaaaatgcattgatgatgctttaagaaaaaatgatttcaaacctttgaaaacacttttgcaaattgatatttgtgaagatgtgaagattaaatgcagcaaacagtttttccacaaggtggacaaccttatatgcagggaacttaataaagaggatatccacaatgtttcagccattttggtttctgttggaagatgtggcaaaaatatcagtgtattggggcaagctggacttctaacgatgataaaacaaggactaatacaaaagatggttgcctggtttgaaaaatccaaggacattattcagagtcaaggaaattcaaaagatgaagctgttctaaatatgatagaagacttagttgatcttctgctggtcatacatgatgtcagtgatgaaggtaaaaaacaagtagtggaaagtttcgtacctcgcatttgttccctggttattgactcaagagtgaatatttgtattcagcaagagattataaaaaaaatgaatgctatgcttgacaaaatgcctcaagatgcccggaaaatactctctaaccaagaaatgttaattctcatgagtagtatgggagaaaggattttagatgctggagattatgacttacaggtagccattgtagaagctttgtgtagaatgaccacagaaaaacaaagacaagaactggcacatcagtggttttcaatggattttattgctaaggcatttaaaagaattaaggactctgaatttgaaacagattgcaggatatttctcaaccttgtaaatggcatgcttggagacaaaagaagggtctttacatttccttgtttatcagcatttcttgataaatatgagctgcaaataccatcagatgaaaaacttgaggaattttggattgattttaatcttgggagtcagactctctcattctacattgctggagataatgatgatcatcaatgggaagcagttactgtgccagaggaaaaagtacaaatatacagcattgaagtgagagaatcaaagaagctactgacaataattctgaaaaatacagtaaaaattagcaaaagagaagggaaagaattgcttttgtattttgacgcatcactagaaatcactaatgtaactcaaaaaatttttggtgcaactaaacatagggaatctatcagaaaacaaggtatttcagttgccaaaacgtcgctgcatatactttttgacgcaagtggatcacagattctagtgccagaaagtcaaatctcaccagtcggagaagagctcgttagtttaaaggaaaaatcaaagtccccaaaggaatttgctaaaccttcaaaatatatcaaaaacagtgacaaagggaatagaaataatagtcagcttgagaaaactactcctagcaaaagaaaaatgtctgaagcatcaatgattgtttctggtgcagatagatacactatgagaagtccagtgcttttcagcaacacatcaataccaccacgaagaagaagaattaaaccaccactgcaaatgacgagctctgcagagaaacctagtgtttctcaaacatcagaaaatagagtggataatgctgcatcactgaaatctagatcatcagaaggaagacatagaagagataatatagacaaacatatcaaaactgctaagtgtgtagaaaacacagaaaataagaatgttgaattcccaaaccaaaattttagtgaactccaggatgttataccagattcacaggcagcggaaaaaagagatcatactatattacctggtgttttagacaacatctgtggaaataaaatacacagcaaatgggcatgttggacacctgtaacaaacattgaactatgtaataaccaaagagcaagtacttcgtcaggagacacattgaatcaagatattgttataaataaaaaacttactaaacaaaaatcatcctcttcaatatctgatcataattctgaaggaacaggaaaagtgaaatataagaaagaacaaaccgaccatatcaaaatagataaagcagaagtagaagtttgcaggaaacacaatcagcaacaaaatcatcctaaatattcagggcagaaaaatactgaaaatgccaagcagagtgattggcctgttgaatctgaaactacttttaaatcggttctcctaaataagacaattgaagaatcgctgatatataggaagaaatacatattgtcaaaagatgtgaatactgctacttgcgataaaaatccatctgctagcaaaaatgtgcaaagtcatagaaaagcagagaaagaattgacttctgagcttaattcctgggattcgaaacaaaaaaaaatgagagaaaagtcaaaagggaaagaatttaccaatgtagcagaatccttgataagccaaatcaataaaagatacaaaacaaaagatgacatcaagtctacaagaaaattaaaggagtctttgattaacagtggtttttcaaacaaacctgttgtacaactcagtaaggaaaaagttcagaaaaaaagctacagaaaactgaagactacctttgttaatgttacttctgaatgcccagtgaatgatgtttacaattttaatttgaatggagctgatgaccctatcataaaacttggaatccaagagtttcaagctacagctaaagaagcttgtgcggataggtcaattagattggtaggtccaaggaatcatgatgaacttaaatcttctgtcaaaacaaaagataaaaaaattataacaaatcatcaaaagaaaaatctgtttagtgatactgaaacagagtacagatgtgatgacagcaagactgatattagctggctaagagaaccgaaatcaaaaccacagctaatagactatagcagaaataaaaatgtgaagaatcataaaagtggaaaatcaagatcatccttggaaaagggacagccaagctctaaaatgacacccagtaaaaatatcacaaaaaagatggacaagacaattccggaaggaagaatcagacttccacgaaaagcaaccaaaacaaaaaaaaactataaagatctctcaaattcagaatcagagtgtgaacaagaattttcacattcatttaaagagaacataccagtaaaggaggagaatatccattccagaatgaaaacggtaaagctaccaaagaaacaacagaaagtcttctgtgctgaaacagaaaaggaactatcaaaacaatggaaaaactcatctctactaaaagatgctatacgagataattgccttgacttatctcccagatctttatctggcagtccatcatctatagaagtaacgagatgtatagagaaaataacagaaaaggattttactcaggattatgactgcataacaaaatctatatcaccttatccaaaaacttcatcacttgaatccttaaatagtaacagtggagttggaggtacaataaagtcacccaaaaacaatgagaaaaacttcctgtgtgcaagtgaaagttgttcaccaactccacgaccactgtttttggccagacatactccaactaagagtaatactattgtaaatagaaaaaaaataagttctctggtacttacacaagaaacacaaaacagtaacagctattcagatgtaagcagatatagttcagaagaacggtttatggaaattgaatctccacatatcaatgaaaattatatacaaagcaaaagagaggaaagtcatttagcatcttcattatccaagtctagtgaaggaagagagaaaacgtggtttgacatgccctgtgatgctactcatgtatcaggccccacccaacatcttagtcgcaaaagaatatatatagaagataatctaagtaattccaatgaagtagaaatggaagagaaaggagaaaggagagcaaacttgcttcccaaaaaactgtgtaaaattgaagatgcagatcatcatatccacaaaatgtctgaaagtgtatcttcattatcaacaaatgacttttctattccttgggagacctggcaaaatgaatttgcagggatagagatgacttatgagacttacgagaggctcaattcagaatttaagagaaggaataatatccgacataaaatgttgagttattttactacgcagtcttggaaaacagctcagcaacatctgagaacaatgaatcatcaaagtcaggactctaggattaaaaaacttgataaattccaattcattatcatagaggagctggagaattttgaaaaagattcacagtctttaaaagatttggaaaaggaatttgtggacttttgggaaaagatatttcagaagttcagtgcatatcaaaaaagcgaacaacagaggcttcatcttttgaaaacttcattggctaaaagtgtcttctgtaatactgatagtgaagaaactgtttttacatccgagatgtgtttgatgaaagaagatatgaaagtgctgcaagacaggcttcttaaggacatgctagaagaggagcttcttaatgtacgcagagaactgatgtcagtattcatgtctcatgaaagaaatgctaatgtgtgaaatctagtttttatcaccatactttatctaattattattctctgtatataactgaggaaataagaatagtcctacaaagagaaaaatatacatgtcaccgaagcaagtgtaccctttataggaaccctcaaattaaaaaaaaatgtcttttaatggatgagagggaaccactataacatgagtccaagcccagaagacttctgtctatacaatatttttttttaattttggagataaaagctttaagaaactttttgagttaattatactcataaaatgagtttctttaataaattaaattttattgtgtaaaatgtattattacataaaatgtgtttttgaatcaatgcagtttgggccg

SEQ ID NO: 1522 - protein, 1530 aa, Homo sapien
MPIRPDLQQLEKCIDDALRKNDFKPLKTLLQIDICEDVKIKCSKQFFHKVDNLICRELNKEDIHNVSAILVSVGRCGKNISVLGQAGLLTMIKQGLIQKMVAWFEKSKDIIQSQGNSKDEAVLNMIEDLVDLLLVIHDVSDEGKKQVVESFVPRICSLVIDSRVNICIQQEIIKKMNAMLDKMPQDARKILSNQEMLILMSSMGERILDAGDYDLQVAIVEALCRMTTEKQRQELAHQWFSMDFIAKAFKRIKDSEFETDCRIFLNLVNGMLGDKRRVFTFPCLSAFLDKYELQIPSDEKLEEFWIDFNLGSQTLSFYIAGDNDDHQWEAVTVPEEKVQIYSIEVRESKKLLTIILKNTVKISKREGKELLLYFDASLEITNVTQKIFGATKHRESIRKQGISVAKTSLHILFDASGSQILVPESQISPVGEELVSLKEKSKSPKEFAKPSKYIKNSDKGNRNNSQLEKTTPSKRKMSEASMIVSGADRYTMRSPVLFSNTSIPPRRRRIKPPLQMTSSAEKPSVSQTSENRVDNAASLKSRSSEGRHRRDNIDKHIKTAKCVENTENKNVEFPNQNFSELQDVIPDSQAAEKRDHTILPGVLDNICGNKIHSKWACWTPVTNIELCNNQRASTSSGDTLNQDIVINKKLTKQKSSSSISDHNSEGTGKVKYKKEQTDHIKIDKAEVEVCRKHNQQQNHPKYSGQKNTENAKQSDWPVESETTFKSVLLNKTIEESLIYRKKYILSKDVNTATCDKNPSASKNVQSHRKAEKELTSELNSWDSKQKKMREKSKGKEFTNVAESLISQINKRYKTKDDIKSTRKLKESLINSGFSNKPVVQLSKEKVQKKSYRKLKTTFVNVTSECPVNDVYNFNLNGADDPIIKLGIQEFQATAKEACADRSIRLVGPRNHDELKSSVKTKDKKIITNHQKKNLFSDTETEYRCDDSKTDISWLREPKSKPQLIDYSRNKNVKNHKSGKSRSSLEKGQPSSKMTPSKNITKKMDKTIPEGRIRLPRKATKTKKNYKDLSNSESECEQEFSHSFKENIPVKEENIHSRMKTVKLPKKQQKVFCAETEKELSKQWKNSSLLKDAIRDNCLDLSPRSLSGSPSSIEVTRCIEKITEKDFTQDYDCITKSISPYPKTSSLESLNSNSGVGGTIKSPKNNEKNFLCASESCSPTPRPLFLARHTPTKSNTIVNRKKISSLVLTQETQNSNSYSDVSRYSSEERFMEIESPHINENYIQSKREESHLASSLSKSSEGREKTWFDMPCDATHVSGPTQHLSRKRIYIEDNLSNSNEVEMEEKGERRANLLPKKLCKIEDADHHIHKMSESVSSLSTNDFSIPWETWQNEFAGIEMTYETYERLNSEFKRRNNIRHKMLSYFTTQSWKTAQQHLRTMNHQSQDSRIKKLDKFQFIIIEELENFEKDSQSLKDLEKEFVDFWEKIFQKFSAYQKSEQQRLHLLKTSLAKSVFCNTDSEETVFTSEMCLMKEDMKVLQDRLLKDMLEEELLNVRRELMSVFMSHERNANV

SEQ ID NO: 1523 - DNA, 1327 bp, Homo sapien
ggtcgacgacgtggcagccgggatgcactaggcaaagccagctgggctcctgagtccggtgggtacttggagaacttactacgtctagctggaggattgtaaatgtaccaatcagcatgctgtgtctagctcaagaactcaagctccatgaggagatgtttcattgtcgagagcagtcatgatggcctgcactccacacaatgcaacagagtgaaagagcaggttctgcttctttggtgtagtcctgaagcttcctaagaaacttcacatcaggtgatggataggagcaaccctgtaaaaccagccttagactattttttaaacaggctggtgaattaccagatctccgtcaagtgcagtaaccagttcaagttggaagtgtgtcttttgaatgcagaaaacaaagtcgtggacaaccaggctgggacccagggccagctgaaggtgctgggtgccaacctctggtggccgtacctgatgcacgaacaccccgcctacctctactcgtgggaggatggtgattgctcacaccaaagccttggacccctcccagcctgtgacctttgtgaccaactccacctacgcagcagacaagggggctctgtatgtggatgtgatccgtgtgaacagctactactcttggtatcgcaactacgggcacctggagttgattcagctgcagctggccgcccagtttgagaattggtgtaagacatcacaatcccattattcagagcgcgtatggagtggaaacgcttgtagggtttcaccagtctttcccagggaactccgatgaagtgttccaacaaaatgagcgagtgaaccaagaagaggatgacattagatccaggagatacaacagaggagataatctccaggatgcctgtgaagaaagatccctggatcccaggatgattataggacaagttgttcataatccagcaggccagaagacttccagggaaactcattcaaggaggtgaaaatgatggatgactcctccaagatgaaaatggaccagccgcagtgctcacgcctgtaataccagcactttgggaggctgaggcaggcggatcacttgaggtcaggagtttgaaactagcctggccaacgtggcaaaactccatctctattaaaaatacaaaaattagccaggcatagtggtgcatgcctgtagtcccagctacttgggatgccgaggcaggaagaattgcttgaacctgggaggcagagtctgcagtgagccgagatcatgccactgcactccagcctgggtgacagagccactccgtctcaaaaaaaaaaaaaaaaaaaaaaaaaaaaaaaa

SEQ ID NO: 1524 - protein, 140 aa, Homo sapien [sequence omitted]

SEQ ID NO: 1525 - DNA, 624 bp, Homo sapien
ggcgggccgctcccacttcggcacgaggggcacgaggtaaatcttttctgcttactgaaaaggaagagtctgatgattagttactgatcctctttgcatttgtaaagctttggagatattgaatcatgttaccatttctgtttttttccaccctgttttcttccatatttactgaagctcagaagcagtattgggtctgcaactcatccgatgcaagtatttcatacacctactgtgataaaatgcaatacccaatttcaattaatgttaacccctgtatagaattgaaaggatccaaaggattattgcacattttctacattccaaggagagatttaaagcaattatatttcaatctctatataactgtcaacaccatgaatcttccaaagcgcaaagaagttatttgccgaggatctgatgacgattactctttttgcagagctctgaagggagagactgtgaatacaacaatatcattctccttcaagggaataaaattttctaagggaaaatacaaatgtgttgttgaagctatttctgggagcccagaagaaatgctcttttgcttggagtttgtcatcctacaccaacctaattcaaattagaataaattgagtattt

SEQ ID NO: 1526 - protein, 160 aa, Homo sapien
MLPFLFFSTLFSSIFTEAQKQYWVCNSSDASISYTYCDKMQYPISINVNPCIELKGSKGLLHIFYIPRRDLKQLYFNLYITVNTMNLPKRKEVICRGSDDDYSFCRALKGETVNTTISFSFKGIKFSKGKYKCVVEAISGSPEEMLFCLEFVILHQPNSN

SEQ ID NO: 1527 - DNA, 2809 bp, Homo sapien
agattcgcggccgcgtcgacggtgcgcccaccggtcccgccgggcgcccgcgggacgcgccgccagggccctctccgccgggggctcggcgctcgcccacctcttccaaatttaaccattacctaaatccgaagggaaatgagcaaacctctcggattgggtgtcaaggtctcctccgggctggggctgagcaagccctcggagtgaccgtgggtgacagcggctccagggactcttggggcgcagtggggaaagtgccggaccaccatgccgcgctcatttctcgtcaaaagcaagaaggctcacagctaccaccagccgcgctccccaggaccagactattccctccgtttagagaatgtaccggcgcctagccgagcagacagcacttcaaatgcaggcggggcgaaagcggagccccgggaccgtttgtcccccgaatcgcagctgaccgaagccccagacagagcctccgcatcccccagacagctgcgaagcagcgtctgcgaacggagctcggagtttgaggacttctggaggcccccgtcaccctccgcgtctccagcctcggagaagtcaatgtgcccatcgctggacgaagcccagcccttccccctgcctttcaaaccgtactcatggagcggcctggcgggttctgacctgcggcacctggtgcagagctaccgaccgtgtggggccctggagcgtggcgctggcctgggcctcttctgtgaacccgccccggagcctggccacccggccgcgctgtacggcccgaagcgggctgccggcggcgcgggggccggggcgccagggaactgcatcgcaggggccggtgccaccgctggccctggcctagggctctacggcgacttcgggtctgcggcagccgggctgtatgaaaagcccacggcagcggcgggcttgctgtaccccgagcgtggccaccggctgcacgcaaacaaaggcgctggcgtcaaggtggagtcggagctgctgtgcacccgcctgctgctgggcggcggctcctacaagtgcatcaagtgcagcaaggtgttttccacgccgcacgggctcgaggtgcacgtgcgcaggtcccacagcggtaccagaccctttgcctgcgagatgtgcggcaagaccttcgggcacgcggtgagcctggagcagcacaaagccgtgcactcgcaggaacggagctttgactgtaagatctgtgggaagagcttcaagaggtcatccacactgtccacacacctgcttatccactcagacactcggccctacccctgtcagtactgtggcaagaggttccaccagaagtcagacatgaagaaacacactttcatccacactggtgagaagcttcacaagtgccaggtgtgcggcaaggcattcagccagagctccaacctcatcacccacagccgcaaacacacaggcttcaagcccttcggctgcgacctctgtgggaagggtttccagaggaaggtggacctccgaaggcaccgggagacgcagcatgggctcaaatgagcaccctggctggctgcaagcagcagctacacaacactacagagggcagcctccctgcttgccaccactctgctccctgcttgcctccactcccttctgactttccagaccccaggtccagtctgcagatcctaccaggttgctcctccttcgccttacctcctggagctgccagaagaaatgaggtaccttttcaaagtgcagccgagagtgagaaccaagtgactccctaggcttcggacacaaataggctcctctacacctgaagacaaaggcaaagtcaaatggggaccagaataaatcttagaccccacagtccttcccatttccagccttaatctacagacaggaatgcccttcaggtttcttccttcccccttcttgacctaccccagatatttgtgtggaagaggaggaatcaccatttacaaggtggacaaatgctaatatttttatctagaaagaagagtgagtgttaacttttatttttttccttctggggggtctgttgactcctttcttttgggtgctgcctataaatcttggaggaatcatttctcctcctcaaaaactgattcagaaactgacttggggaaggaatttaatactttgaagtcatgagatgcaccatcgaggctacccccaagaagaagcagaagagaagttggtaatgagaggggattagaggtcctcccttcagtagggctgtgaaaacctcatcactggaggtaaaagcacaagcaatgcctgtggacaagatgtcattcattcactcagcaaatgttcatggatcaccggctaccaagtaccaggcaccatgttaggtattggggaagagagactgaagtcacaacccctgactgctcctcaaaagctaacggttgcacctccaagtggctgggtctgttcttactcttggagggaattctgagaagacagcacagaattgtaaaccttcccttttgacccttttggattttatcaggtgtaaacaaaaagctgaacagttacttcaaagatatgtgtgtatattcagttttttattgttaagctgatattttaaagatttctgagctagcaggcatgtgggaaggaaggctctgtcttcaactctttgaccctccatgtgtaccatagaggggggaaaggtggtattttcactttgatgaggttggtaaatgtttttagatcttctggtaagcattatgtttgttaatacatatttattagagtgatgttttaagttaataaagtattaagagtaaaaaaaaaa

SEQ ID NO: 1528 - protein, 422 aa, Homo sapien
MPRSFLVKSKKAHSYHQPRSPGPDYSLRLENVPAPSRADSTSNAGGAKAEPRDRLSPESQLTEAPDRASASPRQLRSSVCERSSEFEDFWRPPSPSASPASEKSMCPSLDEAQPFPLPFKPYSWSGLAGSDLRHLVQSYRPCGALERGAGLGLFCEPAPEPGHPAALYGPKRAAGGAGAGAPGNCIAGAGATAGPGLGLYGDFGSAAAGLYEKPTAAAGLLYPERGHRLHANKGAGVKVESELLCTRLLLGGGSYKCIKCSKVFSTPHGLEVHVRRSHSGTRPFACEMCGKTFGHAVSLEQHKAVHSQERSFDCKICGKSFKRSSTLSTHLLIHSDTRPYPCQYCGKRFHQKSDMKKHTFIHTGEKLHKCQVCGKAFSQSSNLITHSRKHTGFKPFGCDLCGKGFQRKVDLRRHRETQHGLK

SEQ ID NO: 1529 - DNA, 3522 bp, Homo sapien
gccatttgaagcagaatccaaaccatgaattgtagagaattacccttgaccctttgggtgcttatatctgtaagcactgcagaatcttgtacttcacgtccccacattactgtggttgaaggggaacctttctatctgaaacattgctcgtgttcacttgcacatgagattgaaacaaccaccaaaagctggtacaaaagcagtggatcacaggaacatgtggagctgaacccaaggagttcctcgagaattgctttgcatgattgtgttttggagttttggccagttgagttgaatgacacaggatcttactttttccaaatgaaaaattatactcagaaatggaaattaaatgtcatcagaagaaataaacacagctgtttcactgaaagacaagtaactagtaaaattgtggaagttaaaaaattttttcagataacctgtgaaaacagttactatcaaacactggtcaacagcacatcattgtataagaactgtaaaaagctactactggagaacaataaaaacccaacgataaagaagaacgccgagtttgaagatcaggggtattactcctgcgtgcatttccttcatcataatggaaaactatttaatatcaccaaaaccttcaatataacaatagtggaagatcgcagtaatatagttccggttcttcttggaccaaagcttaaccatgttgcagtggaattaggaaaaaacgtaaggctcaactgctctgctttgctgaatgaagaggatgtaatttattggatgttcggggaagaaaatggatcggatcctaatatacatgaagagaaagaaatgagaattatgactccagaaggcaaatggcatgcttcaaaagtattgagaattgaaaatattggtgaaagcaatctaaatgttttatataattgcactgtggccagcacgggaggcacagacaccaaaagcttcatcttggtgagaaaagcagacatggctgatatcccaggccacgtcttcacaagaggaatgatcatagctgttttgatcttggtggcagtagtgtgcctagtgactgtgtgtgtcatttatagagttgacttggttctattttatagacatttaacgagaagagatgaaacattaacagatggaaaaacatatgatgcttttgtgtcttacctaaaagaatgccgacctgaaaatggagaggagcacacctttgctgtggagattttgcccagggtgttggagaaacattttgggtataagttatgcatatttgaaagggatgtagtgcctggaggagctgttgttgatgaaatccactcactgatagagaaaagccgaagactaatcattgtcctaagtaaaagttatatgtctaatgaggtcaggtatgaacttgaaagtggactccatgaagcattggtggaaagaaaaattaaaataatcttaattgaatttacacctgttactgacttcacattcttgccccaatcactaaagcttttgaaatctcacagagttctgaagtggaaggccgataaatctctttcttataactcaaggttctggaagaaccttctttacttaatgcctgcaaaaacagtcaagccaggtagagacgaaccggaagtcttgcctgttctttccgagtcttaatcttcagaaacagtgaacgccaaaaagaactcaagatattctggggactgagcatatgaacctgttcataacaaaggctgtgactcgaaataattaactttgtcaaaatcctgctcacaatttgaagatgaaacttgtcattaggttggcgggaatgagactaaagattgcgctgtgggctgtggtcacgtgctcccagaagacctggaattcaaaagaaatggagctattctttttctccctctttcataactggatgcagctgctcatactcaatcccatattcagcaagtgtgaagctggacgtgatgcaaaataaccgatgccctacaaaaagggcgcatctttaagagttttaatgccagtgcttaattcgaatgaggggattttaagtgtctgaagaggcattttctagggaccagtgggtgactgagtaactgaaatgctgctttcactccctaacaccatggatctggttgtgcataggatgtgggaggaggggctggcagggccgccttcagaggctgcagggcctcagcctcaggatgcatttaatgtatcctggccacagttgcagccaacggttcttgaaagctcggtaaggccctgcaacgcagagcctgcttatgtggatctatttatgggaacttcttaaaaggaccccagaatagctctttatctttcacaagagacacaaattctaattgagttaattatctgggcctttcactttggatgctctgaaacatttgttgattttgtgtgaatgtttatatcaaaatgtttgccaggttgtattagccattgaatagcaaaaaactgatagttacttgcttgttttttaaaaattacatattaaaaatgcccttggcataaggcagcatggtgtggcagttaagagatgggctgtgcagcccatcctgagctccagtcctgagtttgctacttacttctgtggcctctggaaccttatccaacctcttggtgcttcagtttcctcatctgtgaaattagaatttataataattgcacctacctcccaggggtaactaaatgaataaatataataaagtacttacagtggttcctgacacagactcagcactccgtcagtgttgccatgactatttttattatcattattaatgattacttagatcaattatttagcagtggactaatggaagctacagagcagggaagggaagcagatctagggaggaaggcagttttgatttgaggaggtttgcacatgtagagaagcatactggagaagcatatccagagggcgaaagatatctctccattgtgcatctgcctcttttgacgttggaagacacatgtcttactccccaaagggagcccagcactgggagccttcttgatgatctcaaaaataatagctattcaagaaaatcaccaagtgactgtgaaaccgtcagttcggaaggctggttagaacatgtgggagcaacatgaatgttctacaaaagtttaaagcagagattgtttcaaatgggtgtagtagatattactgaaaaccaaaaaagagtgagattgtcagtgtaagaatgtgatttaatgtttgtagtgcttacaattttgtgtaccaactggatgactaaaaagagtaaaataatttaattaatagctcatattttatgtgtgaaaacatgttagtgaacatatataatcaaaatagatttcattgctattgcatagtctctaatacatagaatgattttgcttttctcttttattatacttgctttaaaatacttgaaatatattttgcattaaatgcatttcaagttaaatgtcttaaatgtatacattagatgtgtgttttaaaatgcataaaacacgttgaaa

SEQ ID NO: 1530 - protein, 541 aa, Homo sapien
MNCRELPLTLWVLISVSTAESCTSRPHITVVEGEPFYLKHCSCSLAHEIETTTKSWYKSSGSQEHVELNPRSSSRIALHDCVLEFWPVELNDTGSYFFQMKNYTQKWKLNVIRRNKHSCFTERQVTSKIVEVKKFFQITCENSYYQTLVNSTSLYKNCKKLLLENNKNPTIKKNAEFEDQGYYSCVHFLHHNGKLFNITKTFNITIVEDRSNIVPVLLGPKLNHVAVELGKNVRLNCSALLNEEDVIYWMFGEENGSDPNIHEEKEMRIMTPEGKWHASKVLRIENIGESNLNVLYNCTVASTGGTDTKSFILVRKADMADIPGHVFTRGMIIAVLILVAVVCLVTVCVIYRVDLVLFYRHLTRRDETLTDGKTYDAFVSYLKECRPENGEEHTFAVEILPRVLEKHFGYKLCIFERDVVPGGAVVDEIHSLIEKSRRLIIVLSKSYMSNEVRYELESGLHEALVERKIKIILIEFTPVTDFTFLPQSLKLLKSHRVLKWKADKSLSYNSRFWKNLLYLMPAKTVKPGRDEPEVLPVLSES

SEQ ID NO: 1531 - DNA, 9372 bp, Homo sapien
tgaataattgaactttgtttatttctccatatttttgcagtggtaattccattataaaacctaatgaaacaatgtttttatagatggtgtggaaagacttttctgggctcagaggtgaaactgacccttgtgtatcagcagcatttctgactgactgagagagtgtagtgattaacagagttgtgatgttagttaagaaacttagatttgccattgtagcttttctaccaattagcagattgtttaactcactgaaattgtaaagtggtagacgtggacttagtcattactgggcagcttatgaattgtattcatttactcatgatgtaaaaatggttagtctccacttttaaggctctagttctagtggctaaataggtacttatttatacagtatgataactgctgtattaaaatacatgtctcaaatgtggaatagtagaagaggtgaagaaaatcatagtttgaggtagaatactgtttgctggtcttaaaaactgtggtattttggtgattccataaattaggtcagatacttccactggagggaaacagtttaaaggatatatgtgatactattaatagaatgaggaagacacaccagatatttaggagggaattagcgagcttgaaactaagagctggtttgaatgagactgggtcataagtgatttcaagtaccagattaaggcactgagattttatttttaagcactgaagtcagattttttccttttaaaagaaaggattcatgatgaaatctgctttttgttttgcagagagcttggagataattctggtggctgtgtggagtatgtgttggaggtattaaattttcacagtatatataaggcagcaattgataggcctttcacagattcttctgataactacataaagagacaaaaaaaagaaaaaagagcaaagatctgtgctgtgtcaagtatgacagccatcactcatggctctccagtaggagggaacgacagccagggccaggttcttgatggccagtctcagcatctcttccaacagaaccagacttcatcacctgattcttccaatgagaattccgtagcaactcctcctccagaggaacaagggcaaggtgatgccccaccacagcatgaagatgaagagcctgcatttccacatactgagctggcaaacctggatgacatgatcaacaggcctcgatgggtggttcctgttttgccaaaaggggaattagaagtgcttttagaagctgctattgatcttagtgtaaaaggccttgatgttaaaagtgaagcatgccaacgtttttttcgagatggactaacaatatctttcactaaaattcttatggatgaggctgtgagtggctggaagtttgaaattcatagatgtattattaacaatactcatcgcctagtggagctttgtgtggccaagttgtcccaagattggtttccacttctagaacttctcgccatggccttaaatcctcactgcaagtttcatatctacaatggtacacgtccgtgtgaattaatttcctcaaatgctcagttgcctgaagaagaattatttgctcgttcttcagatcctcgatcaccaaaaggttggctagtggatctcatcaataaatttggcacattaaatgggttccagattttgcatgatcgtttttttaatggatcagcattaaatattcaaataattgcagctcttattaaaccatttggacaatgctatgagtttctcagtcaacatacactgaaaaagtacttcattccagttatagaaatagttccacatttattggaaaacttaactgatgaagaactgaaaaaggaggcaaagaatgaagccaaaaatgatgccctttcaatgattattaaatctttgaagaacttagcttcaagaatttcaggacaagatgagactataaaaaatttggaaatttttaggttaaagatgatactcagattgttgcaaatttcctcttttaatggaaagatgaatgcactgaatgaaataaataaggttatatctagtgtatcatattatactcatcggcatagtaatcctgaggaggaagaatggctgacagctgagcgaatggcagaatggatacagcaaaataatatcttatccatagtcttgcaagacagtcttcatcaaccacaatatgtagaaaagctagagaaaattcttcgttttgtgattaaagaaaaggctcttacattacaggaccttgataatatctgggcagcacaggcaggaaaacatgaagccattgtgaagaatgtacatgatctgctagcaaagttggcttgggatttttctcctggacaacttgatcatctttttgattgctttaaggcaagttggacaaatgcaagtaaaaagcaacgtgaaaagctccttgagttgatacgccgtcttgcagaagatgataaagatggtgtgatggcacacaaagtgttgaaccttctttggaacctggctcagagtgatgatgtgcctgtagacatcatggaccttgctcttagtgcccacataaaaatactagattatagttgttcccaggatcgagatgcacagaagatccagtggatagatcactttatagaagaacttcgcacaaatgacaagtgggtaattcctgctctgaaacaaataagagaaatttgtagtttgtttggtgaagcatctcaaaatttgagtcaaactcagcgaagtccccacatattttatcgccatgatttaatcaaccagcttcaacaaaatcatgctttagttactttggtagcagaaaaccttgcaacctacatgaatagcatcagattgtatgctggagatcatgaagactatgatccacaaacagtgaggcttggaagtcgatacagtcatgttcaagaagttcaagaacgactaaacttccttagatttttactgaaggatggccaactgtggctctgtgctcctcaggcaaaacaaatatggaagtgcttagcagaaaatgcagtttatctttgtgatcgtgaagcctgttttaagtggtattccaagttaatgggggatgaaccagacttggatcctgatattaataaggacttctttgaaagtaatgtacttcagcttgatccttcccttttaactgaaaatggaatgaaatgctttgaaagatttttcaaagctgtcaattgtcgagaaaggaaactaatagcaaaaagaagatcctatatgatggatgatttggaattaattggactagactacctttggagggttgtgattcagagtagtgacgagattgctaacagagctatagatcttcttaaagagatatacacaaaccttggcccaagattaaaagccaatcaggtggttatccatgaagacttcattcagtcttgctttgatcgtttaaaagcatcatatgatacactgtgtgtttttgatggtgacaaaaacagcattaattgtgcaagacaagaagccattcgaatggttagagtattaactgttataaaagagtacattaatgaatgtgacagtgattatcacaaggaaagaatgattttacctatgtcgagagcattttgtggcaaacacctctctcttatagttcggtttccaaaccagggcagacaggttgatgagttggatatatggtttcatacgaatgacacaattggttcagtacggcgatgtattgttaatcgtattaaagccaatgtagcccacaaaaaaattgaactttttgtgggtggtgagctgatagattctgaaaatgacagaaagctaattggacaattaaacttaaaagataaatctctaattacagccaaacttacacaaataaatttcaatatgccatcaagtcctgatagctcttccgattcctcaactgcatctcctggaaaccaccgtaatcattacaatgatggtcccaatctaaaggtggaaagttgtttgcctggggtgataatgtcagtgcatcccaaatacatctctttcctttggcaatttgcaaacttaggtagcaacctgaatatgccacctcttaaaaatggagcaagagtacttatgaaacttatgccaccagatagaacagctgtagaaaaattacgaactgtttgtttggaccatgcaaaccttggagaaggcaaacttagtccaccccttgactcccttttctttggtccttctgcctcccaagttctatacctaacagaggtagtttatgccttgttaatgcctgctggtgtgcctctaactgatgggtcctctgactttcaagttcacttcttgaaaagtggtggcttacctcttgtactgagtatgctaataagaaataacttcttgccaaatacagatatggaaactcgaaggggtgcttatttaaatgctcttaaaatagccaaactgttgttaactgcgattggctatggccatgttcgagctgtagcagaagcttgtcagccagttgtagatggtacagaccccataacacagattaaccaagttactcatgatcaagcagtggtgctacaaagtgcccttcagagcattcctaatccctcatccgagtgcgtacttagaaatgagtccatacttcttgctcaggaaatatctaatgaggcttcaagatatatgcctgatatttgtgtaattagggctatacagaaaattatctgggcatcagcatgtggggcattaggactattttttagcccaaatgaagaaataactaaaatttatcagatgaccaccaatggaagcaataagctggaggtggaagatgaacaagtttgttgtgaagcactggaagtgatgaccttatgttttgctttacttccaacagcgttggatgcacttagtaaagaaaaagcctggcagaccttcatcattgacttattattgcactgtccaagcaaaactgttcgtcagttggcacaggagcagttctttttaatgtgcaccagatgttgcatgggacacaggcctctgcttttcttcattactttactctttaccatactggggagcacagcaagagagaagggtaaatattcaggtgattatttcacacttttacggcaccttctcaattatgcttacaatggcaatattaacatacccaatgctgaagttcttcttgtcagtgaaattgattggctcaaaaggattagggataatgttaaaaacacaggtgaaacaggtgtcgaagagccaatactggaaggccaccttggggtaacaaaagagttattggcctttcaaacttctgagaaaaagtatcactttggttgtgaaaaaggaggtgctaatctcattaaagaattaattgatgatttcatctttcccgcatccaaagtttacctgcagtatttaagaagtggagaactaccagctgagcaggctattccagtctgtagttcacccgttaccatcaatgccggttttgagctacttgtagcattagctattggctgtgtgaggaatctcaaacagatagtagactgtttgactgaaatgtattacatgggcacagcaattactacttgtgaagcacttactgagtgggaatatctgccccctgttggaccccgcccaccaaaaggatttgtgggactcaaaaatgctggtgctacgtgttacatgaactctgtgatccagcagctatacatgattccttctatcaggaacagtattcttgcaattgaaggcacaggtagtgatttacacgatgatatgttcggggatgagaagcaggacagtgagagtaatgttgatccccgagatgatgtatttggatatcctcatcaatttgaagacaagccagcattaagtaagacagaagataggaaagagtataatattggtgtcctaagacaccttcaggtcatctttggtcatttagctgcttcccaactacaatactatgtacccagaggattttggaaacagttcaggctttggggtgaacctgttaatctccgtgaacaacatgatgccttagagttttttaattctttggtggatagtttagatgaagctttaaaagctttaggacacccggctatactaagtaaagtcctaggaggctcctttgctgatcagaagatctgccagggctgcccacataggtttgaatgtgaagaatcttttacaactttgaatgtggatattagaaatcatcaaaatcttcttgactctttggaacagtatatcaaaggagatttattggaaggtgcaaatgcatatcattgtgaaaaatgtgataaaaaggttgacacagtaaagcgcctgctaattaaaaaattgcctcgggttcttgctatccaactcaaacgatttgactatgactgggaaagagaatgtgcaattaaattcaatgattattttgaatttcctcgagagctggatatgggaccttacacagtagcaggtgttgcaaacctggaaagggataatgtaaactcagaaaatgagttgattgaacagaaagagcagtctgacaatgaaactgcaggaggcacaaagtacagacttgtaggagtgcttgtacacagtggtcaagcaagcggtgggcattattattcttacatcattcaaaggaatggtaaagatgatcagacagatcactggtataaatttgatgatggagatgtaacagaatgcaaaatggatgatgatgaagaaatgaaaaatcagtgttttggtggagagtacatgggagaagtatttgatcacatgatgaagcgcatgtcatataggcgacagaagaggtggtggaatgcttacatacctttttatgaacaaatggatatgatagatgaagatgatgagatgataagatacatatcagagctaactattgcaagaccccatcagatcattatgtcaccagccattgagagaagtgtacggaaacaaaatgtgaaatttatgcataaccgattgcaatatagtttagagtattttcagtttgtgaaaaaactgcttacatgtaatggtgtttatttaaaccctgctccagggcaggattatttgttgcctgaagcagaagaaattactatgattagtattcagcttgctgctagattcctctttaccactggatttcacaccaagaaaatagttcgtggtcctgccagtgactggtatgatgcactgtgcgttcttctccgtcacagcaaaaatgtacgtttttggtttactcataatgtcctttttaatgtatcaaatcgcttctctgaatacctcctggagtgccctagtgcagaagtgaggggtgcatttgcaaaacttatagtgtttattgcacacttttccttgcaagatgggtcttgtccttctccttttgcatctccaggaccttctagtcaggcatgtgataacttgagcttgagtgaccacttactaagagccacactaaatctcttgagaagggaagtttcagagcatggacatcatttacagcaatattttaatttgtttgtaatgtatgccaatttaggtgtggcagaaaaaacacagcttctgaaattgaatgtacctgctacctttatgcttgtgtctttagacgagggaccaggtcctccaatcaaatatcagtatgctgaattaggcaagttatattcagtagtgtctcagctgattcgttgttgcaatgtgtcatcaacaatgcagtcttcaatcaatggtaatccccctctccccaatcctttcggtgaccttaatttatcacagcctataatgccaattcagcagaatgtgttagacattttatttgtgagaacaagttatgtgaagaaaattattgaagactgcagtaactcagaggataccatcaaattacttcgcttttgctcttgggagaatcctcagttctcatctactgtcctcagcgaacttctctggcaggttgcatattcatatacctatgaacttcggccatatttagatctacttttccaaattttactgattgaggactcctggcagactcacagaattcataatgcacttaaaggaattccagatgacagagatgggctgttcgatacaatacagcgctcgaagaatcactatcaaaaacgagcatatcagtgcataaaatgtatggtagctctatttagcagttgtcctgttgcttaccagatcttacagggtaacggagatcttaaaagaaaatggacctgggcagtggaatggctaggagatgaacttgaaagaagaccatatactggcaatcctcagtatagttacaacaattggtctcctccagtacaaagcaatgaaacagcaaatggttatttcttagaaagatcacatagtgctaggatgacacttgcaaaagcttgtgaactctgtccagaagaggagccagatgaccaggatgccccagatgagcatgagccctctccatcagaagatgccccattatatcctcattcacctgcctctcagtatcaacagaataatcatgtacatggacagccatatacaggaccagcagcacatcacttgaacaaccctcagaaaacaggccaacgaacacaagaaaattatgaaggcaatgaagaagtatcctcacctcagatgaaggatcagtgaaaagcaataattaactgcttcctttatgactatgcactaaggtcttatagtccaaactttctctgtgtctggctagtattgaaaactagataaactgctccaaaccaacatggagtaaagagcatattcactggtttatttgcagtaatttgcaatttgtcagtgtataagacacatgcagggtgaagtgtacagagttttgtaacaaatgactggtcctaatctgtaaatgagaaaggtatatatactatgttaatgtctgactgttaattcttaagcaagaaactttttttgatgaaaacaagtcagatctacacagtcacacaattattttttgttgtgttcactacattgtgcaattgatattgcctgctttgagcagtttggtcaacttaccaacttccccccaaaaaagggaacataaaagagcccatctttgtcagtttacaccaatagtttcttgttaatccttctttcctggatatataaggctggtggtaacttttgaattatatggttgatgtggaaaattggcagtgtaacatttctagatacttttcattacctttttattctggtatataggctaaccactttaaagctattcttatgctgtaacagttagcatggcttcacactgtttgtgtagccaagaggacagaattacatgaatgacagtgcccagagtgacagctgtatattgctcagagcttttatttcttatacctagaataaatataaaatgggggaaaaaaaaaa

SEQ ID NO: 1532 - protein, 2000 aa, Homo sapien
MTAITHGSPVGGNDSQGQVLDGQSQHLFQQNQTSSPDSSNENSVATPPPEEQGQGDAPPQHEDEEPAFPHTELANLDDMINRPRWVVPVLPKGELEVLLEAAIDLSVKGLDVKSEACQRFFRDGLTISFTKILMDEAVSGWKFEIHRCIINNTHRLVELCVAKLSQDWFPLLELLAMALNPHCKFHIYNGTRPCELISSNAQLPEEELFARSSDPRSPKGWLVDLINKFGTLNGFQILHDRFFNGSALNIQIIAALIKPFGQCYEFLSQHTLKKYFIPVIEIVPHLLENLTDEELKKEAKNEAKNDALSMIIKSLKNLASRISGQDETIKNLEIFRLKMILRLLQISSFNGKMNALNEINKVISSVSYYTHRHSNPEEEEWLTAERMAEWIQQNNILSIVLQDSLHQPQYVEKLEKILRFVIKEKALTLQDLDNIWAAQAGKHEAIVKNVHDLLAKLAWDFSPGQLDHLFDCFKASWTNASKKQREKLLELIRRLAEDDKDGVMAHKVLNLLWNLAQSDDVPVDIMDLALSAHIKILDYSCSQDRDAQKIQWIDHFIEELRTNDKWVIPALKQIREICSLFGEASQNLSQTQRSPHIFYRHDLINQLQQNHALVTLVAENLATYMNSIRLYAGDHEDYDPQTVRLGSRYSHVQEVQERLNFLRFLLKDGQLWLCAPQAKQIWKCLAENAVYLCDREACFKWYSKLMGDEPDLDPDINKDFFESNVLQLDPSLLTENGMKCFERFFKAVNCRERKLIAKRRSYMMDDLELIGLDYLWRVVIQSSDEIANRAIDLLKEIYTNLGPRLKANQVVIHEDFIQSCFDRLKASYDTLCVFDGDKNSINCARQEAIRMVRVLTVIKEYINECDSDYHKERMILPMSRAFCGKHLSLIVRFPNQGRQVDELDIWFHTNDTIGSVRRCIVNRIKANVAHKKIELFVGGELIDSENDRKLIGQLNLKDKSLITAKLTQINFNMPSSPDSSSDSSTASPGNHRNHYNDGPNLKVESCLPGVIMSVHPKYISFLWQFANLGSNLNMPPLKNGARVLMKLMPPDRTAVEKLRTVCLDHANLGEGKLSPPLDSLFFGPSASQVLYLTEVVYALLMPAGVPLTDGSSDFQVHFLKSGGLPLVLSMLIRNNFLPNTDMETRRGAYLNALKIAKLLLTAIGYGHVRAVAEACQPVVDGTDPITQINQVTHDQAVVLQSALQSIPNPSSECVLRNESILLAQEISNEASRYMPDICVIRAIQKIIWASACGALGLFFSPNEEITKIYQMTTNGSNKLEVEDEQVCCEALEVMTLCFALLPTALDALSKEKAWQTFIIDLLLHCPSKTVRQLAQEQFFLMCTRCCMGHRPLLFFITLLFTILGSTAREKGKYSGDYFTLLRHLLNYAYNGNINIPNAEVLLVSEIDWLKRIRDNVKNTGETGVEEPILEGHLGVTKELLAFQTSEKKYHFGCEKGGANLIKELIDDFIFPASKVYLQYLRSGELPAEQAIPVCSSPVTINAGFELLVALAIGCVRNLKQIVDCLTEMYYMGTAITTCEALTEWEYLPPVGPRPPKGFVGLKNAGATCYMNSVIQQLYMIPSIRNSILAIEGTGSDLHDDMFGDEKQDSESNVDPRDDVFGYPHQFEDKPALSKTEDRKEYNIGVLRHLQVIFGHLAASQLQYYVPRGFWKQFRLWGEPVNLREQHDALEFFNSLVDSLDEALKALGHPAILSKVLGGSFADQKICQGCPHRFECEESFTTLNVDIRNHQNLLDSLEQYIKGDLLEGANAYHCEKCDKKVDTVKRLLIKKLPRVLAIQLKRFDYDWERECAIKFNDYFEFPRELDMGPYTVAGVANLERDNVNSENELIEQKEQSDNETAGGTKYRLVGVLVHSGQASGGHYYSYIIQRNGKDDQTDHWYKFDDGDVTECKMDDDEEMKNQCFGGEYMGEVFDHMMKRMSYRRQKRWWNAYIPFYEQMDMIDEDDEMIRYISELTIARPHQIIMSPAIERSVRKQNVKFM

SEQ ID NO: 1533 - DNA, 2372 bp, Homo sapien
gggccgccgtcggcgcgctgggtgcgggaagggggctctggatttcggtccctcccctttttcctctgagtctcggaacgctccagctctcagaccctcttcctcccaggtaaaggccgggagaggagggcgcatctcttttccaggcaccccaccatgggcaatgcctccaatgactcccagtctgaggactgcgagacgcgacagtggcttcccccaggcgaaagcccagccatcagctccgtcatgttctcggccggggtgctggggaacctcatagcactggcgctgctggcgcgccgctggcggggggacgtggggtgcagcgccggccgcaggagctccctctccttgttccacgtgctggtgaccgagctggtgttcaccgacctgctcgggacctgcctcatcagcccagtggtactggcttcgtacgcgcggaaccagaccctggtggcactggcgcccgagagccgcgcgtgcacctacttcgctttcgccatgaccttcttcagcctggccacgatgctcatgctcttcgccatggccctggagcgctacctctcgatcgggcacccctacttctaccagcgccgcgtctcggcctccgggggcctggccgtgctgcctgtcatctatgcagtctccctgctcttctgctcgctgccgctgctggactatgggcagtacgtccagtactgccccgggacctggtgcttcatccggcacgggcggaccgcttacctgcagctgtacgccaccctgctgctgcttctcattgtctcggtgctcgcctgcaacttcagtgtcattctcaacctcatccgcatgcaccgccgaagccggagaagccgctgcggaccttccctgggcagtggccggggcggccccggggcccgcaggagaggggaaagggtgtccatggcggaggagacggaccacctcattctcctggctatcatgaccatcaccttcgccgtctgctccttgcctttcacgatttttgcatatatgaatgaaacctcttcccgaaaggaaaaatgggacctccaagctcttaggtttttatcaattaattcaataattgacccttgggtctttgccatccttaggcctcctgttctgagactaatgcgttcagtcctctgttgtcggatttcattaagaacacaagatgcaacacaaacttcctgttctacacagtcagatgccagtaaacaggctgacctttgaggtcagtagtttaaaagttcttagttatatagcatctggaagatcattttgaaattgttccctggagaaatgaaaacagtgtgtaaacaaaatgaagctgccctaataaaaaggagtatacaaacatttaagctgtggtcaaggctacagatgtgctgacaaggcacttcatgtaaagtgtcagaaggagctacaaaacctaccctcaatgagcatggtacttggcctttggaggaacaatcggctgcattgaagatccagctgcctattgatttaagctttcctgttgaatgacaaagtatgtggttttgtaatttgtttgaaaccccaaacagtgactgtactttctattttaatcttgctactaccgttatacacatatagtgtacagccagaccagattaaacttcatatgtaatctctaggaagtcaatatgtggaagcaaccaagcctgctgtcttgtgatcacttagcgaaccctttatttgaacaatgaagttgaaaatcataggcaccttttactgtgatgtttgtgtatgtgggagtactctcatcactacagtattactcttacaagagtggactcagtgggttaacatcagttttgtttactcatcctccaggaactgcaggtcaagttgtcaggttatttattttataatgtccatatgctaatagtgatcaagaagactttaggaatggttctctcaacaagaaataatagaaatgtctcaaggcagttaattctcattaatactcttattatcctatttctgggggaggatgtacgtggccatgtatgaagccaaatattaggcttaaaaactgaaaaatctggttcattcttcagatatactggaacccttttaaagttgatattggggccatgagtaaaatagattttataagatgactgtgttgtaccaaaattcatctgtctatattttatttaggggaacatggtttgactcatcttatatgggaaaccatgtagcagtgagtcatatcttaatatatttctaaatgtttggcatgtaaatgtaaactcagcatcaaaatatttcagtgaatttgcactgtttaatcatagttactgtgtaaactcatctgaaatgttacaaaaataaactataaaaca

SEQ ID NO: 1534 - protein, 358 aa, Homo sapien
MGNASNDSQSEDCETRQWLPPGESPAISSVMFSAGVLGNLIALALLARRWRGDVGCSAGRRSSLSLFHVLVTELVFTDLLGTCLISPVVLASYARNQTLVALAPESRACTYFAFAMTFFSLATMLMLFAMALERYLSIGHPYFYQRRVSASGGLAVLPVIYAVSLLFCSLPLLDYGQYVQYCPGTWCFIRHGRTAYLQLYATLLLLLIVSVLACNFSVILNLIRMHRRSRRSRCGPSLGSGRGGPGARRRGERVSMAEETDHLILLAIMTITFAVCSLPFTIFAYMNETSSRKEKWDLQALRFLSINSIIDPWVFAILRPPVLRLMRSVLCCRISLRTQDATQTSCSTQSDASKQADL

SEQ ID NO: 1535 - DNA, 1536 bp, Homo sapien
acagagcttcaaaaaaagagcgggacagggacaagcgtatctaagaggctgaacatgaatccacagatcagaaatccgatggagcggatgtatcgagacacattctacgacaactttgaaaacgaacccatcctctatggtcggagctacacttggctgtgctatgaagtgaaaataaagaggggccgctcaaatctcctttgggacacaggggtctttcgaggccaggtgtatttcaagcctcagtaccacgcagaaatgtgcttcctctcttggttctgtggcaaccagctgcctgcttacaagtgtttccagatcacctggtttgtatcctggaccccctgcccggactgtgtggcgaagctggccgaattcctgtctgagcaccccaatgtcaccctgaccatctctgccgcccgcctctactactactgggaaagagattaccgaagggcgctctgcaggctgagtcaggcaggagcccgcgtgacgatcatggactatgaagaatttgcatactgctgggaaaactttgtgtacaatgaaggtcagcaattcatgccttggtacaaattcgatgaaaattatgcattcctgcaccgcacgctaaaggagattctcagatacctgatggatccagacacattcactttcaactttaataatgaccctttggtccttcgacggcgccagacctacttgtgctatgaggtggagcgcctggacaatggcacctgggtcctgatggaccagcacatgggctttctatgcaacgaggctaagaatcttctctgtggcttttacggccgccatgcggagctgcgcttcttggacctggttccttctttgcagttggacccggcccagatctacagggtcacttggttcatctcctggagcccctgcttctcctggggctgtgccggggaagtgcgtgcgttccttcaggagaacacacacgtgagactgcgcatcttcgctgcccgcatctatgattacgaccccctatataaggaggcgctgcaaatgctgcgggatgctggggcccaagtctccatcatgacctacgatgagtttgagtactgctgggacacctttgtgtaccgccagggatgtcccttccagccctgggatggactagaggagcacagccaagccctgagtgggaggctgcgggccattctccagaatcagggaaactgaaggatgggcctcagtctctaaggaaggcagagacctgggttgagcagcagaataaaagatcttcttccaagaaatgcaaacagaccgttcaccaccatctccagctgctcacagacaccagcaaagcaatgtgctcctgatcaagtagattttttaaaaatcagagtcaattaattttaattgaaaatttctcttatgttccaagtgtacaagagtaagattatgctcaatattcccagaatagttttcaatgtattaatgaagtgattaattggctccatatttagactaataaaacattaagaatcttccataattgtttccacaaacact

SEQ ID NO: 1536 - protein, 382 aa, Homo sapien
MNPQIRNPMERMYRDTFYDNFENEPILYGRSYTWLCYEVKIKRGRSNLLWDTGVFRGQVYFKPQYHAEMCFLSWFCGNQLPAYKCFQITWFVSWTPCPDCVAKLAEFLSEHPNVTLTISAARLYYYWERDYRRALCRLSQAGARVTIMDYEEFAYCWENFVYNEGQQFMPWYKFDENYAFLHRTLKEILRYLMDPDTFTFNFNNDPLVLRRRQTYLCYEVERLDNGTWVLMDQHMGFLCNEAKNLLCGFYGRHAELRFLDLVPSLQLDPAQIYRVTWFISWSPCFSWGCAGEVRAFLQENTHVRLRIFAARIYDYDPLYKEALQMLRDAGAQVSIMTYDEFEYCWDTFVYRQGCPFQPWDGLEEHSQALSGRLRAILQNQGN

SEQ ID NO: 1537 - DNA, 2088 bp, Homo sapien
cttaactcctgatcttttgtaaaactattgctagtcataatggatttctataacctgaaagttgatataatacagcacgtggagcactttaaaaacaaagaaacttgaaaataattttattttttacctttacatggtgtgttctagactactgcattatgactacataaacctacctgagctcttacaagtacagaattgtgagacagaggttttgtgatggaaaacatacacatagggaaaaataccaaactgagcaatataaatttcacagctcacatcttagccagtacaaagaaactttcacatggggtgaatattataatacttgaatttgagacttaatactgtatatgaattaatcatcccactgtaataactgacatcttcaaatagttgggcttatgaaaaatttgactaagacattttattttatactttatgtaaatgtgaaataagttctggtcatataaatatgtagaatgcatgtgtgtgaactctatgaagtgaagtgtggtggccttttatgtttcagagtactcaagtgtacaattgatttatataaaaatgcaaaatgaactcaggtcattttgaaattaatattaatatttttgttgtttaactttaaagctagctcccctaactttatatattttttgggaaaaaatacctaaaaacctcagcctacaaagactctcagaaatgccaaagattttcaaggaaattcatattatatatttcaaaaatgatttatcaatgttatctaccaaaagaaataattttatttttcccctttggggagatattatcctctaatatgagaatcagatccctagattctatttctacctatactattaaactcaaccttgaacctgagcttggttgtttctgtgccttagtttctccactcgtaaacaatttcctataaaaattgtttaaacaccaaccaaaatttaccatatgtattcattctcttgccttaaagatcacttcttaacttacatttggctctcaccctctaaaaatttgtagtttggagagtaactgaaagcacaattttaagaaacatgttttcctcacaaaatatattgtaatctgattttcctatcttgtattcatgcagaaaattggagaaaatgtgtattgtcttgtgccattctgcaatatgaatttctcaggaaaaagatgtttcaatggcaatactttcttaaataattcaagatgggtgtgaggacctatcttattagtttagtgctgtgttaaccatttgtgaattacttcttgtttaaaggaagttgtcaaaaaattttaagattctaaatggaatacacgaataaagtaagccttagaatagaaacctcacaaaaagttgtcatttgcggttgataattaacataggtgttttattctctcaactccttagtaccagagccaaatacaatttagttttcagaaatcttatcaatattgttctatttacctacttataaatctgcagataaccacttgaaccaggcaaatacactgaagataaaggttatttctttttttagctttgaatttgtcatgaccattttagtcttgcagatagcagggcagccccttggggcaaggatttactctgggaggtaccgttaagagccttctttccccctttgaaagatccttttacaatgttaaagtatactagttgcaagaacaagcaggatttgcaggttgctttaccagcatgagtctcatttttctggcttaaaatctgggactgtgaaattattccataggaaagtgaatgttattttgcagaattagcctcttacataaaagtatttgttgaagtgtctttaaaattgctatcatgagcaaaactggttgctgtaatgcttgtttttctgtatttatttacacattaaattcttacaaaacaaaatgtgttcgtttgttttatagtaagatgttttattttgaacttatttaaatgtttatttgttagagaaaactaatttgttaatatagatcttaactagtaactattaagcagggatgtttgttccaaatattcttgaataaacaatcaccacaaacaac

SEQ ID NO: 1538 - protein, 61 aa, Homo sapien [sequence omitted]

SEQ ID NO: 1539 - DNA, 1040 bp, Homo sapien
aacacatttcatctgggcttcttaaatctaaatctttaaaatgactaagttttcttccttttctctgtttttcctaatagttggggcttatatgactcatgtgtgtttcaatatggaaattattggagggaaagaagtgtcacctcattccaggccatttatggcctccatccagtatggcggacatcacgtttgtggaggtgttctgattgatccacagtgggtgctgacagcagcccactgccaatatcggtttaccaaaggccagtctcccactgtggttttaggcgcacactctctctcaaagaatgaggcctccaaacaaacactggagatcaaaaaatttataccattctcaagagttacatcagatcctcaatcaaatgatatcatgctggttaagcttcaaacagccgcaaaactcaataaacatgtcaagatgctccacataagatccaaaacctctcttagatctggaaccaaatgcaaggttactggctggggagccaccgatccagattcattaagaccttctgacaccctgcgagaagtcactgttactgtcctaagtcgaaaactttgcaacagccaaagttactacaacggcgacccttttatcaccaaagacatggtctgtgcaggagatgccaaaggccagaaggattcctgtaagggtgactcagggggccccttgatctgtaaaggtgtcttccacgctatagtctctggaggtcatgaatgtggtgttgccacaaagcctggaatctacaccctgttaaccaagaaataccagacttggatcaaaagcaaccttgtcccgcctcatacaaattaagttacaaataattttattggatgcacttgcttcttttttcctaatatgctcgcaggttagagttgggtgtaagtaaagcagagcacatatggggtccatttttgcacttgtaagtcattttattaaggaatcaagttctttttcacttgtatcactgatgtatttctaccatgctggttttattctaaataaaatttagaagact

SEQ ID NO: 1540 - protein, 264 aa, Homo sapien
MTKFSSFSLFFLIVGAYMTHVCFNMEIIGGKEVSPHSRPFMASIQYGGHHVCGGVLIDPQWVLTAAHCQYRFTKGQSPTVVLGAHSLSKNEASKQTLEIKKFIPFSRVTSDPQSNDIMLVKLQTAAKLNKHVKMLHIRSKTSLRSGTKCKVTGWGATDPDSLRPSDTLREVTVTVLSRKLCNSQSYYNGDPFITKDMVCAGDAKGQKDSCKGDSGGPLICKGVFHAIVSGGHECGVATKPGIYTLLTKKYQTWIKSNLVPPHTN

SEQ ID NO: 1541 - DNA, 2304 bp, Homo sapien
agtggagtggcagccccagaactgggaccaccgggggtggtgaggcggcccggcactgggagctgcatctgaggcttagtccctgagctctctgcctgcccagactagctgcacctcctcattccctgcgcccccttcctctccggaagcccccaggatggtgaggtggtttcaccgagacctcagtgggctggatgcagagaccctgctcaagggccgaggtgtccacggtagcttcctggctcggcccagtcgcaagaaccagggtgacttctcgctctccgtcagggtgggggatcaggtgacccatattcggatccagaactcaggggatttctatgacctgtatggaggggagaagtttgcgactctgacagagctggtggagtactacactcagcagcagggtgtcctgcaggaccgcgacggcaccatcatccacctcaagtacccgctgaactgctccgatcccactagtgagaggtggtaccatggccacatgtctggcgggcaggcagagacgctgctgcaggccaagggcgagccctggacgtttcttgtgcgtgagagcctcagccagcctggagacttcgtgctttctgtgctcagtgaccagcccaaggctggcccaggctccccgctcagggtcacccacatcaaggtcatgtgcgagggtggacgctacacagtgggtggtttggagaccttcgacagcctcacggacctggtggagcatttcaagaagacggggattgaggaggcctcaggcgcctttgtctacctgcggcagccgtactatgccacgagggtgaatgcggctgacattgagaaccgagtgttggaactgaacaagaagcaggagtccgaggatacagccaaggctggcttctgggaggagtttgagagtttgcagaagcaggaggtgaagaacttgcaccagcgtctggaagggcagcggccagagaacaagggcaagaaccgctacaagaacattctcccctttgaccacagccgagtgatcctgcagggacgggacagtaacatccccgggtccgactacatcaatgccaactacatcaagaaccagctgctaggccctgatgagaacgctaagacctacatcgccagccagggctgtctggaggccacggtcaatgacttctggcagatggcgtggcaggagaacagccgtgtcatcgtcatgaccacccgagaggtggagaaaggccggaacaaatgcgtcccatactggcccgaggtgggcatgcagcgtgcttatgggccctactctgtgaccaactgcggggagcatgacacaaccgaatacaaactccgtaccttacaggtctccccgctggacaatggagacctgattcgggagatctggcattaccagtacctgagctggcccgaccatggggtccccagtgagcctgggggtgtcctcagcttcctggaccagatcaaccagcggcaggaaagtctgcctcacgcagggcccatcatcgtgcactgcagcgccggcatcggccgcacaggcaccatcattgtcatcgacatgctcatggagaacatctccaccaagggcctggactgtgacattgacatccagaagaccatccagatggtgcgggcgcagcgctcgggcatggtgcagacggaggcgcagtacaagttcatctacgtggccatcgcccagttcattgaaaccactaagaagaagctggaggtcctgcagtcgcagaagggccaggagtcggagtacgggaacatcacctatcccccagccatgaagaatgcccatgccaaggcctcccgcacctcgtccaagagcttggagtctagtgcagggaccgtggctgcgtcacctgtgagacggggtggccagaggggactgccagtgccgggtccccctgtgctgtctcctgacctgcaccaactgcctgtacttgcccccctgcacccggctgcagacacaaggaggatgtgtatgagaacctgcacactaagaacaagagggaggagaaagtgaagaagcagcggtcagcagacaaggagaagagcaagggttccctcaagaggaagtgagcggtgctgtcctcaggtggccatgcctcagccctgaccctgtggaagcatttcgcgatggacagactcacaacctgaacctaggagtgccccattcttttgtaatttaaatggctgcatcccccccacctctccctgaccctgtatatagcccagccaggccccaggcagggccaacccttctcctcttgtaaataaagccctgggatcactgtg

SEQ ID NO: 1542 - protein, 624 aa, Homo sapien
MVRWFHRDLSGLDAETLLKGRGVHGSFLARPSRKNQGDFSLSVRVGDQVTHIRIQNSGDFYDLYGGEKFATLTELVEYYTQQQGVLQDRDGTIIHLKYPLNCSDPTSERWYHGHMSGGQAETLLQAKGEPWTFLVRESLSQPGDFVLSVLSDQPKAGPGSPLRVTHIKVMCEGGRYTVGGLETFDSLTDLVEHFKKTGIEEASGAFVYLRQPYYATRVNAADIENRVLELNKKQESEDTAKAGFWEEFESLQKQEVKNLHQRLEGQRPENKGKNRYKNILPFDHSRVILQGRDSNIPGSDYINANYIKNQLLGPDENAKTYIASQGCLEATVNDFWQMAWQENSRVIVMTTREVEKGRNKCVPYWPEVGMQRAYGPYSVTNCGEHDTTEYKLRTLQVSPLDNGDLIREIWHYQYLSWPDHGVPSEPGGVLSFLDQINQRQESLPHAGPIIVHCSAGIGRTGTIIVIDMLMENISTKGLDCDIDIQKTIQMVRAQRSGMVQTEAQYKFIYVAIAQFIETTKKKLEVLQSQKGQESEYGNITYPPAMKNAHAKASRTSSKSLESSAGTVAASPVRRGGQRGLPVPGPPVLSPDLHQLPVLAPLHPAADTRRMCMRTCTLRTRGRRK

SEQ ID NO: 1543 - DNA, 2452 bp, Homo sapien
cgcaagaatgcatacaaactccagggctgctctctcctggagagggagggaggggatttaaaaacctgcagcaacatgggggaggaggctgtttgtccttctctctctggggaagtaactcgctcaaactgccttccttgctgagctgcttcgcgtagctttgaggaaggtctagtgaaattggtctttccattacatctggatgtactaccagagagttctgctgctgttgttttttttagcttttctttctttgagtctttaaagggcaattgtcgacactctgcaaacataccgatttgttgtctgcccactttggagtcttcaatctgggcagtaactatttaccctttttcctgctagcctgtccccctctctggattgaagtcacctgctaagacaatggactaccgaccagactcccggaaatcatgttggtaggatcccagtctttttcgcctggagggcccaatgggatcattagaagccagtcctttgcgggtttcagcggcctccaggaaaggcgatccaggtgtaactccttcattgaaaattcctccgctctcaagaagcctcaggccaaactgaagaaaatgcacaatttaggccacaaaaacaacaatccccccaaagagcctcagcctaaaagggtggaagaagtctacagggccttgaaaaatggacttgatgaatatctggaggttcaccagacggagctggacaagttgacagctcagttaaaagatatgaaaagaaactctcgcctgggtgtactgtatgacctagacaagcaaattaaaacaattgaaagatacatgagacgcctggagtttcatataagtaaggtagatgaactctatgaagcttattgtatccagcgacgcctccaggatggtgccagcaaaatgaagcaagccttcgcaacatcccctgccagcaaagctgcccgggagagtctgacagagatcaatcggagcttcaaggagtacacagagaatatgtgcaccattgaagtggagctagagaatctgctgggagaattctccatcaagatgaaaggtctggctggctttgcacgcctctgtcctggagatcaatatgaaattttcatgaagtatggccggcagcggtggaaactgaaaggcaaaatagaagtaaatggcaagcagagctgggatggagaagaaacagtttttctgcccctgatagttgggttcatctccatcaaggtcacggagctcaaagggctagcaactcacatcctggtaggtagcgtgacctgtgagaccaaagagctgtttgcagcccgacctcaggtagtggctgtcgacatcaatgaccttggtaccatcaaactgaacctggaaatcacctggtatccatttgacgtggaggacatgaccgcatcctcaggcgctgggaacaaggcagcagcccttcagaggagaatgtccatgtacagccagggtaccccggaaacgcccaccttcaaagaccactccttcttttcaaatctacctgatgacatctttgaaaatggaaaggcagccgaggagaaaatgccactgtcgctcagcttcagtgacctgcccaacggggactgcgccctcacctcccactcaacaggctccccttccaactcaacaaatccagaaattaccatcacccctgcggagtttaacctcagcagcttggcctcccagaatgagggtatggatgacaccagctcagcatcttccaggaactccctgggagaaggccaagagccaaagtcacacctgaaggaggaagacccagaggagcccagaaaacctgcctcggccccatctgaggcttgccgccgacagtcctcaggtgctggggctgagcacctgttccttgagaatgatgttgcagaagcacttctgcaagagtctgaggaggcctctgagctcaagcctgtggaactggacacttcggaaggaaacatcacaaagcagctggtcaagaggctcacatctgcagaggtgccaatggccacagacaggctgctctctgagggttctgttggtggagaatctgaaggctgcagatcctttctagatggaagcttagaggatgcttttaatgggcttttacttgcattagaaccacataaagagcagtataaagagtttcaggatctgaaccaagaagtcatgaatttggatgatattctaaaaaagtagagaagatcctctaatggatcccagtgtgcccatccctcaacctcctcagtgatcaactcatggccaatcttgtttcctattcttcaacctgctgacttccctctggattcttctgcaaccagtcccagatattgtgccattttatccatggttgtacttcttttttggatataaagatttttaaatgcattttttaaatgctaacaaaaaataaaaacttgaaacaaaaaaaaaaaaaaaaaaaa

SEQ ID NO: 1544 - protein, 591 aa, Homo sapien
MLVGSQSFSPGGPNGIIRSQSFAGFSGLQERRSRCNSFIENSSALKKPQAKLKKMHNLGHKNNNPPKEPQPKRVEEVYRALKNGLDEYLEVHQTELDKLTAQLKDMKRNSRLGVLYDLDKQIKTIERYMRRLEFHISKVDELYEAYCIQRRLQDGASKMKQAFATSPASKAARESLTEINRSFKEYTENMCTIEVELENLLGEFSIKMKGLAGFARLCPGDQYEIFMKYGRQRWKLKGKIEVNGKQSWDGEETVFLPLIVGFISIKVTELKGLATHILVGSVTCETKELFAARPQVVAVDINDLGTIKLNLEITWYPFDVEDMTASSGAGNKAAALQRRMSMYSQGTPETPTFKDHSFFSNLPDDIFENGKAAEEKMPLSLSFSDLPNGDCALTSHSTGSPSNSTNPEITITPAEFNLSSLASQNEGMDDTSSASSRNSLGEGQEPKSHLKEEDPEEPRKPASAPSEACRRQSSGAGAEHLFLENDVAEALLQESEEASELKPVELDTSEGNITKQLVKRLTSAEVPMATDRLLSEGSVGGESEGCRSFLDGSLEDAFNGLLLALEPHKEQYKEFQDLNQEVMNLDDILKK

SEQ ID NO: 1545 - DNA, 3309 bp, Homo sapien
gcggcgcgcccgagcctagtccccacgccgcggcgcgcccgggctccctgctgatcccagaacaatcaaccatgacgaccgaatctggatcagactcggaatccaagccggaccaggaggccgagccccaggaggcggcgggggcgcaggggcggcgggggccgtgccggagccgcccaaggaggagcagcagcaggccctggagcagttcgccgccgctgcagcgcacagcaccccggtgcgagggaggtcactgacaaggaacaggagtttgctgccagggctgcaaaacagctcgaatatcagcaattagaagacgataaactttctcagaaatcatctagcagtaaactctctcggtctccattaaagattgtcaaaaagcctaaaagcatgcagtgcaaagtgatacttctcgatggatcagaatatacctgtgatgtagagaaacgctccagaggacaagtgctgtttgataaagtgtgtgaacacttgaacttgctagagaaagactactttgggcttacgtatcgagatgctgaaaaccagaagaattggttggaccctgctaaggaaataaaaaaacaggttcgaagtggtgcttggcacttttcatttaatgtgaaattttatccaccagaccctgcccaactatctgaagatatcaccaggtactacctctgcttgcagttgcgagatgacatcgtgtccggaaggctgccctgctcctttgttaccctggccttgctgggctcctacactgtccagtcagagctcggagactatgacccagatgaatgtgggagcgattacattagtgagttccgctttgcaccaaaccacactaaagaactggaagacaaagtgatcgagctgcacaagagccacagaggaatgacgccagcagaagcagagatgcatttcttggaaaatgccaaaaaattatcaatgtatggggtagatttacatcatgctaaggactcagaaggggtagaaattatgttaggagtttgtgcaagtggtctgttgatatatcgcgaccggctgcgaataaacagatttgcctggcccaaggttctaaagatttcatacaaacggaacaacttttacattaagatccggccgggagagtttgaacaatttgaaagcaccattgggtttaagctgccaaaccatcgagctgccaagcgtttatggaaagtatgtgttgagcatcatacatttttcagactactgttaccagaagcacctcccaagaaattcctaaccttgggttccaagtttcgttatagtggcaggacacaagcgcaaacgagaagagccagtgcgttgatagatcgcccagcaccttactttgaacgctcatccagcaaacgttataccatgtctcgcagcttggatggagcatcagtgaatgaaaaccatgaaatatacatgaaggattctatgtctgctgcagaggttggtactggccagtacgccacaacaaaaggcatctctcagaccaacttgatcaccactgtgactccggagaagaaggctgaggaggagcgggacgaggaagaggacaaacggaggaagggggaagaagtcacgcccatctcggccatccagcacgagggaaagactgacagtgagcgcacggacaccgcagccgacggggagaccactgccactgaggagctagaaaaaactcaagatgacctgatgaaacatcaaaccaacattagcgagctgaaaagaaccttcttagaaacctcaacagacactgccgtaacgaatgaatgggagaagaggctttccacctcccccgtgcgactggccgccaggcaggaggatgcccccatgatcgaaccacttgtccctgaagagaaaatggaaaccaagacggagtccagtggatagagacggaacccaccgtgcaccacctgccgcttagcactgagaaggtggtgcaggagaccgtgttggtggaggagcggcgtgtggtgcacgcgagtggggatgcttcttactcggcgggagacagcggggatgctgcagcacagcccgcattcacaggcattaaagggaaagagggctctgcttgacggagggggctaaagaggaaggaggggaggaggtcgctaaagctgtcctggaacaggaagagacagccgctgcttcccgtgagcgacaagaggagcagagtgcagccatccacatttcagaaactttggaacaaaaacctcattttgagtcctcaacggtgaagacggaaaccatcagttttggcagtgtttcaccgggaggagtaaagctagaaatttccacaagaagtgccagtagttcacaccgaaaccaaaaccatcacatatgaatcatcacaggtcgatccaggcacagatctggagccaggcgtgctgatgagtgcacagacgatcacatctgaaaccaccagtaccaccaccactacccacatcaccaaaactgtgaaagggggcatttcagagacaagaattgagaagcgaatagtcatcacgggggatgcagacattgaccatgaccaggcgctggctcaggcaattaaagaggccaaagagcagcaccctgacatgtcagtgaccaaagtagtggtccataaagagacagagatcacaccagaagatggagaggattgaccagaggaataacttagcttgcacatgaatgcagtcatgcaaaccgttaggaaaaccagagcctatatggagttccctcttctaacccaactgtacttgtatctgtccgtggaaaatttcagtccagaagaattgaccttgaccattaataaagacactggcagagagatcttcccataataaagcaatctgattcagcatcactaaaccgataatgcatgaagcaacgataaaattacaaaagagcagcatttttaattttcacaaaatgtctcagttttcagctatacctgctcgttcataaccaacaatataaaccgtggtctcatgtaacacataaacaattcatgcctttcatagtttattattattaaagtctaaacaaaattgcaatttcttaggtaaccttatatttacaataaatgaagattaccctcaaatgctagaagctgtctaggtccgtccggtgtgtcagatttcctcagattagatgtgccaataaccaagtttattcagtaaacaacttgtacttgtttcatctggtttattactctcacccataaacagtaatgactctctgaccctctggaaatatgtaatgcttccaatcttgctttgtgtatctcatttaatttgttccggttaagga

SEQ ID NO: 1546 - protein, 503 aa, Homo sapien
MQCKVILLDGSEYTCDVEKRSRGQVLFDKVCEHLNLLEKDYFGLTYRDAENQKNWLDPAKEIKKQVRSGAWHFSFNVKFYPPDPAQLSEDITRYYLCLQLRDDIVSGRLPCSFVTLALLGSYTVQSELGDYDPDECGSDYISEFRFAPNHTKELEDKVIELHKSHRGMTPAEAEMHFLENAKKLSMYGVDLHHAKDSEGVEIMLGVCASGLLIYRDRLRINRFAWPKVLKISYKRNNFYIKIRPGEFEQFESTIGFKLPNHRAAKRLWKVCVEHHTFFRLLLPEAPPKKFLTLGSKFRYSGRTQAQTRRASALIDRPAPYFERSSSKRYTMSRSLDGASVNENHEIYMKDSMSAAEVGTGQYATTKGISQTNLITTVTPEKKAEEERDEEEDKRRKGEEVTPISAIQHEGKTDSERTDTAADGETTATEELEKTQDDLMKHQTNISELKRTFLETSTDTAVTNEWEKRLSTSPVRLAARQEDAPMIEPLVPEEKMETKTESSG

SEQ ID NO: 1547 - DNA, 785 bp, Homo sapien
gaattgcaccatgccaaactacaaactcacttattttaatatgagggggagagcagaaattattcgttacatatttgcttatttggacatacagtatgaagaccacagaatagaacaagctgactggcctgaaatcaaatcaactctcccatttggaaaaatccccattttggaagttgatggacttactcttcaccagagcctagcaatagcaagatatttgaccaaaaacacagatttggctggaaacacagaaatggaacaatgtcatgttgatgctattgtggacactctggatgatttcatgtcatgttttccttgggcagagaaaaagcaagatgtgaaagagcagatgttcaatgagctgctcacgtataatgcgcctcatcttatgcaagacttggacacatatttaggggggagagaatggcttattggtaactctgtaacttgggcagacttctactgggagatttgcagtaccacacttttggtctttaagcctgacctgttagacaaccatccaaggctggtgactttacggaagaaagtccaagccattcctgccgtcgctaactggataaaacgaaggccccaaaccaaactctagctgatccatgttgccttcaagtttgtttttctcgggggcatctctctcatcagataagacagctacatcagcctgccagataatccacatgctccctccccagctccactaagattttcactttagccatattctgatttttaaaaaggaaaataaaaacaaatctttcttcagt

SEQ ID NO: 1548 - protein, 199 aa, Homo sapien
MPNYKLTYFNMRGRAEIIRYIFAYLDIQYEDHRIEQADWPEIKSTLPFGKIPILEVDGLTLHQSLAIARYLTKNTDLAGNTEMEQCHVDAIVDTLDDFMSCFPWAEKKQDVKEQMFNELLTYNAPHLMQDLDTYLGGREWLIGNSVTWADFYWEICSTTLLVFKPDLLDNHPRLVTLRKKVQAIPAVANWIKRRPQTKL

SEQ ID NO: 1549 - DNA, 1261 bp, Homo sapien
gcagttatcatagagcacagtccctcacatcacacagctgcagagatgagtaaacaaagaggaaccttctcagaagtgagtctggcccaggacccaaagcggcagcaaaggaaacctaaaggcaataaaagctccatttcaggaaccgaacaggaaatattccaagtagaattaaatcttcaaaatccttccctgaatcatcaagggattgataaaatatatgactgccaaggtttactgccacctccagagaagctcactgccgaggtcctaggaatcatttgcattgtcctgatggccactgtgttaaaaacaatagttcttattcctttcctggagcagaacaattcttccccgaatacaagaacgcagaaagcacgtcattgtggccattgtcctgaggagtggattacatattccaacagttgttattacattggtaaggaaagaagaacttgggaagagagtttgctggcctgtacttcgaagaactccagtctgctttctatagataatgaagaagaaataaaatttctggccagcattttaccttcctcatggattggtgtgtttcgtaacagcagtcatcatccatgggtgacaataaatggtttggctttcaaacataagataaaagactcagataatgctgaacttaactgtgcagtgctacaagtaaatcgacttaaatcagcccagtgtggatcttcaatgatatatcattgtaagcataagctttagaagtaaagcatttgcgtttacagtgcatcagatacattttatatttcttaaaatagaaatattatgattgcataaatctgaaaatgaattatgttatttgctctaatacaaaaattctaaatcaattattgaaataggatgcacacaattactaaagtacagacatcctagcatttgtgtcgggctcattttgctcaacatggtatttgtggttttcagcctttctaaaagttgcatgttatgtgagtcagcttataggaagtaccaagaacagtcaaacccatggagacagaaagtagaatagtggttgccaatgtctcagggaggttgaaataggagatgaccactaattgatagaacgtttctttgtgtcgtgatgaaaactttctaaatttcagtaatggtgatggttgtaactttgcgaatatactaaacatcattgatttttaatcattttaagtgcatgaaatgtatgctttgtacatgacacttcaataaagctatccagaaaaaaaaaaaa

SEQ ID NO: 1550 - protein, 231 aa, Homo sapien
MSKQRGTFSEVSLAQDPKRQQRKPKGNKSSISGTEQEIFQVELNLQNPSLNHQGIDKIYDCQGLLPPPEKLTAEVLGIICIVLMATVLKTIVLIPFLEQNNSSPNTRTQKARHCGHCPEEWITYSNSCYYIGKERRTWEESLLACTSKNSSLLSIDNEEEIKFLASILPSSWIGVFRNSSHHPWVTINGLAFKHKIKDSDNAELNCAVLQVNRLKSAQCGSSMIYHCKHKL

SEQ ID NO: 1551 - DNA, 822 bp, Homo sapien
gggctgctccacgcttttgccggagacagagactgacatggaacaggggaagggcctggctgtcctcatcctggctatcattcttcttcaaggtactttggcccagtcaatcaaaggaaaccacttggttaaggtgtatgactatcaagaagatggttcggtacttctgacttgtgatgcagaagccaaaaatatcacatggtttaaagatgggaagatgatcggcttcctaactgaagataaaaaaaaatggaatctgggaagtaatgccaaggaccctcgagggatgtatcagtgtaaaggatcacagaacaagtcaaaaccactccaagtgtattacagaatgtgtcagaactgcattgaactaaatgcagccaccatatctggctttctctttgctgaaatcgtcagcattttcgtccttgctgttggggtctacttcattgctggacaggatggagttcgccagtcgagagcttcagacaagcagactctgttgcccaatgaccagctctaccagcccctcaaggatcgagaagatgaccagtacagccaccttcaaggaaaccagttgaggaggaattgaactcaggactcagagtagtccaggtgttctcctcctattcagttcccagaatcaaagcaatgcattttggaaagctcctagcagagagactttcagccctaaatctagactcaaggttcccagagatgacaaatggagaagaaaggccatcagagcaaatttgggggtttctcaaataaaataaaaataaaaacaaatactgtgtttcagaagcgccacctattggggaaaattgt

SEQ ID NO: 1552 - protein, 182 aa, Homo sapien
MEQGKGLAVLILAIILLQGTLAQSIKGNHLVKVYDYQEDGSVLLTCDAEAKNITWFKDGKMIGFLTEDKKKWNLGSNAKDPRGMYQCKGSQNKSKPLQVYYRMCQNCIELNAATISGFLFAEIVSIFVLAVGVYFIAGQDGVRQSRASDKQTLLPNDQLYQPLKDREDDQYSHLQGNQLRRN

SEQ ID NO: 1553 - DNA, 2564 bp, Homo sapien
gatttcagttgaaagatgtgtttttgtgagtagagcaccgcagaagaactgaagactgttgtgtgctccccgcagaaggggctaccatgatcctttcctcctataacaccatccagtcggttttctgttgctgctgttgctgttcagtgcagaagcgacaaatgagaacacagataagcctgagcacagatgaagagcttccagaaaaatacacccagcatcgcaggccgtggctcagccaattgtcaaataagaagcaatccaacacgggccgtgtgcagccgtcaaaacgaaagccactgcctcccctcccaccctctgaggttgctgaagagaagatccaagtcaaggcactttatgattttctgcccagagaaccctgtaatttagccttaaggagagcagaagaatacctgatactggagaaatacaatcctcactggtggaaggcaagagaccgtttggggaatgaaggcttaatcccaagcaactatgtgactgaaaacaaaataactaatttagaaatatatgagtggtaccatagaaacattaccagaaatcaggcagaacatctattgagacaagagtctaaagaaggtgcatttattgtcagagattcaagacatttaggatcctacacaatttccgtatttatgggagctagaagaagtacggaggctgccataaaacattatcagataaaaaagaatgactcaggacagtggtatgtggctgaaagacacgcctttcaatcaatccctgagttaatctggtatcaccagcacaatgcagccggtctcatgactcgtctccgatatccagttgggctgatgggcagttgtttaccagccacagctgggtttagctacgaaaagtgggagatagatccatctgagttggcttttataaaggagattggaagcggtcagtttggagtggtccatttaggtgaatggcggtcacatatccaggtagctatcaaggccatcaatgaaggctccatgtctgaagaggatttcattgaagaggccaaagtgatgatgaaattatctcattcaaagctagtgcaactttatggagtctgtatacagcggaagcccctttacattgtgacagagttcatggaaaatggctgcctgcttaactatctcagggagaataaaggaaagcttaggaaggaaatgctactgagtgtatgccaggatatatgtgaaggaatggaatatctggagaggaatggctatattcatagggatttggcggcaaggaattgtttggtcagttcaacatgcatagtaaaaatttcagactttggaatgacaaggtacgttttggatgatgagtatgtcagttcttttggagccaagttcccaatcaagtggtcccctcctgaagtttttcttttcaataagtacagcagtaaatctgatgtctggtcatttggagttttaatgtgggaagtttttacagaaggaaaaatgccttttgaaaataagtcaaatttgcaagtcgtggaagctatttctgaaggcttcaggctatatcgccctcacctggcaccaatgtccatatatgaagtcatgtacagctgctggcatgagaaacctgaaggccgccctacatttgcggagctgctgcgggctgtcacagagattgcggaaacctggtgaccggaaacagaatgccaacccaaagagtcatcttgcaaaactgtcatttattgtgaatatcttcaccatatggggtcacttatggtgaatatctttcttcagagttgctgactcttgaaaacagtgcaaagatcacagtttttaaaagttttaaaaatttaagaatattcacacaatcgtttttctatgtgtgagagggatttgcacactcttatttttctgtaaaatatttcacatcccaaatgtgaagaagtgaaaaagacttcgcagcagtcttcattgtggtgctcttcatgatcatagccccaggaacccttgaggttcttcttcacaaggctgagagtgcttccttcttgaagacgagtgtcattcatcacttcagtgatccatgcatagaatatgaaaataaattcttccaactcatgggataaaggggactcccttgaagaatttcatgtttttgggctgtatagctctttacagaaaatgcacctttataaatcacatgaatgttagtattctggaaatgtcttttgttaatataatcttcccatgttatttaacaaattgtttttgcacatatctgattatattgaaagcagtttttttgcattcgagttttaaacactgttataaaatgtagccaaagctcacctttgaacagatcccggtgacattctatttccaggaaaatccggaacctgattttagttctgtgattttacactttttacatgtgagattggacagtttcagaggccttattttgtcatactaagtgtctcctgtaattttcaggaagatgatttgttctttccagaagaggagacaaaagcaagatagccaaatgtgacatcaagctccattgtttcggaaatccaggattttgaattc

SEQ ID NO: 1554 - protein, 527 aa, Homo sapien
MILSSYNTIQSVFCCCCCCSVQKRQMRTQISLSTDEELPEKYTQHRRPWLSQLSNKKQSNTGRVQPSKRKPLPPLPPSEVAEEKIQVKALYDFLPREPCNLALRRAEEYLILEKYNPHWWKARDRLGNEGLIPSNYVTENKITNLEIYEWYHRNITRNQAEHLLRQESKEGAFIVRDSRHLGSYTISVFMGARRSTEAAIKHYQIKKNDSGQWYVAERHAFQSIPELIWYHQHNAAGLMTRLRYPVGLMGSCLPATAGFSYEKWEIDPSELAFIKEIGSGQFGVVHLGEWRSHIQVAIKAINEGSMSEEDFIEEAKVMMKLSHSKLVQLYGVCIQRKPLYIVTEFMENGCLLNYLRENKGKLRKEMLLSVCQDICEGMEYLERNGYIHRDLAARNCLVSSTCIVKISDFGMTRYVLDDEYVSSFGAKFPIKWSPPEVFLFNKYSSKSDVWSFGVLMWEVFTEGKMPFENKSNLQVVEAISEGFRLYRPHLAPMSIYEVMYSCWHEKPEGRPTFAELLRAVTEIAETW

SEQ ID NO: 1555 - DNA, 2298 bp, Homo sapien
tttttggcggggcctttgtccctcgctgtggcctgagctccaggtctcgtcttcagcgctctgtgtcctctgctcctagaggtccaggctctgtggccctgtgacctgcaggtattgggagatctacagctaagacgccaggaacccctggaagcctagaaatggagaacctgaagtctggagtgtatcctctcaaggaagcaagtggatgccctggggctgacaggaatcttctggtgtactctttttatgaaaaggggccattgacatttagggatgtggccatagaattttctctggaggagtggcaatgcctggacactgctcagcaggatttgtatagaaaagtgatgttagagaactacagaaacctggtcttcttggcaggtattgctgtttctaagccagacctgatcacctgtctagagcaaggaaaagagccctggaatatgaagagacatgcgatggtagatcaacccccagttacatattctcattttgcccaagacctttggccagagcagggcataaaagattctttccaagaagtcatattgagaagatatggaaaatgtggacatgaagatttacagttaagaacaggctgtagaagtgtggatgagtgtaatctgcacaaagaatgttatgatgaactaaaccagtgtttgacaactacccagagtgaaatatttcaatatgataaatatgtgaatgtcttttataaattttcaaatccaaatatacaaaagataagacatactggaaagaagcctttcaaatgtaaaaaatgtgacaaatcgttttgcatgcttttacacctaactcaacataaaagaattcatattagggaaaattcttaccaatgtgaagaatgtggtaaagtctttaactggttctcaacccttactagacacagaagaattcatactggagagaaaccctacaaatgtgaacaatgtggcaaagcttttaagcagtcctcaacccttactacacataagataattcatactggagagaaaccctacagatgtgaaaatgtggcaaaacctttaaccggtcctcacaccttactacacataaaagaattcatactggagagaaaccctacagatgtgaagaatgtggcagagcttttaaccggtcctcacaccttactacacataagattattcatactggagagaaaccctacaaatgtgaagaatgtggcaaagcttttaaccaatcctcaacccttactacacataagataattcatgctggagagaaaccttacaaatgtgaagaatgtggcaaagctttttaccgattctcataccttactaaacataagataattcatactggagagaaattctacaaatgtgaagaatgtggcaaaggctttaattggtcctcgacccttactaaacataaaagaattcatactggagagaaaccctacaaatgtgaacaatgtggcaaagcttttaatgagtcctcaaaccttactgcacataagataattcatactggagagaaaccctacaaatgtgaagaatgtggcaaagcctttaaccggtccccaaaacttactgcacataaggtaattcattctggagagaaaccctacaaatgtgaagaatgtggcaaagcttttaaccaattctcaaaccttactaaacataagataactcatattggagatacatcttacaaatacctagaatgtgataaagcctttagccagtcttcaactcttactaaacataaggtaattcatactggagagaaaccctacaactgtgaagaatacggcaaagctttcaaccagtcctcaaaccttattgaacaaagtaattcatactggagagaaaccctacaaatgtgaagattgtggcaaagcctctaacccgtcctgaattcttactaaacataagaacattcatactgaagaggaaccctatgagtgtgaagaatatggcaaagccttcaacaagtcctcaattcttaccagacataagataattctggctgggtgcggtggctcacacctgtaatcccagcactttgggaggctgagacgggtgaattacatgaggttgggagttcgagaccagcctgaccaacatggtgaaatcctgtctctactaaaaatacaaaattagccatgcgtagtggtgcatgcctgtaatcccagctactcgggaggctgaggcaggagaattgcttgaacccgggaggcagaggttgaagtgagctgagatcgcgccattgcactccagcctgggcaacaagagtggcactccatctcag

SEQ ID NO: 1556 - protein, 364 aa, Homo sapien
MENLKSGVYPLKEASGCPGADRNLLVYSFYEKGPLTFRDVAIEFSLEEWQCLDTAQQDLYRKVMLENYRNLVFLAGIAVSKPDLITCLEQGKEPWNMKRHAMVDQPPVTYSHFAQDLWPEQGIKDSFQEVILRRYGKCGHEDLQLRTGCRSVDECNLHKECYDELNQCLTTTQSEIFQYDKYVNVFYKFSNPNIQKIRHTGKKPFKCKKCDKSFCMLLHLTQHKRIHIRENSYQCEECGKVFNWFSTLTRHRRIHTGEKPYKCEQCGKAFKQSSTLTTHKIIHTGEKPYRCENVAKPLTGPHTLLHIKEFILERNPTDVKNVAELLTGPHTLLHIRLFILERNPTNVKNVAKLLTNPQPLLHIR

SEQ ID NO: 1557 - DNA, 2425 bp, Homo sapien
atgtggtggagagttctcagcttgctggcatggttccccttgcaagaggcctctctgactaaccacacagaaaccatcaccgtggaggaaggccagacgctcactctaaagtgtgtcacttctctgaggaagaactcctccctccagtggctgaccccctcagggttcaccatttttttaaatgagtatcctgctttaaaaaattccaaataccagcttcttcatcactcggccaatcagctctccatcactgtgcctaacgtaaccctgcaagatgaaggcgtgtacaagtgcttacattacagcgactctgtaagcacaaaggaagtgaaagtgattgtgctggcaactcctttcaagccaatcctggaagcttcagttatcagaaagcaaaatggagaagaacatgttgtactcatgtgctccaccatgagaagcaagccccctccgcagataacctggctacttgggaatagcatggaagtgtccggtggaacgctccatgaatttgaaactgatgggaagaaatgtaatactaccagcactctcataatccacacttatggcaaaaattcaacggtggactgcattatccgacacagaggcctgcaagggagaaaactagtagcacccttccggtttgaagatttggttactgatgaagagacagcttcagatgctctggagagaaactctctatcctctcaagacccacagcagcccaccagtactgtctcagtaacggaagattctagtacatcggagattgacaaggaagagaaagaacaaaccactcaagatcctgacttgaccaccgaagcaaatcctcagtatttaggactggcaagaaagaaaagtggcatcctgctgctcacgctggtgtccttcctcattttcatactcttcatcatagtccagctcttcatcatgaagctgaggaaagcacatgtgatatggaagagagaaaacgaagtttcagaacacacactagaaagttacagatcaaggtcaaataatgaagaaacatcatctgaagagaaaaatggccaatcttcccaccctatgcgttgcatgaactacatcacaaagttgtactcagaagcaaaaacaaagaggaaggaaaatgtacaacattcaaaattagaagaaaagcacatccaagtaccagagagtattgtgtagtgctctctgcaatggaacatgtgatttcagggttgccgcagtgtcacctcagtggaccagcctgggggaaggagcttaattgctgagacattaataatgacctcttagtgcaatgcaagatggtgtcctcggataatgatctgccccggagctagggcagcaacatgaggaccaaaccatgcacataaagcttgtagtttaaaaaagaaaagcaaaaaaataattatgcctgacactacttcagagcaggaggattctacgaagccttggggatcagggtcagtgtgagcagctaacatcctacctcaaatggaacaggattttttgatgctttgctctaatggaactgttttaaaaatttttttttctttttaatattttcttctggtcacaaaataaagaaatttgggatgcaaagtacctaaagatctctgatcctaagaagttacttctggccaggcgcggtggctcatgcctgtaatcctagcactttgggaggctgaggtaggcagatcacttgaggtcaggagttggagaccagcctggccaacatagtgaaaccccgtctctactaaaaatgcaaaaattagccaggcgtagtggtgcgcacctgtagtctcagatacttgggaggctgagggtggagaatcgcttgaacctgggaggtggagattgcagtgagtcaagatctcaccactgaactccagcctgggcgacagagggagactctgtctcaaaaaaaaagaagttacttccaagacagacttttaacatgtaaccagcacaaagcaatgtcagggaggagtgatacatgacaataaatgagtcagatgagcaagaaggccccagaacccatgccccaaggcacaaagaggagctcagggtaggcccaaagattcgaattccttagattactaaatcacatgagcggaccttgtctgtcagataagatttttacctggaaattccatgaccaatacatgtgcaaaagaaaatgatgggttgaatttactgattattgacctaatggatggctttttaaaatgttttaataaaaagcagaatagatgtttgtttttctagtggttataccaagctatacttcctgttttcacgtgtgaaagtaacatgggacatgcctttcttttccgatcagtttatttaagctatacagcaaactttggcatttatgtggagcatttctcattgttggaatctgaataaaccaattacaaaataaaaa

SEQ ID NO: 1558 - protein, 393 aa, Homo sapien
MWWRVLSLLAWFPLQEASLTNHTETITVEEGQTLTLKCVTSLRKNSSLQWLTPSGFTIFLNEYPALKNSKYQLLHHSANQLSITVPNVTLQDEGVYKCLHYSDSVSTKEVKVIVLATPFKPILEASVIRKQNGEEHVVLMCSTMRSKPPPQITWLLGNSMEVSGGTLHEFETDGKKCNTTSTLIIHTYGKNSTVDCIIRHRGLQGRKLVAPFRFEDLVTDEETASDALERNSLSSQDPQQPTSTVSVTEDSSTSEIDKEEKEQTTQDPDLTTEANPQYLGLARKKSGILLLTLVSFLIFILFIIVQLFIMKLRKAHVIWKRENEVSEHTLESYRSRSNNEETSSEEKNGQSSHPMRCMNYITKLYSEAKTKRKENVQHSKLEEKHIQVPESIV

SEQ ID NO: 1559 - DNA, 1993 bp, Homo sapien
gctgcagaagctgccgccacctccaatgcacaaggtgtctcatctgaaaagaaacctgagccccagggaggcggcgcggagcgaccctggcagagctggcgcaaacagggcgagaggtcgctgggcagcgttcgaggaccagagggagctcggccacagaagaccccagtgatctgatcccgggatcccggctccaagctctcctcgcattttacagatttcacccccgcgactatctccccaaaacggagcctttatatcaagagaaggtgcgggagctggggcaaccaggactttctcgggcacccaagatgcgctccattaggaagaggtggacgatctgcacaataagtctgctcctgatcttttataagacaaaagaaatagcaagaactgaggagcaccaggagacgcaactcatcggagatggtgaattgtctttgagtcggtcacttgtcaatagctctgataaaatcattcgaaaggctggctcttcaatcttccagcacaatgtagaaggttggaaaatcaattcctctttggtcctagagataaggaagaacatacttcgtttcttagatgcagaacgagatgtgtcagtggtcaagagcagttttaagcctggtgatgtcatacactatgtgcttgacaggcgccggacactaaacatttctcatgatctacatagcctcctacctgaagtttcaccaatgaagaatcgcaggtttaagacctgtgcagttgttggaaattctggcattctgttagacagtgaatgtggaaaggagattgacagtcacaattttgtaataaggtgtaatctagctcctgtggtggagtttgctgcagatgtgggaactaaatcagattttattaccatgaatccatcagttgtacaaagagcatttggaggctttcgaaatgagagtgacagagaaaaatttgtgcatagactttccatgctgaatgacagtgtcctttggattcctgctttcatggtcaaaggaggagagaagcacgtggagtgggttaatgcattaatccttaagaataaactgaaagtgcgaactgcctatccgtcattgagacttattcatgctgtcagaggttactggctgaccaacaaagttcctatcaaaagacccagcacaggtcttctcatgtatacacttgccacaagattctgtgatgaaattcacctgtatggattctggcccttccctaaggatttaaatggaaaagcggtcaaatatcattattatgatgacttaaaatataggtacttttccaatgcaagccctcacagaatgccattagaattcaaaacattaaatgtgctacataatagaggagctctaaaactgacaacaggaaagtgtgtaaagcaataaagcacattttgaaacaaacaatatgcacttcttttctgaagatgcttccgaagatttgaaaataggatccaaaacacggctgggtttcagcatccaccaatgaactgaaaggtgaataaaggacgttcatgagaaatcgactaccagctgatgaaatacctgcaaagtgctctaaaaattaaatattttgactttaagggtcctagtaagtgccacttccactaagaatacagtttgaatgtataatcagtagtgtttacaagatccaacagtgcactcatcattagttaacaaagcaaatatgttcatcactgtcaggctgcccacagcaacaccaagcatattagaagaggaaccccaggaacgcaactcagaccttgggaaattaaaccatccttgtcagcagaagccaagatggaagcagtttgagcaatgaaatccgtaagattaaacaactcaagtaaatgcttcagtcaggactctgagtctgatcatgaattttatgttttaatttatgttttttttttgtcttctggaatctcttttggtttggatattgggatgcttagaaatcctttctgagatgcatatgagtgaggaaa

SEQ ID NO: 1560 - protein, 359 aa, Homo sapien
MRSIRKRWTICTISLLLIFYKTKEIARTEEHQETQLIGDGELSLSRSLVNSSDKIIRKAGSSIFQHNVEGWKINSSLVLEIRKNILRFLDAERDVSVVKSSFKPGDVIHYVLDRRRTLNISHDLHSLLPEVSPMKNRRFKTCAVVGNSGILLDSECGKEIDSHNFVIRCNLAPVVEFAADVGTKSDFITMNPSVVQRAFGGFRNESDREKFVHRLSMLNDSVLWIPAFMVKGGEKHVEWVNALILKNKLKVRTAYPSLRLIHAVRGYWLTNKVPIKRPSTGLLMYTLATRFCDEIHLYGFWPFPKDLNGKAVKYHYYDDLKYRYFSNASPHRMPLEFKTLNVLHNRGALKLTTGKCVKQ

SEQ ID NO: 1561 - DNA, 741 bp, Homo sapien
gagaaatttttcattttctttcttgtttgactgtatgcaaacatcaaactaagaatggcaaagatgaatctctcttcctatatattaatactaactttttctttgttttctcaaggtattttactttcagcatccaagtccataagaaatttagatgatgacatggtatttaatacattcaggttggggaaaggctttcagaaggaagacactgcagaaaaatcagttattgctccttccctggaacaatataaaaatgatgagagcagtttcatgaacgaagaggaaaataaagtttcaaagaacacaggctccaaacataatttcttaaatcatggtctgccactcaatctggctataaaaggatatcaagcactaaaaggatctgtagatttcccagctgagaatggagttcagaatactgaatcaacacaagaaaagagagaaattggggatgaagaaaactcagctaaatttcctataggaaggagagattttgacatgctcagatgtatgctcggaagagtctaccgaccctgttggcaagtctgatacctgttggtccacatcatcttttcagaagaaaataaaagcatttaattgccaatgggaggagaagcccatactgctactataacttgtgtatgttaaatgtctgttttaaaagaaagtagtgttaaatgtatcagtaactgaaatgatatgctttctctgtgcattaaatttgtgaaaattctgcat

SEQ ID NO: 1562 - protein, 165 aa, Homo sapien
MAKMNLSSYILILTFSLFSQGILLSASKSIRNLDDDMVFNTFRLGKGFQKEDTAEKSVIAPSLEQYKNDESSFMNEEENKVSKNTGSKHNFLNHGLPLNLAIKGYQALKGSVDFPAENGVQNTESTQEKREIGDEENSAKFPIGRRDFDMLRCMLGRVYRPCWQV

SEQ ID NO: 1563 - DNA, 1953 bp, Homo sapien
gcagaccttgcttcatgagcaagctcatctctggaacaaactggcaaagcatctctgctggtgttcatcagaacagacaccatggcagagcatgattaccatgaagactatgggttcagcagtttcaatgacagcagccaggaggagcatcaagacttcctgcagttcagcaaggtctttctgccctgcatgtacctggtggtgtttgtctgtggtctggtggggaactctctggtgctggtcatatccatcttctaccataagttgcagagcctgacggatgtgttcctggtgaacctacccctggctgacctggtgtttgtctgcactctgcccttctgggcctatgcaggcatccatgaatgggtgtttggccaggtcatgtgcaagagcctactgggcatctacactattaacttctacacgtccatgctcatcctcacctgcatcactgtggatcgtttcattgtagtggttaaggccaccaaggcctacaaccagcaagccaagaggatgacctggggcaaggtcaccagcttgctcatctgggtgatatccctgctggtttccttgccccaaattatctatggcaatgtctttaatctcgacaagctcatatgtggttaccatgacgaggcaatttccactgtggttcttgccacccagatgacactggggttcttcttgccactgctcaccatgattgtctgctattcagtcataatcaaaacactgcttcatgctggaggcttccagaagcacagatctctaaagatcatcttcctggtgatggctgtgttcctgctgacccagatgcccttcaacctcatgaagttcatccgcagcacacactgggaatactatgccatgaccagctttcactacaccatcatggtgacagaggccatcgcatacctgagggcctgccttaaccctgtgctctatgcctttgtcagcctgaagtttcgaaagaacttctggaaacttgtgaaggacattggttgcctcccttaccttggggtctcacatcaatggaaatcttctgaggacaattccaagactttttctgcctcccacaatgtggaggccaccagcatgttccagttataggccttgccagggtttcgagaagctgctctggaatttgcaagtcatggctgtgccctcttgatgtggtgaggcaggctttgtttatagcttgcgcattctcatggagaagttatcagacactctggctggtttggaatgcttcttctcaggcatgaacatgtactgttctcttcttgaacactcatgctgaaagcccaagtagggggtctaaaatttttaaggactttccttcctccatctccaagaatgctgaaaccaagggggatgacatgtgactcctatgatctcaggttctccttgattgggactggggctgaaggttgaagaggtgagcacggccaacaaagctgttgatggtaggtggcacactgggtgcccaagctcagaaggctcttctgactactgggcaaagagtgtagatcagagcagcagtgaaaacaagtgctggcaccaccaggcacctcacagaaatgagatcaggctctgcctcaccttggggcttgacttttgtataggtagatgttcagattgctttgattaatccagaataactagcaccagggactatgaatgggcaaaactgaattataagaggctgataattccagtggtccatggaatgcttgaaaaatgtgcaaaacagcgtttaagactgtaatgaatctaagcagcatttctgaagtggactctttggtggctttgcattttaaaaatgaaattttccaatgtctgccacacaaacgtatgtaaatgtatatacccacacacatacacacatatgtcatatattactagcatatgagtttcatagctaagaaataaaactgttaaagtctccaaact

SEQ ID NO: 1564 - protein, 342 aa, Homo sapien
MAEHDYHEDYGFSSFNDSSQEEHQDFLQFSKVFLPCMYLVVFVCGLVGNSLVLVISIFYHKLQSLTDVFLVNLPLADLVFVCTLPFWAYAGIHEWVFGQVMCKSLLGIYTINFYTSMLILTCITVDRFIVVVKATKAYNQQAKRMTWGKVTSLLIWVISLLVSLPQIIYGNVFNLDKLICGYHDEAISTVVLATQMTLGFFLPLLTMIVCYSVIIKTLLHAGGFQKHRSLKIIFLVMAVFLLTQMPFNLMKFIRSTHWEYYAMTSFHYTIMVTEAIAYLRACLNPVLYAFVSLKFRKNFWKLVKDIGCLPYLGVSHQWKSSEDNSKTFSASHNVEATSMFQL

SEQ ID NO: 1565 - DNA, 1386 bp, Homo sapien
gccccatctccttgggctgcccgtgcttcgtgctttggactaccgcccagcagtgtcctgccctctgcctgggcctcggtccctcctgcacctgctgcctggatccccggcctgcctgggcctgggccttggttctccccatgacaccacctgaacgtctcttcctcccaagggtgtgtggcaccaccctacacctcctccttctggggctgctgctggttctgctgcctggggcccaggggctccctggtgttggcctcacaccttcagctgcccagactgcccgtcagcaccccaagatgcatcttgcccacagcaccctcaaacctgctgctcacctcattggagaccccagcaagcagaactcactgctctggagagcaaacacggaccgtgccttcctccaggatggtttctccttgagcaacaattctctcctggtccccaccagtggcatctacttcgtctactcccaggtggtcttctctgggaaagcctactctcccaaggccacctcctccccactctacctggcccatgaggtccagctcttctcctcccagtaccccttccatgtgcctctcctcagctcccagaagatggtgtatccagggctgcaggaaccctggctgcactcgatgtaccacggggctgcgttccagctcacccagggagaccagctatccacccacacagatggcatcccccacctagtcctcagccctagtactgtcttctttggagccttcgctctgtagaacttggaaaaatccagaaagaaaaaataattgatttcaagaccttctccccattctgcctccattctgaccatttcaggggtcgtcaccacctctcctttggccattccaacagctcaagtcttccctgatcaagtcaccggagctttcaaagaaggaattctaggcatcccaggggaccacacctccctgaaccatccctgatgtctgtctggctgaggatttcaagcctgcctaggaattcccagcccaaagctgttggtctgtcccaccagctaggtggggcctagatccacacacagaggaagagcaggcacatggaggagcttgggggatgactagaggcagggaggggactatttatgaaggcaaaaaaattaaattatttatttatggaggatggagagaggggaataatagaagaacatccaaggagaaacagagacaggcccaagagatgaagagtgagagggcatgcgcacaaggctgaccaagagagaaagaagtaggcatgagggatcacagggccccagaaggcagggaaaggctctgaaagccagctgccgaccagagccccacacggaggcatctgcaccctcgatgaagcccaataaacctcttttctctg

SEQ ID NO: 1566 - protein, 205 aa, Homo sapien
MTPPERLFLPRVCGTTLHLLLLGLLLVLLPGAQGLPGVGLTPSAAQTARQHPKMHLAHSTLKPAAHLIGDPSKQNSLLWRANTDRAFLQDGFSLSNNSLLVPTSGIYFVYSQVVFSGKAYSPKATSSPLYLAHEVQLFSSQYPFHVPLLSSQKMVYPGLQEPWLHSMYHGAAFQLTQGDQLSTHTDGIPHLVLSPSTVFFGAFAL

SEQ ID NO: 1567 - DNA, 2273 bp, Homo sapien
caggactgcctgagacaagccacaagctgaacagagaaagtggattgaacaaggacgcatttccccagtacatccacaacatgctgtccacatctcgttctcggtttatcagaaataccaacgagagcggtgaagaagtcaccaccttttttgattatgattacggtgctccctgtcataaatttgacgtgaagcaaattggggcccaactcctgcctccgctctactcgctggtgttcatctttggttttgtgggcaacatgctggtcgtcctcatcttaataaactgcaaaaagctgaagtgcttgactgacatttacctgctcaacctggccatctctgatctgctttttcttattactctcccattgtgggctcactctgctgcaaatgagtgggtctttgggaatgcaatgtgcaaattattcacagggctgtatcacatcggttattttggcggaatcttcttcatcatcctcctgacaatcgatagatacctggctattgtccatgctgtgtttgctttaaaagccaggacggtcacctttggggtggtgacaagtgtgatcacctggttggtggctgtgtttgcttctgtcccaggaatcatctttactaaatgccagaaagaagattctgtttatgtctgtggcccttattttccacgaggatggaataatttccacacaataatgaggaacattttggggctggtcctgccgctgctcatcatggtcatctgctactcgggaatcctgaaaaccctgcttcggtgtcgaaacgagaagaagaggcatagggcagtgagagtcatcttcaccatcatgattgtttactttctcttctggactccctataacattgtcattctcctgaacaccttccaggaattcttcggcctgagtaactgtgaaagcaccagtcaactggaccaagccacgcaggtgacagagactcttgggatgactcactgctgcatcaatcccatcatctatgccttcgttggggagaagttcagaagcctttttcacatagctcttggctgtaggattgccccactccaaaaaccagtgtgtggaggtccaggagtgagaccaggaaagaatgtgaaagtgactacacaaggactcctcgatggtcgtggaaaaggaaagtcaattggcagagcccctgaagccagtcttcaggacaaagaaggagcctagagacagaaatgacagatctctgctttggaaatcacacgtctggcttcacagatgtgtgattcacagtgtgaatcttggtgtctacgttaccaggcaggaaggctgagaggagagagactccagctgggttggaaaacagtattttccaaactaccttccagttcctcatttttgaatacaggcatagagttcagactttttttaaatagtaaaaataaaattaaagctgaaaactgcaacttgtaaatgtggtaaagagttagtttgagttgctatcatgtcaaacgtgaaaatgctgtattagtcacagagataattctagctttgagcttaagaattttgagcaggtggtatgtttgggagactgctgagtcaacccaatagttgttgattggcaggagttggaagtgtgtgatctgtgggcacattagcctatgtgcatgcagcatctaagtaatgatgtcgtttgaatcacagtatacgctccatcgctgtcatctcagctggatctccattctctcaggcttgctgccaaaagccttttgtgttttgttttgtatcattatgaagtcatgcgtttaatcacattcgagtgtttcagtgcttcgcagatgtccttgatgctcatattgttccctaatttgccagtgggaactcctaaatcaaattggcttctaatcaaagcttttaaaccctattggtaaagaatggaaggtggagaagctccctgaagtaagcaaagactttcctcttagtcgagccaagttaagaatgttcttatgttgcccagtgtgtttctgatctgatgcaagcaagaaacactgggcttctagaaccaggcaacttgggaactagactcccaagctggactatggctctactttcaggccacatggctaaagaaggtttcagaaagaagtggggacagagcagaactttcaccttcatatatttgtatgatcctaatgaatgcataaaatgttaagttgatggtgatgaaatgtaaatactgtttttaacaactatgatttggaaaataaatcaatgctataactatgttgataaaag

SEQ ID NO: 1568 - protein, 374 aa, Homo sapien
MLSTSRSRFIRNTNESGEEVTTFFDYDYGAPCHKFDVKQIGAQLLPPLYSLVFIFGFVGNMLVVLILINCKKLKCLTDIYLLNLAISDLLFLITLPLWAHSAANEWVFGNAMCKLFTGLYHIGYFGGIFFIILLTIDRYLAIVHAVFALKARTVTFGVVTSVITWLVAVFASVPGIIFTKCQKEDSVYVCGPYFPRGWNNFHTIMRNILGLVLPLLIMVICYSGILKTLLRCRNEKKRHRAVRVIFTIMIVYFLFWTPYNIVILLNTFQEFFGLSNCESTSQLDQATQVTETLGMTHCCINPIIYAFVGEKFRSLFHIALGCRIAPLQKPVCGGPGVRPGKNVKVTTQGLLDGRGKGKSIGRAPEASLQDKEGA

SEQ ID NO: 1569 - DNA, 859 bp, Homo sapien
tggaaagggctgtcacccggcttggccccttccacacccaactggggcaagcctgacccggcgacaggaggcatgaggggcccccggccgaaatgacagtgctggcgccagcctggagcccaacaacctatctcctcctgctgctgctgctgagctcgggactcagtgggacccaggactgctccttccaacacagccccatctcctccgacttcgctgtcaaaatccgtgagctgtctgactacctgcttcaagattacccagtcaccgtggcctccaacctgcaggacgaggagctctgcggggcgctctggcggctggtcctggcacagcgctggatggagcggctcaagactgtcgctgggtccaagatgcaaggcttgctggagcgcgtgaacacggagatacactttgtcaccaaatgtgcctttcagcccccccccagctgtcttcgcttcgtccagaccaacatctcccgcctcctgcaggagacctccgagcagctggtggcgctgaagccctggatcactcgccagaacttctcccggtgcctggagctgcagtgtcagcccgactcctcaaccctgccacccccatggagtccccggcccctggaggccacagccccgacagccccgcagccccctctgctcctcctactgctgctgcccgtgggcctcctgctgctggccgctgcctggtgcctgcactggcagaggacgcggcggaggacaccccgccctggggagcaggtgccccccgtccccagtccccaggacctgctgcttgtggagcactgacctggccaaggcctcatcctggggaggatacgtaggcacacagaggggagtcaccagcc

SEQ ID NO: 1570 - protein, 235 aa, Homo sapien
MTVLAPAWSPTTYLLLLLLLSSGLSGTQDCSFQHSPISSDFAVKIRELSDYLLQDYPVTVASNLQDEELCGALWRLVLAQRWMERLKTVAGSKMQGLLERVNTEIHFVTKCAFQPPPSCLRFVQTNISRLLQETSEQLVALKPWITRQNFSRCLELQCQPDSSTLPPPWSPRPLEATAPTAPQPPLLLLLLLPVGLLLLAAAWCLHWQRTRRRTPRPGEQVPPVPSPQDLLLVEH

SEQ ID NO: 1571 - DNA, 3655 bp, Homo sapien
cttcagatagattatatctggagtgaaggatcctgccacctacgtatctggcatagtattctgtgtagtgggatgagcagagaacaaaaacaaaataatccagtgagaaaagcccgtaaataaaccttcagaccagagatctattctccagcttattttaagctcaacttaaaaagaagaactgttctctgattcttttcgccttcaatacacttaatgatttaactccaccctccttcaaaagaaacagcatttcctacttttatactgtctatatgattgatttgcacagctcatctggccagaagagctgagacatccgttcccctacaagaaactctccccgggtggaacaagatggattatcaagtgtcaagtccaatctatgacatcaattattatacatcggagccctgccaaaaaatcaatgtgaagcaaatcgcagcccgcctcctgcctccgctctactcactggtgttcatctttggttttgtgggcaacatgctggtcatcctcatcctgataaactgcaaaaggctgaagagcatgactgacatctacctgctcaacctggccatctctgacctgtttttccttcttactgtccccttctgggctcactatgctgccgcccagtgggactttggaaatacaatgtgtcaactcttgacagggctctattttataggcttcttctctggaatcttcttcatcatcctcctgacaatcgataggtacctggctgtcgtccatgctgtgtttgctttaaaagccaggacggtcacctttggggtggtgacaagtgtgatcacttgggtggtggctgtgtttgcgtctctcccaggaatcatctttaccagatctcaaaaagaaggtcttcattacacctgcagctctcattttccatacagtcagtatcaattctggaagaatttccagacattaaagatagtcatcttggggctggtcctgccgctgcttgtcatggtcatctgctactcgggaatcctaaaaactctgcttcggtgtcgaaatgagaagaagaggcacagggctgtgaggcttatcttcaccatcatgattgtttattttctcttctgggctccctacaacattgtccttctcctgaacaccttccaggaattctttggcctgaataattgcagtagctctaacaggttggaccaagctatgcaggtgacagagactcttgggatgacgcactgctgcatcaaccccatcatctatgcctttgtcggggagaagttcagaaactacctcttagtcttcttccaaaagcacattgccaaacgcttctgcaaatgctgttctattttccagcaagaggctcccgagcgagcaagctcagtttacacccgatccactggggagcaggaaatatctgtgggcttgtgacacggactcaagtgggctggtgacccagtcagagttgtgcacatggcttagttttcatacacagcctgggctgggggtggggtgggagaggtcttttttaaaaggaagttactgttatagagggtctaagattcatccatttatttggcatctgtttaaagtagattagatcttttaagcccatcaattatagaaagccaaatcaaaatatgttgatgaaaaatagcaacctttttatctccccttcacatgcatcaagttattgacaaactctcccttcactccgaaagttccttatgtatatttaaaagaaagcctcagagaattgctgattcttgagtttagtgatctgaacagaaataccaaaattatttcagaaatgtacaactttttacctagtacaaggcaacatataggttgtaaatgtgtttaaaacaggtctttgtcttgctatggggagaaaagacatgaatatgattagtaaagaaatgacacttttcatgtgtgatttcccctccaaggtatggttaataagtttcactgacttagaaccaggcgagagacttgtggcctgggagagctggggaagcttcttaaatgagaaggaatttgagttggatcatctattgctggcaaagacagaagcctcactgcaagcactgcatgggcaagcttggctgtagaaggagacagagctggttgggaagacatggggaggaaggacaaggctagatcatgaagaaccttgacggcattgctccgtctaagtcatgagctgagcagggagatcctggttggtgttgcagaaggtttactctgtggccaaaggagggtcaggaaggatgagcatttagggcaaggagaccaccaacagccctcaggtcagggtgaggatggcctctgctaagctcaaggcgtgaggatgggaaggagggaggtattcgtaaggatgggaaggagggaggtattcgtgcagcatatgaggatgcagagtcagcagaactggggtggatttggtttggaagtgagggtcagagaggagtcagagagaatccctagtcttcaagcagattggagaaacccttgaaaagacatcaagcacagaaggaggaggaggaggtttaggtcaagaagaagatggattggtgtaaaaggatgggtctggtttgcagagcttgaacacagtctcacccagactccaggctgtctttcactgaatgcttctgacttcatagatttccttcccatcccagctgaaatactgaggggtctccaggaggagactagatttatgaatacacgaggtatgaggtctaggaacatacttcagctcacacatgagatctaggtgaggattgattacctagtagtcatttcatgggttgttgggaggattctatgaggcaaccacaggcagcatttagcacatactacacattcaataagcatcaaactcttagttactcattcagggatagcactgagcaaagcattgagcaaaggggtcccatataggtgagggaagcctgaaaaactaagatgctgcctgcccagtgcacacaagtgtaggtatcattttctgcatttaaccgtcaataggcaaaggggggaagggacatattcatttggaaataagctgccttgagccttaaaacccacaaaagtacaatttaccagcctccgtatttcagactgaatgggggtggggggggcgccttaggtacttattccagatgccttctccagacaaaccagaagcaacagaaaaaatcgtctctccctccctttgaaatgaatataccccttagtgtttgggtatattcatttcaaagggagagagagaggtttttttctgttctttctcatatgattgtgcacatacttgagactgttttgaatttgggggatggctaaaaccatcatagtacaggtaaggtgagggaatagtaagtggtgagaactactcagggaatgaaggtgtcagaataataagaggtgctactgactttctcagcctctgaatatgaacggtgagcattgtggctgtcagcaggaagcaacgaagggaaatgtctttccttttgctcttaagttgtggagagtgcaacagtagcataggaccctaccctctgggccaagtcaaagacattctgacatcttagtatttgcatattcttatgtatgtgaaagttacaaattgcttgaaagaaaatatgcatctaataaaaaacaccttcta

SEQ ID NO: 1572 - protein, 352 aa, Homo sapien [sequence omitted]

SEQ ID NO: 1573 - DNA, 4040 bp, Homo sapien
tgcagagcacagagaaaggacatctgcgaggaaagttccctgatggctgtcaacaaagtgccacgtctctatggctgtgaacgctgagcacacgattttatcgcgcctatcatatcttggtgcataaacgcacctcacctcggtcaacccttgctccgtcttatgagacaggctttattatccgcattttatatgaggggaaactgacggtggagagagaattatcttgctcaaggcgacacagcagagcccacaggtggcagaatcccacccgagcccgcttcgacccgcggggtggaaaccacgggcgcccgcccggctgcgcttccagagctgaactgagaagcgagtcctctccgccctgcggccaccgcccagccccgacccccgccccggcccgatcctcactcgccgccagctccccgcgcccaccccggagttggtggcgcagaggcgggaggcggaggcgggagggcgggcgctggcaccgggaacgcccgagcgccggcagagagcgcggagagcgcgacacgtgcggcccagagcaccggggccacccggtccccgcaggcccgggaccgcgcccgctggcaggcgacacgtggaagaatacggagttctataccagagttgattgttgatggcacatacttttagaggatgctcattggcatttatgtttataatcacgtggctgttgattaaagcaaaaatagatgcgtgcaagagaggcgatgtgactgtgaagccttcccatgtaattttacttggatccactgtcaatattacatgctctttgaagcccagacaaggctgctttcactattccagacgtaacaagttaatcctgtacaagtttgacagaagaatcaattttcaccatggccactccctcaattctcaagtcacaggtcttccccttggtacaaccttgtttgtctgcaaactggcctgtatcaatagtgatgaaattcaaatatgtggagcagagatcttcgttggtgttgctccagaacagcctcaaaatttatcctgcatacagaagggagaacaggggactgtggcctgcacctgggaaagaggacgagacacccacttatacactgagtatactctacagctaagtggaccaaaaaatttaacctggcagaagcaatgtaaagacatttattgtgactatttggactttggaatcaacctcacccctgaatcacctgaatccaatttcacagccaaggttactgctgtcaatagtcttggaagctcctcttcacttccatccacattcacattcttggacatagtgaggcctcttcctccgtgggacattagaatcaaatttcaaaaggcttctgtgagcagatgtaccctttattggagagatgagggactggtactgcttaatcgactcagatatcggcccagtaacagcaggctctggaatatggttaatgttacaaaggccaaaggaagacatgatttgctggatctgaaaccatttacagaatatgaatttcagatttcctctaagctacatctttataagggaagttggagtgattggagtgaatcattgagagcacaaacaccagaagaagagcctactgggatgttagatgtctggtacatgaaacggcacattgactacagtagacaacagatttctcttttctggaagaatctgagtgtctcagaggcaagaggaaaaattctccactatcaggtgaccttgcaggagctgacaggagggaaagccatgacacagaacatcacaggacacacctcctggaccacagtcattcctagaaccggaaattgggctgtggctgtgtctgcagcaaattcaaaaggcagttctctgcccactcgtattaacataatgaacctgtgtgaggcagggttgctggctcctcgccaggtctctgcaaactcagagggcatggacaacattctggtgacttggcagcctcccaggaaagatccctctgctgttcaggagtacgtggtggaatggagagagctccatccagggggtgacacacaggtccctctaaactggctacggagtcgaccctacaatgtgtctgctctgatttcagagaacataaaatcctacatctgttatgaaatccgtgtgtatgcactctcaggggatcaaggaggatgcagctccatcctgggtaactctaagcacaaagcaccactgagtggcccccacattaatgccatcacagaggaaaaggggagcattttaatttcatggaacagcattccagtccaggagcaaatgggctgcctcctccattataggatatactggaaggaacgggactccaactcccagcctcagctctgtgaaattccctacagagtctcccaaaattcacatccaataaacagcctgcagccccgagtgacatatgtcctgtggatgacagctctgacagctgctggtgaaagttcccacggaaatgagagggaattttgtctgcaaggtaaagccaattggatggcgtttgtggcaccaagcatttgcattgctatcatcatggtgggcattttctcaacgcattacttccagcaaaaggtgtttgttctcctagcagccctcagacctcagtggtgtagcagagaaattccagatccagcaaatagcacttgcgctaagaaatatcccattgcagaggagaagacacagctgcccttggacaggctcctgatagactggcccacgcctgaagatcctgaaccgctggtcatcagtgaagtccttcatcaagtgaccccagttttcagacatcccccctgctccaactggccacaaagggaaaaaggaatccaaggtcatcaggcctctgagaaagacatgatgcacagtgcctcaagcccaccacctccaagagctctccaagctgagagcagacaactggtggatctgtacaaggtgctggagagcaggggctccgacccaaagcccgaaaacccagcctgtccctggacggtgctcccagcaggtgaccttcccacccatgatggctacttaccctccaacatagatgacctcccctcacatgaggcacctctcgctgactctctggaagaactggagcctcagcacatctccctttctgttttcccctcaagttctcttcacccactcaccttctcctgtggtgataagctgactctggatcagttaaagatgaggtgtgactccctcatgctctgagtggtgaggcttcaagccttaaagtcagtgtgccctcaaccagcacagcctgccccaattcccccagcccctgctccagcagctgtcatctctgggtgccaccatcggtctggctgcagctagaggacaggcaagccagctctgggggagtcttaggaactgggagttggtcttcactcagatgcctcatcttgcctttcccagggccttaaaattacatccttcactgtgtggacctagagactccaacttgaattcctagtaactttcttggtatgctggccagaaagggaaatgaggaggagagtagaaaccacagctcttagtagtaatggcatacagtctagaggaccattcatgcaatgactatttctaaagcacctgctacacagcaggctgtacacagcagatcagtactgttcaacagaacttcctgagatgatggaaatgttctacctctgcactcactgtccagtacattagacactaggcacattggctgttaatcacttggaatgtgtttagcttgactgaggaattaaattttgattgtaaatttaaatcgccacacatggctagtggctactgtattggagtgcacagctctagatggctcctagattattgagagccttcaaaacaaatcaacctagttctatagatgaagacataaaagacactggtaaacaccaaggtaaaagggcccccaaggtggtcatgactggtctcatttgcagaagtctaagaatgtacctttttctggccgggcgtggtagctcatgcctgtaatcccagcactttgggaggctga

SEQ ID NO: 1574 - protein, 862 aa, Homo sapien
MAHTFRGCSLAFMFIITWLLIKAKIDACKRGDVTVKPSHVILLGSTVNITCSLKPRQGCFHYSRRNKLILYKFDRRINFHHGHSLNSQVTGLPLGTTLFVCKLACINSDEIQICGAEIFVGVAPEQPQNLSCIQKGEQGTVACTWERGRDTHLYTEYTLQLSGPKNLTWQKQCKDIYCDYLDFGINLTPESPESNFTAKVTAVNSLGSSSSLPSTFTFLDIVRPLPPWDIRIKFQKASVSRCTLYWRDEGLVLLNRLRYRPSNSRLWNMVNVTKAKGRHDLLDLKPFTEYEFQISSKLHLYKGSWSDWSESLRAQTPEEEPTGMLDVWYMKRHIDYSRQQISLFWKNLSVSEARGKILHYQVTLQELTGGKAMTQNITGHTSWTTVIPRTGNWAVAVSAANSKGSSLPTRINIMNLCEAGLLAPRQVSANSEGMDNILVTWQPPRKDPSAVQEYVVEWRELHPGGDTQVPLNWLRSRPYNVSALISENIKSYICYEIRVYALSGDQGGCSSILGNSKHKAPLSGPHINAITEEKGSILISWNSIPVQEQMGCLLHYRIYWKERDSNSQPQLCEIPYRVSQNSHPINSLQPRVTYVLWMTALTAAGESSHGNEREFCLQGKANWMAFVAPSICIAIIMVGIFSTHYFQQKVFVLLAALRPQWCSREIPDPANSTCAKKYPIAEEKTQLPLDRLLIDWPTPEDPEPLVISEVLHQVTPVFRHPPCSNWPQREKGIQGHQASEKDMMHSASSPPPPRALQAESRQLVDLYKVLESRGSDPKPENPACPWTVLPAGDLPTHDGYLPSNIDDLPSHEAPLADSLEELEPQHISLSVFPSSSLHPLTFSCGDKLTLDQLKMRCDSLML

SEQ ID NO: 1575 - DNA, 1365 bp, Homo sapien
gtggagcccgggagttccagggcttgggaaggggaaggaaacctctctgaaatctgacacctgctctcccggcaaggaaacttcgcaggctgaccgaccaagaccatcactatgaccgatggagactatgattatctgatcaaactcctggccctcggggattcaggggtggggaagacaacatttctttatagatacacagataataaattcaatcccaaattcatcactacagtaggaatagactttcgggaaaaacgtgtggtttataatgcacaaggaccgaatggatcttcagggaaagcatttaaagtgcatcttcagctttgggacactgcgggacaagagcggttccggagtctcaccactgcatttttcagagacgccatgggcttcttattaatgtttgacctcaccagtcaacagagcttcttaaatgtcagaaactggatgagccaactgcaagcaaatgcttattgtgaaaatccagatatagtattaattggcaacaaggcagacctaccagatcagagggaagtcaatgaacggcaagctcgggaactggctgacaaatatggcataccatattttgaaacaagtgcagcaactggacagaatgtggagaaagctgtagaaacccttttggacttaatcatgaagcgaatggaacagtgtgtggagaagacacaaatccctgatactgtcaatggtggaaattctggaaacttggatggggaaaagccaccagagaagaaatgtatctgctagactctacatagaaactgaacatcaagaaccccaccaaaatattacttttaaaaacaatgacaaaccacacaattgttgttgagtaaaccacgcacaatggcatgtctttctttttctgccagaaaatctattttaagaaaccagaatagtcaacagtgttcaaaagaattgactagttatccctgaggccctttcaaacatgatcaaagatttcccaatgtgatctcatcatcatggatactcaatttgttttttcttatagagaaaatgagtatataagacaatatacaagaagaaatatcagtgagttttaaatcagaacaagttacctgtcacattgaagaaaagggtaggcactaaagggagaacacagaaagaagaatttctaaaatattggatttacttcttatattgagtcagatgcatacttttagatttgcattggggaaaatgtactagctaaaaatggatacacaatgaagaattctatttggctaattaagaatgatatactatgtacacccaataagctgtactagaatgaataaattactgataaggttccaaaaaaaaaaaaaaaaaaaaaaaaaaaaaaaa

SEQ ID NO: 1576 - protein, 218 aa, Homo sapien
MTDGDYDYLIKLLALGDSGVGKTTFLYRYTDNKFNPKFITTVGIDFREKRVVYNAQGPNGSSGKAFKVHLQLWDTAGQERFRSLTTAFFRDAMGFLLMFDLTSQQSFLNVRNWMSQLQANAYCENPDIVLIGNKADLPDQREVNERQARELADKYGIPYFETSAATGQNVEKAVETLLDLIMKRMEQCVEKTQIPDTVNGGNSGNLDGEKPPEKKCIC

SEQ ID NO: 1577 - DNA, 3133 bp, Homo sapien
ccgctgaggccgcggcgcccgccagcctgtcccgcgccatggccccgcgcgcccggcggcgccgcccgctgttcgcgctgctgctgctctgcgcgctgctcgcccggctgcaggtggctttgcagatcgctcctccatgtaccagtgagaagcattatgagcatctgggacggtgctgtaacaaatgtgaaccaggaaagtacatgtcttctaaatgcactactacctctgacagtgtatgtctgccctgtggcccggatgaatacttggatagctggaatgaagaagataaatgcttgctgcataaagtttgtgatacaggcaaggccctggtggccgtggtcgccggcaacagcacgaccccccggcgctgcgcgtgcacggctgggtaccactggagccaggactgcgagtgctgccgccgcaacaccgagtgcgcgccgggcctgggcgcccagcacccgttgcagctcaacaaggacacagtgtgcaaaccttgccttgcaggctacttctctgatgccttttcctccacggacaaatgcagaccctggaccaactgtaccttccttggaaagagagtagaacatcatgggacagagaaatccgatgcggtttgcagttcttctctgccagctagaaaaccaccaaatgaaccccatgtttacttgcccggtttaataattctgcttctcttcgcgtctgtggccctggtggctgccatcatctttggcgtttgctataggaaaaaagggaaagcactcacagctaatttgtggcactggatcaatgaggcttgtggccgcctaagtggagataaggagtcctcaggtgacagttgtgtcagtacacacacggcaaactttggtcagcagggagcatgtgaaggtgtcttactgctgactctggaggagaagacatttccagaagatatgtgctacccagatcaaggtggtgtctgtcagggcacatgtgtaggaggtggtccctacgcacaaggcgaagatgccaggatgctctcattggtcagcaagaccgagatagaggaagacagcttcagacagatgcccacagaagatgaatacatggacaggccctcccagcccacagaccagttactgttcctcactgagcctggaagcaaatccacacctcctttctctgaacccctggaggtgggggagaatgacagtttaagccagtgcttcacggggacacagagcacagtgggttcagaaagctgcaactgcactgagcccctgtgcaggactgattggactcccatgtcctctgaaaactacttgcaaaaagaggtggacagtggccattgcccgcactgggcagccagccccagccccaactgggcagatgtctgcacaggctgccggaaccctcctggggaggactgtgaacccctcgtgggttccccaaaacgtggacccttgccccagtgcgcctatggcatgggccttccccctgaagaagaagccagcaggacggaggccagagaccagcccgaggatggggctgatgggaggctcccaagctcagcgagggcaggtgccgggtctggaagctcccctggtggccagtcccctgcatctggaaatgtgactggaaacagtaactccacgttcatctccagcgggcaggtgatgaacttcaagggcgacatcatcgtggtctacgtcagccagacctcgcaggagggcgcggcggcggctgcggagcccatgggccgcccggtgcaggaggagaccctggcgcgccgagactccttcgcggggaacggcccgcgcttcccggacccgtgcggcggccccgaggggctgcgggagccggagaaggcctcgaggccggtgcaggagcaaggcggggccaaggcttgagcgccccccatggctgggagcccgaagctcggagccagggctcgcgagggcagcaccgcagcctctgccccagccccggccacccagggatcgatcggtacagtcgaggaagaccacccggcattctctgcccactttgccttccaggaaatgggcttttcaggaagtgaattgatgaggactgtccccatgcccacggatgctcagcagcccgccgcactggggcagatgtctcccctgccactcctcaaactcgcagcagtaatttgtggcactatgacagctatttttatgactatcctgttctgtgggggggggggtctgttttccccccatatttgtattccttttcataacttttcttgatatctttcctccctcttttttaatgtaaaggttttctcaaaaattctcctaaaggtgagggtctctttcttttctcttttccttttttttttctttttttggcaacctggctctggcccaggctagagtgcagtggtgcgattatagcccggtgcagcctctaactcctgggctcaagcaatccaagtgatcctcccacctcaaccttcggagtagctgggatcacagctgcaggccacgcccagcttcctccccccgactccccccccagagacacggtcccaccatgttacccagcctggtctcaaactccccagctaaagcagtcctccagcctcggcctcccaaagtactgggattacaggcgtgagcccccacgctggcctgctttacgtattttcttttgtgcccctgctcacagtgttttagagatggctttcccagtgtgtgttcattgtaaacacttttgggaaagggctaaacatgtgaggcctggagatagttgctaagttgctaggaacatgtggtgggactttcatattctgaaaaatgttctatattctcatttttctaaaagaaagaaaaaaggaaacccgatttatttctcctgaatctttttaagtttgtgtcgttccttaagcagaactaagctcagtatgtgaccttacccgctaggtggttaatttatccatgctggcagaggcactcaggtacttggtaagcaaatttctaaaactccaagttgctgcagcttggcattcttcttattctagaggtctctctggaaaagatggagaaaatgaacaggacatggggctcctggaaagaaagggcccgggaagttcaaggaagaataaagttgaaattttaaaaaaaaa

SEQ ID NO: 1578 - protein, 616 aa, Homo sapien
MAPRARRRRPLFALLLLCALLARLQVALQIAPPCTSEKHYEHLGRCCNKCEPGKYMSSKCTTTSDSVCLPCGPDEYLDSWNEEDKCLLHKVCDTGKALVAVVAGNSTTPRRCACTAGYHWSQDCECCRRNTECAPGLGAQHPLQLNKDTVCKPCLAGYFSDAFSSTDKCRPWTNCTFLGKRVEHHGTEKSDAVCSSSLPARKPPNEPHVYLPGLIILLLFASVALVAAIIFGVCYRKKGKALTANLWHWINEACGRLSGDKESSGDSCVSTHTANFGQQGACEGVLLLTLEEKTFPEDMCYPDQGGVCQGTCVGGGPYAQGEDARMLSLVSKTEIEEDSFRQMPTEDEYMDRPSQPTDQLLFLTEPGSKSTPPFSEPLEVGENDSLSQCFTGTQSTVGSESCNCTEPLCRTDWTPMSSENYLQKEVDSGHCPHWAASPSPNWADVCTGCRNPPGEDCEPLVGSPKRGPLPQCAYGMGLPPEEEASRTEARDQPEDGADGRLPSSARAGAGSGSSPGGQSPASGNVTGNSNSTFISSGQVMNFKGDIIVVYVSQTSQEGAAAAAEPMGRPVQEETLARRDSFAGNGPRFPDPCGGPEGLREPEKASRPVQEQGGAKA

SEQ ID NO: 1579 - DNA, 2668 bp, Homo sapien
ctctctggataggaagaaatatagtagaaccctttgaaaatggatattttcacatattttcgttcagatacaaaagctggcagttactgaaataaggacttgaagttccttcctcttttttttatgtcttaagagcaggaaataaagagacagctgaaggtgtagccttgaccaactgaaagggaaatcttcatcctctgaaaaaacatatgtgattctcaaaaaacgcatctggaaaattgataaagaagcgattctgtagattctcccagcgctgttgggctctcaattccttctgtgaaggacaacatatggtgatggggaaatcagaagctttgagaccctctacacctggatatgaatcccccttctaatacttaccagaaatgaaggggatactcagggcagagttctgaatctcaaaacactctactctggcaaaggaatgaagttattggagtgatgacaggaacacgggagaacaatgctctgtttgggctggatatttctttggcttgttgcaggagagcgaattaaaggatttaatatttcaggttgttccacaaaaaaactcctttggacatattctacaaggagtgaagaggaatttgtcttattttgtgatttaccagagccacagaaatcacatttctgccacagaaatcgactctcaccaaaacaagtccctgagcacctgcccttcatgggtagtaacgacctatctgatgtccaatggtaccaacaaccttcgaatggagatccattagaggacattaggaaaagctatcctcacatcattcaggacaaatgtacccttcactttttgaccccaggggtgaataattctgggtcatatatttgtagacccaagatgattaagagcccctatgatgtagcctgttgtgtcaagatgattttagaagttaagccccagacaaatgcatcctgtgagtattccgcatcacataagcaagacctacttcttgggagcactggctctatttcttgccccagtctcagctgccaaagtgatgcacaaagtccagcggtaacctggtacaagaatggaaaactcctctctgtggaaaggagcaaccgaatcgtagtggatgaagtttatgactatcaccagggcacatatgtatgtgattacactcagtcggatactgtgagttcgtggacagtcagagctgttgttcaagtgagaaccattgtgggagacactaaactcaaaccagatattctggatcctgtcgaggacacactggaagtagaacttggaaagcctttaactattagctgcaaagcacgatttggctttgaaagggtctttaaccctgtcataaaatggtacatcaaagattctgacctagagtgggaagtctcagtacctgaggcgaaaagtattaaatccactttaaaggatgaaatcattgagcgtaatatcatcttggaaaaagtcactcagcgtgatcttcgcaggaagtttgtttgctttgtccagaactccattggaaacacaacccagtccgtccaactgaaagaaaagagaggagtggtgctcctgtacatcctgcttggcaccatcgggaccctggtggccgtgctggcggcgagtgccctcctctacaggcactggattgaaatagtgctgctgtaccggacctaccagagcaaggatcagacgcttggggataaaaaggattttgatgctttcgtatcctatgcaaaatggagctcttttccaagtgaggccacttcatctctgagtgaagaacacttggccctgagcctatttcctgatgttttagaaaacaaatatggatatagcctgtgtttgcttgaaagagatgtggctccaggaggagtgtatgcagaagacattgtgagcattattaagagaagcagaagaggaatatttatcttgagccccaactatgtcaatggacccagtatctttgaactacaagcagcagtgaatcttgccttggatgatcaaacactgaaactcattttaattaagttctgttacttccaagagccagagtctctacctcatctcgtgaaaaaagctctcagggttttgcccacagttacttggagaggcttaaaatcagttcctcccaattctaggttctgggccaaaatgcgctaccacatgcctgtgaaaaactctcagggattcacgtggaaccagctcagaattacctctaggatttttcagtggaaaggactcagtagaacagaaaccactgggaggagctcccagcctaaggaatggtgaaatgagccctggagccccctccagtccagtccctgggatagagatgttgctggacagaactcacagctctgtgtgtgtgtgttcaggctgataggaaattcaaagagtctcctgccagcaccaagcaagcttgatggacaatggagtgggattgagactgtggtttagagcctttgatttcctggactggactgacggcgagtgaattctctagaccttgggtactttcagtacacaacacccctaagatttcccagtggtccgagcagaatcagaaaatacagctacttctgccttatggctagggaactgtcatgtctaccatgtattgtacatatgactttatgtatacttgcaatcaaataaatattattttattagaaa

SEQ ID NO: 1580 - protein, 599 aa, Homo sapien
MLCLGWIFLWLVAGERIKGFNISGCSTKKLLWTYSTRSEEEFVLFCDLPEPQKSHFCHRNRLSPKQVPEHLPFMGSNDLSDVQWYQQPSNGDPLEDIRKSYPHIIQDKCTLHFLTPGVNNSGSYICRPKMIKSPYDVACCVKMILEVKPQTNASCEYSASHKQDLLLGSTGSISCPSLSCQSDAQSPAVTWYKNGKLLSVERSNRIVVDEVYDYHQGTYVCDYTQSDTVSSWTVRAVVQVRTIVGDTKLKPDILDPVEDTLEVELGKPLTISCKARFGFERVFNPVIKWYIKDSDLEWEVSVPEAKSIKSTLKDEIIERNIILEKVTQRDLRRKFVCFVQNSIGNTTQSVQLKEKRGVVLLYILLGTIGTLVAVLAASALLYRHWIEIVLLYRTYQSKDQTLGDKKDFDAFVSYAKWSSFPSEATSSLSEEHLALSLFPDVLENKYGYSLCLLERDVAPGGVYAEDIVSIIKRSRRGIFILSPNYVNGPSIFELQAAVNLALDDQTLKLILIKFCYFQEPESLPHLVKKALRVLPTVTWRGLKSVPPNSRFWAKMRYHMPVKNSQGFTWNQLRITSRIFQWKGLSRTETTGRSSQPKEW

SEQ ID NO: 1581 - DNA, 942 bp, Homo sapien
actcagggcagagcctggctgctgggcagaagggcacttgggcgggctgcttcagagagggccattcggtgtcctggcccacagagagagtaaacagtgagagaccaagagagcaaaccagagagatagggagggggaatgcaaggggtccctgggggactcaggggtcccagtggagaatgagaggcaggccccccgtggtgggccggggacctggctgccagaggaccgggctggtgaggaggcgaggatgtggactttcgtcacccagctgttggtcacgctggtgctgctgagcttcttcctggtcagctgtcagaacgtgatgcacattgtcagggggtccctgtgctttgtgctaaagcacatccaccaggtggagctgagagggagtggcctacagccggacctgatagagggcaggaagggggcgcagatagtgaagcgggccagcctgaaaagggggaaacagtgaccccgagccgctctccttggagtagcctctcgggaggatcacacctcgacacccaacccctgaaccccacacactctctgccatgcacacaggaggagagctggacctgagggccaccgcagcggtgcacacattcctctgggctgacggcatgacctctgtaagggactcctgctagtcccctcttggcatgaatgactgactgtagacgcatgacctccaggcttcaatcctgcctcttgcaatgacagctgatctgtcggaaccaggacacaaaagcagcaagaagcggggagagagagggatagaaaacaagcgcaggagagcctgcgaacgcaaaagtgaatgagggctttttgtggctggggatgggttttggttttggggttttttttttaaattgttttgacttcgtacagggtactttttcccaacctcatctgtcagaaatccatgtgggcttcctg

SEQ ID NO: 1582 - protein, 74 aa, Homo sapien
MWTFVTQLLVTLVLLSFFLVSCQNVMHIVRGSLCFVLKHIHQVELRGSGLQPDLIEGRKGAQIVKRASLKRGKQ

SEQ ID NO: 1583 - DNA, 1669 bp, Homo sapien
ctccctcagcaaggacagcagaggaccagctaagagggagagaagcaactacagaccccccctgaaaacaaccctcagacgccacatcccctgacaagctgccaggcaggttctcttcctctcacatactgacccacggctccaccctctctcccctggaaaggacaccatgagcactgaaagcatgatccgggacgtggagctggccgaggaggcgctccccaagaagacaggggggccccagggctccaggcggtgcttgttcctcagcctcttctccttcctgatcgtggcaggcgccaccacgctcttctgcctgctgcactttggagtgatcggcccccagagggaagagttccccagggacctctctctaatcagccctctggcccaggcagtcagatcatcttctcgaaccccgagtgacaagcctgtagcccatgttgtagcaaaccctcaagctgaggggcagctccagtggctgaaccgccgggccaatgccctcctggccaatggcgtggagctgagagataaccagctggtggtgccatcagagggcctgtacctcatctactcccaggtcctcttcaagggccaaggctgcccctccacccatgtgctcctcacccacaccatcagccgcatcgccgtctcctaccagaccaaggtcaacctcctctctgccatcaagagcccctgccagagggagaccccagagggggctgaggccaagccctggtatgagcccatctatctgggaggggtcttccagctggagaagggtgaccgactcagcgctgagatcaatcggcccgactatctcgactttgccgagtctgggcaggtctactttgggatcattgccctgtgaggaggacgaacatccaaccttcccaaacgcctcccctgccccaatccctttattaccccctccttcagacaccctcaacctcttctggctcaaaaagagaattgggggcttagggtcggaacccaagcttagaactttaagcaacaagaccaccacttcgaaacctgggattcaggaatgtgtggcctgcacagtgaagtgctggcaaccactaagaattcaaactggggcctccagaactcactggggcctacagctttgatccctgacatctggaatctggagaccagggagcctttggttctggccagaatgctgcaggacttgagaagacctcacctagaaattgacacaagtggaccttaggccttcctctctccagatgtttccagacttccttgagacacggagcccagccctccccatggagccagctccctctatttatgtttgcacttgtgattatttattatttatttattatttatttatttacagatgaatgtatttatttgggagaccggggtatcctgggggacccaatgtaggagctgccttggctcagacatgttttccgtgaaaacggagctgaacaataggctgttcccatgtagccccctggcctctgtgccttcttttgattatgttttttaaaatatttatctgattaagttgtctaaacaatgctgatttggtgaccaactgtcactcattgctgagcctctgctccccaggggagttgtgtctgtaatcgccctactattcagtggcgagaaataaagtttgcttagaaaagaa

SEQ ID NO: 1584 - protein, 233 aa, Homo sapien
MSTESMIRDVELAEEALPKKTGGPQGSRRCLFLSLFSFLIVAGATTLFCLLHFGVIGPQREEFPRDLSLISPLAQAVRSSSRTPSDKPVAHVVANPQAEGQLQWLNRRANALLANGVELRDNQLVVPSEGLYLIYSQVLFKGQGCPSTHVLLTHTISRIAVSYQTKVNLLSAIKSPCQRETPEGAEAKPWYEPIYLGGVFQLEKGDRLSAEINRPDYLDFAESGQVYFGIIAL

SEQ ID NO: 1585 - DNA, 2564 bp, Homo sapien
aatagcaatagctttatagcagctccggttacctgttttaaacatggaaggagagtcgctcccagatagccctcacgagtggccctggagcagggagtggtggagcagatcttccttgtttgggaggagcctgaggtggacctcgcgtcctgagtctggaaggcacctatggggacctgctggggtgatatctcagaaaatgtgagagtagaagttcccaatacagactgcagcctacctaccaaagtcttctggattgctggaattgtaaaattagcaggttacaatgcccttttaagatatgaaggatttgaaaatgactctggtctggacttctggtgcaatatatgtggttctgatatccatccagttggttggtgtgcagccagcggaaaacctcttgttcctcctagaactattcagcataaatatacaaactggaaagcttttctagtgaaacgacttactggtgccaaaacactgcctcctgatttctcccaaaaggtttcagagagtatgcagtatcctttcaaaccttgcatgagagtagaagtggttgacaagaggcatttgtgtcgaacacgagtagcagtggtggaaagtgtaattggaggaagattaagactagtgtatgaagaaagcgaagatagaacagatgacttctggtgccatatgcacagcccattaatacatcatattggttggtctcgaagcataggtcatcgattcaaaagatctgatattacaaagaaacaggatggacattttgatacaccaccacatttatttgctaaggtaaaagaagtagaccagagtggggaatggttcaaggaaggaatgaaattggaagctatagacccattaaatctttctacaatatgtgtcgcaaccattagaaaggtgctagctgacggattcctgatgattgggatcgatggctcagaagcagcagacggatctgactggttctgttaccatgcaacctctccttctattttccctgtcggtttctgtgaaattaacatgattgaacttactccacccagaggttacacaaaacttccttttaaatggtttgactacctcagggaaactggctccattgcagcaccagtaaaactatttaataaggatgttccaaatcacggatttcgtgtaggaatgaaattagaagcagtagatctcatggagccacgtttaatatgtgtagccacagtaactcgaattattcatcgtctcttgaggatacattttgatggatgggaagaagagtatgatcagtgggtagactgtgagtcacctgacctctatcctgtagggtggtgtcagttaactggatatcaactacagcctccagcatcacagtgtaagttggtatacagaaaaggtgtccttttgtaaaaatcagcaattctccagaggactatctcacataagtcatcttatgagctcacaggacaagaatatacctatgtctgattggttgccaggtaagacattaagactcaacaacaatatcacagaatcagaccatgtgtcccatggcaatgtgaatccaatagtcaattacataatgactatagaaacacaacagtcaccaaattaaactagacttactattttagtgagttaaaaattacatactaaaagtttattggtaggtaataaatgcttttgagtaaatagtggaaaatgtctcatgttgaggctatggttttgtaggaacaagtacccttattttcagagcatcatgtacttaagtataatggtcttggtaaagatagttcatataagttgtatctagacaactgtatcgtctaaattgtaaacaattatctagtaccaattttccctttttatttttcagcatcaagagaaaaccaatcagcttcatcaaaacagaagaaaaaggctaagtcccagcaatacaaaggacataagaaaagtgggtcaccacgtggtgttcacatacattttctaattgttaactaattggagtcacagtattcttggacagaaaatgatatatcttgtgagaactgatgattgtgcattatgtattatgcttaaaggtgcagtatgccataaaaggcaaacccttgcaataatgagaaacactgatattttactaacaggagaaatgattaccacagtatttaaagtatacgtggtaaagaatagagtctgtgaatgattcttgaaataatatgtaaaacctactgaaagttaatcctttttaaaaactttatttaaaaagaaaaattagcagccaggtgcagtggctcacgcctgtaatcccagcactttaggaggccgaggctggcagatcacaaggtcaggagatcgagaccatcctggctaacacggtgaaaccctgtctccaccaaaaatacaaaaaatctgccgggcgtggtggcacacgcctgaagtcccagctactcaggaggctgaggcaagagaatcacttgaacccaggaggcagaggttgcagtgggccaagatcacgccactacattccagctgggcaacacagcaagactctgtctcaaaaaaaaaaaaaaaaa

SEQ ID NO: 1586 - protein, 410 aa, Homo sapien
MGTCWGDISENVRVEVPNTDCSLPTKVFWIAGIVKLAGYNALLRYEGFENDSGLDFWCNICGSDIHPVGWCAASGKPLVPPRTIQHKYTNWKAFLVKRLTGAKTLPPDFSQKVSESMQYPFKPCMRVEVVDKRHLCRTRVAVVESVIGGRLRLVYEESEDRTDDFWCHMHSPLIHHIGWSRSIGHRFKRSDITKKQDGHFDTPPHLFAKVKEVDQSGEWFKEGMKLEAIDPLNLSTICVATIRKVLADGFLMIGIDGSEAADGSDWFCYHATSPSIFPVGFCEINMIELTPPRGYTKLPFKWFDYLRETGSIAAPVKLFNKDVPNHGFRVGMKLEAVDLMEPRLICVATVTRIIHRLLRIHFDGWEEEYDQWVDCESPDLYPVGWCQLTGYQLQPPASQCKLVYRKGVLL

SEQ ID NO: 1587 - DNA, 4193 bp, Homo sapien
catggcggcgactgcggcaaagcgagagcctcggagacgccgctgccgccagcacagccggagatctgagccgacactgggggcagtccgcgagccccgcactctctcgatgagtcggagaagtcccgttgtatcagagtaagatggacggtagctttgattgtgattgtggtgagctggagccacctgatcactaacaaaagacatcttctgttaaccaacagccgccaggcttcctgttgaaataaatatatagcaacaaaggaaaaaaagaagcaaaacggaaatagtgcttaccagcaccttagaatgatgctgctcaggaccagtccaacactgaatgtatctgcactgtgaggagaatgttcatagaagcctgttgtgtgcatatttattcactttttgttaaatgttaaatcgtttagcacggtaatctgagtgcacagtatgtcatttcattccgtttgagtttcttgttttcgttaaatgtctgcagagttgctgcccctttcttgaactatgagtactgcaatctttttaattctcaatatgaatagagctttttgagctttaaatctaaggggaactcgacaggcctgtttggcatatgcaatgaacatcaagaaaccatcttgctgtggaagcataattatttttcttctccctttttgaaagatctttccttttgatgccagttttcttccttgtttacacaagttcaatttgaaaggaaaaggcaatagtaagggtttcaaaatggcagagaaatttgaaagtctcatgaacattcatggttttgatctgggttctaggtatatggacttaaaaccattgggttgtggaggcaatggcttggttttttctgctgtagacaatgactgtgacaaaagagtagccatcaagaaaattgtccttactgatccccagagtgtcaaacatgctctacgtgaaatcaaaattattagaagacttgaccatgataacattgtgaaagtgtttgagattcttggtcccagtggaagccaattaacagacgatgtgggctctcttacggaactgaacagtgtttacattgttcaggagtacatggagacagacttggctaatgtgctggagcagggccctttactggaagagcatgccaggcttttcatgtatcagctgctacgggggctcaagtatattcactctgcaaatgtactgcacagagatctcaaaccagctaatcttttcattaatacggaagacttggtgctgaagataggtgactttggtcttgcacggatcatggatcctcattattcccataagggtcatctttctgaaggattggttactaaatggtacagatctccacgtcttttactttctcctaataattatactaaagccattgacatgtgggctgcaggctgcatctttgctgaaatgctgactggtaaaaccctttttgcaggtgcacatgaacttgaacagatgcagctgattttagaatctattcctgttgtacatgaggaagatcgtcaggagcttctcagcgtaattccagtttacattagaaatgacatgactgagccacacaaacctttaactcagctgcttccaggaattagtcgagaagcactggatttcctggaacaaattttgacatttagccccatggatcggttaacagcagaagaagcactctcccatccttacatgagcatatattcttttccaatggatgagccaatttcaagccatccttttcatattgaagatgaagttgatgatattttgcttatggatgaaactcacagtcacatttataactgggaaaggtatcatgattgtcagttttcagagcatgattggcctgtacataacaactttgatattgatgaagttcagcttgatccaagagctctgtccgatgtcactgatgaagaagaagtacaagttgatccccgaaaatatttggatggagatcgggaaaagtatctggaggatcctgcttttgataccaattactctactgagccttgttggcaatactcagatcatcatgaaaacaaatattgtgatctggagtgtagccatacttgtaactacaaaacgaggtcatcatcatatttagataacttagtttggagagagagtgaagttaaccattactatgaacccaagcttattatagatctttccaattggaaagaacaaagcaaagaaaaatctgataagaaaggcaaatcaaaatgtgaaaggaatggattggttaaagcccagatagcgctagaggaagcatcacagcaactggctggaaaagaaagggaaaagaatcagggatttgattttgattcctttattgcaggaactattcagcttagttcccagcatgagcctactgatgttgttgataaattaaatgacttgaatagctcagtgtcccaactagaattgaaaagtttgatatcaaagtcagtaagccaagaaaaacaggaaaaaggaatggcaaatctggctcaattagaagccttgtaccagtcttcttgggacagccagtttgtgagtggtggggaggactgttttttcataaatcagttttgtgaggtaaggaaggatgaacaagttgagaaggaaaacacttacactagttacttggacaagttctttagcaggaaagaagatactgaaatgctagaaactgagccagtagaggatgggaagcttggggagagaggacatgaggaaggatttctgaacaacagtggggagttcctctttaacaagcagctcgagtccataggcatcccacagtttcacagtccagttgggtcaccacttaagtcaatacaggccacattaacaccttctgctatgaaatcttcccctcaaattcctcatcaaacatacagcagcattctgaaacatctgaactaaaacactcagcagacatttatctttgtattcttcatgaaatgtgttttgtctttttttattactagtgtttaagtcattttttacttgaatcagatggtgtcatttagtaaggattttatgagttcttgttttttaaaatccagactttctttttctacatgtgagatagttttcattttaactggcatgtcatttgcacacaaaaataaagactagagcaaaataatgcaacgcaggaggagaaaagaaatgcactaagacaagaacattctctcatagaacattgatctgttttacaggaaacaaaccttgccttgaaatttacacagtgagactgtacataattgcatgaaaatagctatttttttcctaagacatttttcattcatgaatattttcaagtttttcatactgtacacatttcttaaaacacatgataccagcagcaactgaaaatgaatgccgaatttggtacacatgtgttatctacctcaaggtaacaagagtatgtggcaaaacatataccacccatagtgcttcacaaaatgcacttctatttagccagcgtttattgtagtaaactattcttaataaaactcactcactgtttataaatgttctggtatgcattctttatagtgaagtgttaatacatcacatcttatttattttagcaaatcagtatattttctgtatttaattataaaaaattaacttagtttttaaaatttatttgcaaatatactttttccatttggcactatggtttgttgcctacctagctgcatctataatgtcagcttatcctaaggctgtccacgtacttaatttacttaagtgttcattttaagtaacgtgctcactgtgtataggaatttgtattttggaggtgcttgatctatctacaaagaaaaattaattaggaattactttattataaaatgctcctagaagtcttaattgtgtttattttttaaaaaaacaaatgttagacttgtgtgcatggaagtaattaaggtacatcattattgtagtttgaaagttgtacatgataagacattttgtttttactgtatgtttttactgaatgatctattccccatcccaaggcaagcatgaataaaattaggttaaacgtagcatgtggcatcgcagtctcttagaatttgtttcatctattttattttattgaatactgtctgtatctttggttatcctgtttgaagaaaaaggacaaataaaacatggccagcaaatacaaaaaaaaaaaa

SEQ ID NO: 1588 - protein, 721 aa, Homo sapien
MAEKFESLMNIHGFDLGSRYMDLKPLGCGGNGLVFSAVDNDCDKRVAIKKIVLTDPQSVKHALREIKIIRRLDHDNIVKVFEILGPSGSQLTDDVGSLTELNSVYIVQEYMETDLANVLEQGPLLEEHARLFMYQLLRGLKYIHSANVLHRDLKPANLFINTEDLVLKIGDFGLARIMDPHYSHKGHLSEGLVTKWYRSPRLLLSPNNYTKAIDMWAAGCIFAEMLTGKTLFAGAHELEQMQLILESIPVVHEEDRQELLSVIPVYIRNDMTEPHKPLTQLLPGISREALDFLEQILTFSPMDRLTAEEALSHPYMSIYSFPMDEPISSHPFHIEDEVDDILLMDETHSHIYNWERYHDCQFSEHDWPVHNNFDIDEVQLDPRALSDVTDEEEVQVDPRKYLDGDREKYLEDPAFDTNYSTEPCWQYSDHHENKYCDLECSHTCNYKTRSSSYLDNLVWRESEVNHYYEPKLIIDLSNWKEQSKEKSDKKGKSKCERNGLVKAQIALEEASQQLAGKEREKNQGFDFDSFIAGTIQLSSQHEPTDVVDKLNDLNSSVSQLELKSLISKSVSQEKQEKGMANLAQLEALYQSSWDSQFVSGGEDCFFINQFCEVRKDEQVEKENTYTSYLDKFFSRKEDTEMLETEPVEDGKLGERGHEEGFLNNSGEFLFNKQLESIGIPQFHSPVGSPLKSIQATLTPSAMKSSPQIPHQTYSSILKHLN

SEQ ID NO: 1589 - DNA, 1247 bp, Homo sapien
gtaaagctagaccgatctccggggagccccggagtaggcgagcggcggccgccagctagttgagcgcaccccccgcccgccccagcggcgccgcggcgggcggcgtccaggcggcatggagaaggacggcctgtgccgcgctgaccagcagtacgaatgcgtggcggagatcggggagggcgcctatgggaaggtgttcaaggcccgcgacttgaagaacggaggccgtttcgtggcgttgaagcgcgtgcgggtgcagaccggcgaggagggcatgccgctctccaccatccgcgaggtggcggtgctgaggcacctggagaccttcgagcaccccaacgtggtcaggttgtttgatgtgtgcacagtgtcacgaacagacagagaaaccaaactaactttagtgtttgaacatgtcgatcaagacttgaccacttacttggataaagttccagagcctggagtgcccactgaaaccataaaggatatgatgtttcagcttctccgaggtctggactttcttcattcacaccgagtagtgcatcgcgatctaaaaccacagaacattctggtgaccagcagcggacaaataaaactcgctgacttcggccttgcccgcatctatagtttccagatggctctaacctcagtggtcgtcacgctgtggtacagagcacccgaagtcttgctccagtccagctacgccacccccgtggatctctggagtgttggctgcatatttgcagaaatgtttcgtagaaagcctctttttcgtggaagttcagatgttgatcaactaggaaaaatcttggacgtgattggactcccaggagaagaagactggcctagagatgttgcccttcccaggcaggcttttcattcaaaatctgcccaaccaattgagaagtttgtaacagatatcgatgaactaggcaaagacctacttctgaagtgtttgacatttaacccagccaaaagaatatctgcctacagtgccctgtctcacccatacttccaggacctggaaaggtgcaaagaaaacctggattcccacctgccgcccagccagaacacctcggagctgaatacagcctgaggcctcagcagccgccttaagctgatcctgcggagaacacccttggtggcttatgggtccccctcagcaagccctacagagctgtggaggattgctatctggaggccttccagctgctgtcttctggacaggctctgcttctccaaggaaa

SEQ ID NO: 1590 - protein, 326 aa, Homo sapien
MEKDGLCRADQQYECVAEIGEGAYGKVFKARDLKNGGRFVALKRVRVQTGEEGMPLSTIREVAVLRHLETFEHPNVVRLFDVCTVSRTDRETKLTLVFEHVDQDLTTYLDKVPEPGVPTETIKDMMFQLLRGLDFLHSHRVVHRDLKPQNILVTSSGQIKLADFGLARIYSFQMALTSVVVTLWYRAPEVLLQSSYATPVDLWSVGCIFAEMFRRKPLFRGSSDVDQLGKILDVIGLPGEEDWPRDVALPRQAFHSKSAQPIEKFVTDIDELGKDLLLKCLTFNPAKRISAYSALSHPYFQDLERCKENLDSHLPPSQNTSELNTA

SEQ ID NO: 1591 - DNA, 1444 bp, Homo sapien
tttcattttgggccgagctggaggcggcggggccgtcccggaacggctgcggccgggcaccccgggagttaatccgaaagcgccgcaagccccgcgggccggccgcaccgcacgtgtcaccgagaagctgatgtagagagagacacagaaggagacagaaagcaagagaccagagtcccgggaaagtcctgccgcgcctcgggacaattataaaaatgtggccccctgggtcagcctcccagccaccgccctcacctgccgcggccacaggtctgcatccagcggctcgccctgtgtccctgcagtgccggctcagcatgtgtccagcgcgcagcctcctccttgtggctaccctggtcctcctggaccacctcagtttggccagaaacctccccgtggccactccagacccaggaatgttcccatgccttcaccactcccaaaacctgctgagggccgtcagcaacatgctccagaaggccagacaaactctagaattttacccttgcacttctgaagagattgatcatgaagatatcacaaaagataaaaccagcacagtggaggcctgtttaccattggaattaaccaagaatgagagttgcctaaattccagagagacctctttcataactaatgggagttgcctggcctccagaaagacctcttttatgatggccctgtgccttagtagtatttatgaagacttgaagatgtaccaggtggagttcaagaccatgaatgcaaagcttctgatggatcctaagaggcagatctttctagatcaaaacatgctggcagttattgatgagctgatgcaggccctgaatttcaacagtgagactgtgccacaaaaatcctcccttgaagaaccggatttttataaaactaaaatcaagctctgcatacttcttcatgctttcagaattcgggcagtgactattgatagagtgatgagctatctgaatgcttcctaaaaagcgaggtccctccaaaccgttgtcatttttataaaactttgaaatgaggaaactttgataggatgtggattaagaactagggagggggaaagaaggatgggactattacatccacatgatacctctgatcaagtatttttgacatttactgtggataaattgtttttaagttttcatgaatgaattgctaagaagggaaaatatccatcctgaaggtgtttttcattcactttaatagaagggcaaatatttataagctatttctgtaccaaagtgtttgtggaaacaaacatgtaagcataacttattttaaaatatttatttatataacttggtaatcatgaaagcatctgagctaacttatatttatttatgttatatttattaaattatttatcaagtgtatttgaaaaatatttttaagtgttctaaaaataaaagtattgaattaaagtgaaaaaaaa

SEQ ID NO: 1592 - protein, 253 aa, Homo sapien
MWPPGSASQPPPSPAAATGLHPAARPVSLQCRLSMCPARSLLLVATLVLLDHLSLARNLPVATPDPGMFPCLHHSQNLLRAVSNMLQKARQTLEFYPCTSEEIDHEDITKDKTSTVEACLPLELTKNESCLNSRETSFITNGSCLASRKTSFMMALCLSSIYEDLKMYQVEFKTMNAKLLMDPKRQIFLDQNMLAVIDELMQALNFNSETVPQKSSLEEPDFYKTKIKLCILLHAFRIRAVTIDRVMSYLNAS

SEQ ID NO: 1593 - DNA, 3002 bp, Homo sapien
gccagtcaccttcagtttctggagctggccgtcaacatgtcctttcctaaggcgcccttgaaacgattcaatgacccttctggttgtgcaccatctccaggtgcttatgatgttaaaactttagaagtattgaaaggaccagtatcctttcagaaatcacaaagatttaaacaacaaaaagaatctaaacaaaatcttaatgttgacaaagatactaccttgcctgcttcagctagaaaagttaagtcttcggaatcaaaggaatctcaaaagaatgataaagatttgaagatattagagaaagagattcgtgttcttctacaggaacgtggtgcccaggacagccggatccaggatctggaaactgagttggaaaagatggaagcaaggctaaatgctgcactaagggaaaaaacatctctctctgcaaataatgctacactggaaaaacaacttattgaattgaccaggactaatgaactactaaaatctaagttttctgaaaatggtaaccagaagaatttgagaattctaagcttggagttgatgaaacttagaaacaaaagagaaacaaagatgaggggtatgatggctaagcaagaaggcatggagatgaagctgcaggtcacccaaaggagtctcgaagagtctcaagggaaaatagcccaactggagggaaaacttgtttcaatagagaaagaaaagattgatgaaaaatctgaaacagaaaaactcttggaatacatcgaagaaattagttgtgcttcagatcaagtggaaaaatacaagctagatattgcccagttagaagaaaatttgaaagagaagaatgatgaaattttaagccttaagcagtctcttgaggagaatattgttatattatctaaacaagtagaagatctaaatgtgaaatgtcagctgcttgaaaaagaaaaagaagaccatgtcaacaggaatagagaacacaacgaaaatctaaatgcagagatgcaaaacttaaaacagaagtttattcttgaacaacaggaacgtgaaaagcttcaacaaaaagaattacaaattgattcacttctgcaacaagagaaagaattatcttcgagtcttcatcagaagctctgttcttttcaagaggaaatggttaaagagaagaatctgtttgaggaagaattaaagcaaacactggatgagcttgataaattacagcaaaaggaggaacaagctgaaaggctggtcaagcaattggaagaggaagcaaaatctagagctgaagaattaaaactcctagaagaaaagctgaaagggaaggaggctgaactggagaaaagtagtgctgctcatacccaggccaccctgcttttgcaggaaaagtatgacagtatggtgcaaagccttgaagatgttactgctcaatttgaaagctataaagcgttaacagccagtgagatagaagatcttaagctggagaactcatcattacaggaaaaagcggccaaggctgggaaaaatgcagaggatgttcagcatcagattttggcaactgagagctcaaatcaagaatatgtaaggatgcttctagatctgcagaccaagtcagcactaaaggaaacagaaattaaagaaatcacagtttcttttcttcaaaaaataactgatttgcagaaccaactcaagcaacaggaggaagactttagaaaacagctggaagatgaagaaggaagaaaagctgaaaaagaaaatacaacagcagaattaactgaagaaattaacaagtggcgtctcctctatgaagaactatataataaaacaaaaccttttcagctacaactagatgcttttgaagtagaaaaacaggcattgttgaatgaacatggtgcagctcaggaacagctaaataaaataagagattcatatgctaaattattgggtcatcagaatttgaaacaaaaaatcaagcatgttgtgaagttgaaagatgaaaatagccaactcaaatcggaagtatcaaaactccgctgtcagcttgctaaaaaaaaacaaagtgagacaaaacttcaagaggaattgaataaagttctaggtatcaaacactttgatccttcaaaggcttttcatcatgaaagtaaagaaaattttgccctgaagaccccattaaaagaaggcaatacaaactgttaccgagctcctatggagtgtcaagaatcatggaagtaaacatctgagaaacctgttgaagattatttcattcgtcttgttgttattgatgttgctgttattatatttgacatgggtattttataatgttgtatttaattttaactgccaatccttaaatatgtgaaaggaacattttttaccaaagtgtcttttgacattttattttttcttgcaaatacctcctccctaatgctcacctttatcacctcattctgaaccctttcgctggctttccagcttagaatgcatctcatcaacttaaaagtcagtatcatattattatcctcctgttctgaaaccttagtttcaagagtctaaaccccagattcttcagcttgatcctggaggtcttttctagtctgagcttctttagctaggctaaaacaccttggcttgttattgcctctactttgattctgataatgctcacttggtcctacctattatccttctacttgtccagttcaaataagaaataaggacaagcctaacttcatagaaacctctctatttttaatcagttgtttaataatttacaggttcttaggctccatcctgtttgtatgaaattataatctgtggattggcctttaagcctgcattcttaacaaactcttcagttaattcttagatacactaaaaatctgagaaactctacatgtaactatttcttcagagtttgtcatatactgcttgtcatctgcatgtctactcagcatttgattaacatttgtgtaatatgaaataaaattacacagtaagtcatttaaccaaaaaaaaaaaaaaaa

SEQ ID NO: 1594 - protein, 724 aa, Homo sapien
MSFPKAPLKRFNDPSGCAPSPGAYDVKTLEVLKGPVSFQKSQRFKQQKESKQNLNVDKDTTLPASARKVKSSESKESQKNDKDLKILEKEIRVLLQERGAQDSRIQDLETELEKMEARLNAALREKTSLSANNATLEKQLIELTRTNELLKSKFSENGNQKNLRILSLELMKLRNKRETKMRGMMAKQEGMEMKLQVTQRSLEESQGKIAQLEGKLVSIEKEKIDEKSETEKLLEYIEEISCASDQVEKYKLDIAQLEENLKEKNDEILSLKQSLEENIVILSKQVEDLNVKCQLLEKEKEDHVNRNREHNENLNAEMQNLKQKFILEQQEREKLQQKELQIDSLLQQEKELSSSLHQKLCSFQEEMVKEKNLFEEELKQTLDELDKLQQKEEQAERLVKQLEEEAKSRAEELKLLEEKLKGKEAELEKSSAAHTQATLLLQEKYDSMVQSLEDVTAQFESYKALTASEIEDLKLENSSLQEKAAKAGKNAEDVQHQILATESSNQEYVRMLLDLQTKSALKETEIKEITVSFLQKITDLQNQLKQQEEDFRKQLEDEEGRKAEKENTTAELTEEINKWRLLYEELYNKTKPFQLQLDAFEVEKQALLNEHGAAQEQLNKIRDSYAKLLGHQNLKQKIKHVVKLKDENSQLKSEVSKLRCQLAKKKQSETKLQEELNKVLGIKHFDPSKAFHHESKENFALKTPLKEGNTNCYRAPMECQESWK

SEQ ID NO: 1595 - DNA, 2578 bp, Homo sapien
ggaggaggaaagaggaggacatggtctccgaggaggaggaggaggaggacggcgacgccgaggagacccaggattctgaggacgacgaggaggatgagatggaagaggacgacgatgactccgattatccggaggagatggaagacgacgacgacgacgccagttactgcacggaaagcagcttcaggagccatagtacctacagcagcactccaggtaggcgaaaaccaagagtacatcggcctcgttctcctatattggaagaaaaagacatcccgccccttgaatttcccaagtcctctgaggatttaatggtgcctaatgagcatataatgaatgtcattgccatttacgaggtactgcggaactttggcactgttttgagattatctccttttcgctttgaggacttttgtgcagctctggtgagccaagagcagtgcacactcatggcagagatgcatgttgtgcttttgaaagcagttctgcgtgaagaagacacttccaatactacctttggacctgctgatctgaaagatagcgttaattccacactgtatttcatagatgggatgacgtggccagaggtgctgcgggtgtactgtgagagtgataaggagtaccatcacgttcttccttaccaagaggcagaggactacccatatggaccagtagagaacaagatcaaagttctacagtttctagtcgatcagtttcttacaacaaatattgctcgagaggaattgatgtctgaaggggtgatacagtatgatgaccattgtagggtttgtcacaaacttggggatttgctttgctgtgagacatgttcagcagtataccatttggaatgtgtgaagccacctcttgaggaggtgccagaggacgagtggcagtgtgaagtctgtgtagcacacaaggtgcctggtgtgactgactgtgttgctgaaatccaaaaaaataaaccatatattcgacatgaacctattggatatgatagaagtcggaggaaatactggttcttgaaccgaagactcataatagaagaagatacagaaaatgaaaatgaaaagaaaatttggtattacagcacaaaggtccaacttgcagaattaattgactgtctagacaaagattattgggaagcagaactctgcaaaattctagaagaaatgcgtgaagaaatccaccgacacatggacataactgaagacctgaccaataaggctcggggcagtaacaaatcctttctggcggcagctaatgaagaaattttggaatccataagagccaaaaagggagacattgataatgttaaaagcccagaagaaacagaaaaagacaagaatgagactgagaatgactctaaagatgctgagaaaaacagagaagaatttgaagaccagtcccttgaaaaagacagtgacgacaaaacaccagatgatgaccctgagcaaggaaaatctgaggagccaacagaagttggggataaaggtaactctgtgtcagcaaatcttggcgacaacacaacaaatgcaacttcagaagagactagtccctctgaagggaggagccctgtggggtgtctctcagaaacccccgatagcagcaacatggcagagaagaaggtggcatctgagctcccccaggatgtgccagaagaacctaacaagacatgtgagagcagtaacactagtgctaccactacctccatccagcctaatctggaaaacagtaacagcagcagtgaactaaattcttcccagagtgaatctgctaaggcagctgatgatcctgaaaatggagaaagagaatctcatacacctgtctctattcaggaagagatagtaggtgatttcacatcggagaagtccaccggggagctaagtgaatctcctggagctggaaaaggagcatctggctcaactcgaatcatcaccagattgcggaatccagatagcaaacttagtcagctgaagagccagcaggtggcagccgctgcacatgaagcaaataaattatttaaggagggcaaagaggtactggtagttaactctcaaggagaaatttcacggttgagcaccaaaaaggaagtgatcatgaaaggaaatatcaacaattattttaaattgggtcaagaagggaagtatcgcgtctaccacaatcaatactccaccaattcatttgctttgaataagcaccagcacagagaagaccatgataagagaaggcatcttgcacataagttctgtctgactccagcaggagagttcaaatggaacggttctgtccatgggtccaaagttcttaccatatctactctgagactgactatcacccaattagaaacaacatcccttcatccttccttcatcccaactgggcatcacatagggcaaattggatcaaggcagttcagatgtgtagcaaacccagagaatttgcattggctttagccattttggagtgtgcagttaaaccagttgtgatgctaccaatatggcgagaatctttaggacataccaggttacaccggatgacatcaattgaaagagaagaaaaggagaaagtcaaaaaaaaa

SEQ ID NO: 1596 - protein, 810 aa, Homo sapien [sequence omitted]

SEQ ID NO: 1597 - DNA, 4246 bp, Homo sapien
gatgagattgatgattctttctcctggaaaacctttcatcacagagattcatctcagcattaaagggcagtatttaaagtcagttggcaagcagtggaataagatttttgtaaagaaaccttgtgcagcatggattctctaccagatgaattttttgtgaggcatcctgctgtggaggatcagaggaaggaagaaactgagaataagctagaaaaatcatctggtcaactgaacaaacaggaaaatgacatacctactgatcttgtccctgttaacctactattagaagtgaagaagttattaaatgcaattaatactctaccaaaaggtgtggttcctcacattaagaagttcttacaagaagatttttccttccaaactatgcagagagaagttgcagctaacagccagaatggtgaggaaattgttcctgctttgactttacgtttcttgattacacagctagaagcagcacttaggaacattcaagctggcaattataccgcacaccagattaatattggttattatttgacattactgtttttatatggagtagcactcactgaaagaggaaagaaagaggattatacagaagctgagaataaatttctggtgatgaagatgatgatccaagaaaatgaaatttgtgaaaactttatgtctttagtttattttggacgtggtttactgcgatgtgctcaaaagagatataatggaggactgctagaatttcataaaagcttacaagaaattggagacaaaaatgaccattggtttgacatagatcctacagaagatgaagatttacctacaacttttaaagatcttcttaataattttatcaagacaactgaaagcaatataatgaagcagacgatttgtagttacctagattgtgaacgatcttgtgaagctgacattttgaagaacaccagttataagggattttttcagttaatgtgcagtaaaagttgctgtgtttatttccataaaatttgctggaaaaagttcaagaatttaaagtatccaggtgaaaatgatcagagttttagtgggaaaaaatgtttgaaggaaggatgtacaggtgacatggtaaggatgctgcaatgtgatgtacctggaattgttaaaattttgtttgaagttgtgagaaaggatgaatatatcaccattgaaaatttaggagcaagttatagaaagttgatatctctgaaaataactgatactgatataagaccgaagatcagtttaaaatttaatacaaaagatgaaatgcctatcttcaagcttgattataattatttctatcatctgcttcatataattattatttctggtactgacattgttcgacaaatatttgatgaggctatgccacctcctcttttgaaaaaagagcttcttatacacaagaatgtgctggaatcctactacaaccatctttggaccaatcatcctttgggtggatcatggcatctgctttatcctcctaacaaggagttaccgcaatccaaacagtttgacttatgcctcctgttagctcttataaaacatttaaatgtgttccctgcacccaaaaaaggatggaatatggaaccgccatcttctgacatctctaaatctgcagacatcctgagactgtgcaaatacagggatatcctccttagtgagattttgatgaatggtctcactgagtcacagttcaattcaatttggaaaaaagtttcagatattcttctgcgccttgggatgatgcaagaggatattgacaaagtgaaggagaatcccattgagaatatctcccttgattaccatcagctatctgtctacctaggcataccagtaccagaaatcatacagaggatgttatcctgctatcaacaaggaattgctctacagtcaataacaggcagtcagcgtattgaaatagaagagttacagaatgaggaagaagaactaagtccacctctcatggagtacaatataaatgtgaaatcacaccctgagatacagtttgcagaaattaataaagatgggacctcaatacccagtgaatcttcaacagaatctcttaaagatctccaggaagttaagagtaaacaaaggaaaaagaagaagactaagaataaaaagaataaagactcaaaagaagaccaagtcccatatgtggtagaaaaggaagagcagttgaggaaagaacaagcaaatccacactcagtcagtagacttataaaagatgatgcaagtgatgttcaagaggattctgcaatggaagacaagttctatagcctggatgaattgcatattctggacatgatagagcagggctcagctggcaaagtaactacagactatggagaaactgaaaaggaaaggcttgctcgtcaaaggcagctttataaattgcactatcagtgtgaagatttcaaaagacagttgagaacagtgacttttcggtggcaagaaaaccaaatgcagattaaaaagaaagacaaaattatcgcatctcttaatcaacaagttgcttttggaatcaataaggtttccaaattacagcgtcaaatccatgctaaagataatgaaatcaagaaccttaaagagcaactttctatgaaaagatctcagtgggaaatggaaaaacataatctggaaagcacaatgaaaacatacgtaagcaaactgaacgcagaaactagcagagctttaacagccgaggtgtatttcttacagtgtcgtagggattttggtttgcttcatctagagcagactgaaaaggaatgtctcaatcagcttgccagggtgactcacatggcagcaagcaacctagaatcacttcaattaaaggctgcggtagacagttggaatgccattgtggcagatgttagaaacaagattgcattcctcaggacacagtacaatgaacaaataaacaaagtcaagcaaggatttgccttgagtaccttgcctccagtccagcttcctcctccaccacccagtcctgagatactgatgcagcagttcttaggaagaccccttgtgaaagaatctttctttagacccatacttactgttcctcaaatgcctgcagtttgcccgggagtcgtctctgcaactggccaacctagagcccccctgatgactggcatagcctgggctctgccagcgcctgtgggagacgctgtgcctcccagtgcaggtctgcggagtgatccctccatcatgaattgggagagaattacagacaggctgaaaactgcctttccacagcaaaccagaaaggaacttacagatttcttacggaaattgaaggatgcttatggaaaatccttgtctgaactgacatttgatgaaattgtttgcaagatttcccagtttattgaccccaaaaagtctcagagtcaaggaaaatcagtgtcaaatgttaattgtgtttcacctagtcattctccatcacagcctgatgctgcccagcccccaaaaccagcctggaggccactcacttcacagggtcctgccacatgggaaggagccagtaatccagatgaggaagaggaagaagaagagccttgtgtgatctgtcatgagaatctgtctccagaaaatctttcagttttgccttgcgctcacaaattccatgctcagtgcattagaccatggttgatgcaacaggggacatgtccaacgtgcagactccacgttttgctaccagaagaattccctggtcaccccagccggcagttgcccaagatctgatacaaggtcggggtgtctatgcaaaggaagctcagttttcttttattatgagctgcttgtttgagtggtgtaaaactatgtgctcttcaatatagtgctaaagaagccagctaattttatcaaagcagcagccaaagaagtcaggacaaatcttcaggacttgtgaaatgaactgaaagagcttgaagcagatggaattttaatagttacactatatatgctcttagtaggtttttttcttgtagtggaaacataactgttagcatatttcttaggatgttttttcttgtctttttaaattcttatttcactcatcctttactctcccctcaagtattctacactttaatttcctgaaataaatttaaggaaaagggaaatagtaaagaagtaggaatgggtgcagcacaccagcatggcacatgaatacacatgtaactaacctgcacattgtgcacatgtaccctaaaacttaaagtataataataat

SEQ ID NO: 1598 - protein, 1208 aa, Homo sapien
MDSLPDEFFVRHPAVEDQRKEETENKLEKSSGQLNKQENDIPTDLVPVNLLLEVKKLLNAINTLPKGVVPHIKKFLQEDFSFQTMQREVAANSQNGEEIVPALTLRFLITQLEAALRNIQAGNYTAHQINIGYYLTLLFLYGVALTERGKKEDYTEAENKFLVMKMMIQENEICENFMSLVYFGRGLLRCAQKRYNGGLLEFHKSLQEIGDKNDHWFDIDPTEDEDLPTTFKDLLNNFIKTTESNIMKQTICSYLDCERSCEADILKNTSYKGFFQLMCSKSCCVYFHKICWKKFKNLKYPGENDQSFSGKKCLKEGCTGDMVRMLQCDVPGIVKILFEVVRKDEYITIENLGASYRKLISLKITDTDIRPKISLKFNTKDEMPIFKLDYNYFYHLLHIIIISGTDIVRQIFDEAMPPPLLKKELLIHKNVLESYYNHLWTNHPLGGSWHLLYPPNKELPQSKQFDLCLLLALIKHLNVFPAPKKGWNMEPPSSDISKSADILRLCKYRDILLSEILMNGLTESQFNSIWKKVSDILLRLGMMQEDIDKVKENPIENISLDYHQLSVYLGIPVPEIIQRMLSCYQQGIALQSITGSQRIEIEELQNEEEELSPPLMEYNINVKSHPEIQFAEINKDGTSIPSESSTESLKDLQEVKSKQRKKKKTKNKKNKDSKEDQVPYVVEKEEQLRKEQANPHSVSRLIKDDASDVQEDSAMEDKFYSLDELHILDMIEQGSAGKVTTDYGETEKERLARQRQLYKLHYQCEDFKRQLRTVTFRWQENQMQIKKKDKIIASLNQQVAFGINKVSKLQRQIHAKDNEIKNLKEQLSMKRSQWEMEKHNLESTMKTYVSKLNAETSRALTAEVYFLQCRRDFGLLHLEQTEKECLNQLARVTHMAASNLESLQLKAAVDSWNAIVADVRNKIAFLRTQYNEQINKVKQGFALSTLPPVQLPPPPPSPEILMQQFLGRPLVKESFFRPILTVPQMPAVCPGVVSATGQPRAPLMTGIAWALPAPVGDAVPPSAGLRSDPSIMNWERITDRLKTAFPQQTRKELTDFLRKLKDAYGKSLSELTFDEIVCKISQFIDPKKSQSQGKSVSNVNCVSPSHSPSQPDAAQPPKPAWRPLTSQGPATWEGASNPDEEEEEEEPCVICHENLSPENLSVLPCAHKFHAQCIRPWLMQQGTCPTCRLHVLLPEEFPGHPSRQLPKI

SEQ ID NO: 1599 - DNA, 4246 bp, Homo sapien; identical to SEQ ID NO: 1597

SEQ ID NO: 1600 - protein, 1208 aa, Homo sapien; identical to SEQ ID NO: 1598

SEQ ID NO: 1601 - DNA, 1548 bp, Homo sapien
agacttggaaaccccaaagtgtccgcgaccctgcacggcagctcccttccagcttcatgggcaaagtgtggaaacagcagatgtaccctcagtacgccacctactattacccccagtatctgcaagccaagcagtctctggtcccagcccaccccatggcccctcccagtcccagcaccaccagcagtaataacaacagtagcagcagtagcaactcaggatgggatcagctcagcaaaacgaacctctatatccgaggactgcctccccacaccaccgaccaggacctggtgaagctctgtcaaccatatgggaaaatagtctccacaaaggcaattttggataagacaacgaacaaatgcaaaggttatggttttgtcgactttgacagccctgcagcagctcaaaaagctgtgtctgccctgaaggccagtggggttcaagctcaaatggcaaagcaacaggaacaagatcctaccaacctctacatttctaatttgccactctccatggatgagcaagaactagaaaatatgctcaaaccatttggacaagttatttctacaaggatactacgtgattccagtggtacaagtcgtggtgttggctttgctaggatggaatcaacagaaaaatgtgaagctgttattggtcattttaatggaaaatttattaagacaccaccaggagtttctgcccccacagaacctttattgtgtaagtttgctgatggaggacagaaaaagagacagaacccaaacaaatacatccctaatggaagaccatggcatagagaaggagaggctggaatgacacttacttacgacccaactacagctgctatacagaacggattttatccttcaccatacagtattgctacaaaccgaatgatcactcaaacttctattacaccctatattgcatctcctgtatctgcctaccaggtggcaaaggaaaccagagaaaacaagtatcggggctctgctatcaaggtgcaaagtccttcgtggatgcaacctcaaccatatattctacagcaccctggtgccgtgttaactccctcaatggagcacaccatgtcactacagcccgcatcaatgatcagccctctggcccagcagatgagtcatctgtcactaggcagcaccggaacatacatgcctgcaacgtcagctatgcaaggagcctacttgccacagtatgcacatatgcagacgacagcggttcctgttgaggaggcaagtggtcaacagcaggtggctgtcgagacgtctaatgaccattctccatatacctttcaacctaataagtaactgtgagatgtacagaaaggtgttcttacatgaagaagggtgtgaaggctgaacaatcatggatttttctgatcaattgtgctttaggaaattattgacagttttgcacaggttcttgaaaacgttatttataatgaaatcaactaaaactatttttgctataagttctataaggtgcataaaacccttaaattcatctagtagctgttcccccgaacaggtttattttagt

SEQ ID NO: 1602 - protein, 419 aa, Homo sapien
MGKVWKQQMYPQYATYYYPQYLQAKQSLVPAHPMAPPSPSTTSSNNNSSSSSNSGWDQLSKTNLYIRGLPPHTTDQDLVKLCQPYGKIVSTKAILDKTTNKCKGYGFVDFDSPAAAQKAVSALKASGVQAQMAKQQEQDPTNLYISNLPLSMDEQELENMLKPFGQVISTRILRDSSGTSRGVGFARMESTEKCEAVIGHFNGKFIKTPPGVSAPTEPLLCKFADGGQKKRQNPNKYIPNGRPWHREGEAGMTLTYDPTTAAIQNGFYPSPYSIATNRMITQTSITPYIASPVSAYQVAKETRENKYRGSAIKVQSPSWMQPQPYILQHPGAVLTPSMEHTMSLQPASMISPLAQQMSHLSLGSTGTYMPATSAMQGAYLPQYAHMQTTAVPVEEASGQQQVAVETSNDHSPYTFQPNK

SEQ ID NO: 1603 - DNA, 1855 bp, Homo sapien
ccatgtcgctcactgtcgtcagcatggcgtgcgttgggttcttcttgctgcagggggcctggccactcatgggtggtcaggacaaacccttcctgtctgcccggcccagcactgtggtgcctcgaggaggacacgtggctcttcagtgtcactatcgtcgtgggtttaacaatttcatgctgtacaaagaagacagaagccacgttcccatcttccacggcagaatattccaggagagcttcatcatgggccctgtgaccccagcacatgcagggacctacagatgtcggggttcacgcccacactccctcactgggtggtcggcacccagcaaccccctggtgatcatggtcacaggaaaccacagaaaaccttccctcctggcccacccagggcccctgctgaaatcaggagagacagtcatcctgcaatgttggtcagatgtcatgtttgagcacttctttctgcacagagatgggatctctgaggacccctcacgcctcgttggacagatccatgatggggtctccaaggccaacttctccatcggtcccttgatgcctgtccttgcaggaacctacagatgttatggttctgttcctcactccccctatcagttgtcagctcccagtgaccccctggacatcgtgatcacaggtctatatgagaaaccttctctctcagcccagccgggccccacggttcaggcaggagagaacgtgaccttgtcctgtagctcctggagctcctatgacatctaccatctgtccagggaaggggaggcccatgaacgtaggctccgtgcagtgcccaaggtcaacagaacattccaggcagactttcctctgggccctgccacccacggagggacctacagatgcttcggctctttccgtgccctgccctgcgtgtggtcaaactcaagtgacccactgcttgtttctgtcacaggaaacccttcaagtagttggccttcacccacagaaccaagctccaaatctggtatctgcagacacctgcatgttctgattgggacctcagtggtcatcttcctcttcatcctcctcctcttctttctcctttatcgctggtgctccaacaaaaagaatgctgctgtaatggaccaagagcctgcgggggacagaacagtgaataggcaggactctgatgaacaagaccctcaggaggtgacgtacgcacagttggatcactgcgttttcatacagagaaaaatcagtcgcccttctcagaggcccaagacacccctaacagataccagcgtgtacacggaacttccaaatgctgagcccagatccaaagttgtctcctgcccacgagcaccacagtcaggtcttgagggggttttctagggagacaacagccctgtctcaaaaccaggttgccagatccaatgaaccagcagctggaatctgaaggcatcagtctgcatcttaggggatcgctcttcctcacaccacgaatctgaacatgcctctctcttgcttacaaatgcctaaggtcgccactgcctgctgcagagaaaacacactcctttgcttagcccacaaggtatctatttcacttgacccctgcccacctctccaacctaactggcttacttcctagtcctacttgaggctgcaatcacactgaggaactcacaattccaaacatacaagaggctccctcttaacacggcacttacacacttgctgttccaccttccctcatgctgttccacctcccctcagactatctttcagccttctgtcatcagtaaaatttataaattttttttataacttcagtgtagctctctcctcttcaaataaacatgtctgccctcatggtttcg

SEQ ID NO: 1604 - protein, 455 aa, Homo sapien
MSLTVVSMACVGFFLLQGAWPLMGGQDKPFLSARPSTVVPRGGHVALQCHYRRGFNNFMLYKEDRSHVPIFHGRIFQESFIMGPVTPAHAGTYRCRGSRPHSLTGWSAPSNPLVIMVTGNHRKPSLLAHPGPLLKSGETVILQCWSDVMFEHFFLHRDGISEDPSRLVGQIHDGVSKANFSIGPLMPVLAGTYRCYGSVPHSPYQLSAPSDPLDIVITGLYEKPSLSAQPGPTVQAGENVTLSCSSWSSYDIYHLSREGEAHERRLRAVPKVNRTFQADFPLGPATHGGTYRCFGSFRALPCVWSNSSDPLLVSVTGNPSSSWPSPTEPSSKSGICRHLHVLIGTSVVIFLFILLLFFLLYRWCSNKKNAAVMDQEPAGDRTVNRQDSDEQDPQEVTYAQLDHCVFIQRKISRPSQRPKTPLTDTSVYTELPNAEPRSKVVSCPRAPQSGLEGVF

SEQ ID NO: 1605 - DNA, 1855 bp, Homo sapien; identical to SEQ ID NO: 1603

SEQ ID NO: 1606 - protein, 455 aa, Homo sapien; identical to SEQ ID NO: 1604

SEQ ID NO: 1607 - DNA, 2603 bp, Homo sapien
ccacgcgtccgcgctcccctcagctcctgcagtgctaattaagggagggagcagcggggagcttgcagtgaccaagagggtgttgaggctaggaggccacgataaacaggatacgataaaagtccttaaccaagacgcagatgggaagaagcgttagagcgagcagcactcacatctcaagaaccagcctttcaaacagtttccagagatggattatcctactttacttttggctcttcttcatgtatacagagctctatgtgaagaggtgctttggcatacatcagttccctttgccgagaacatgtctctagaatgtgtgtatccatcaatgggcatcttaacacaggtggagtggttcaagatcgggacccagcaggattccatagccattttcagccctactcatggcatggtcataaggaagccctatgctgagagggtttactttttgaattcaacgatggcttccaataacatgactcttttctttcggaatgcctctgaagatgatgttggctactattcctgctctctttacacttacccacagggaacttggcagaaggtgatacaggtggttcagtcagatagttttgaggcagctgtgccatcaaatagccacattgtttcggaacctggaaagaatgtcacactcacttgtcagcctcagatgacgtggcctgtgcaggcagtgaggtgggaaaagatccagccccgtcagatcgacctcttaacttactgcaacttggtccatggcagaaatttcacctccaagttcccaagacaaatagtgagcaactgcagccacggaaggtggagcgtcatcgtcatccccgatgtcacagtctcagactcggggctttaccgctgctacttgcaggccagcgcaggagaaaacgaaaccttcgtgatgagattgactgtagccgagggtaaaaccgataaccaatataccctctttgtggctggagggacagttttattgttgttgtttgttatctcaattaccaccatcattgtcattttccttaacagaaggagaaggagagagagaagagatctatttacagagtcctgggatacacagaaggcacccaataactatagaagtcccatctctaccggtcaacctaccaatcaatccatggatgatacaagagaggatatttatgtcaactatccaaccttctctcgcagaccaaagactagagtttaagcttattcttgacatgagtgcattagtaatgactcttatgtactcatgcatggatctttatgcaatttttttccactacccaaggtctaccttagatactagttgtctgaattgagttactttgataggaaaaatacttcattacctaaaatcatttttcatagaactgtttcagaaaacctgactctaactggtttatatacaaaagaaaacttactgtatcatataacagaatgatccaggggagattaagctttgggcaagggctatttaccagggcttaaatgttgtgtctagaattaagtatgggcataaactggcttctgaatccctttccagagtgttggatccatttccctggtcttggcctcactctcatgcaggctttcctcttgtgttggcaagatggctgccaactcttggcaattcatacatccttgtttctgtctggtagagagtttgcttctcaaatggagcaaacaaatttgattattttttcattgttaaataggcaacatgaccagaaaggatggaatggcttaagtaaactaagggttcacttctagagctgagaagcagggtcaaagcacaatactgggcaattcagagcatggttagaagaggaaaggggagtctcaaagctggagagtttaccaacaaatattgactgcagtgattaaccaagacatttttgttaactaaaaagtgaaatatgggatggattctagaaatggggtatctctgtccatacttctagaatccactctatcagcatagtccagaagaatacctggcagtagaagaaatgaatattcaagaggaagataaatgcgagagggcaatcctttactattctcatatttatttatctctcattctgtatagaattcttgccgccatcccaggtctagccttaggagcaaatgtagtagatagtcgaataataaataacttaatgttttggacatattttgtctacttttgagaattatttttaatatgtaaattctctcaaaagggtcaggcacctagttattattttttaatgattatgtgaaagttgaatataatataccactaaaagtgacagttgaaagtggtggcataggatggtagggtagaaatttgggagggaaaaaagaaattgggagggtacaggcaacaggagaaaggaatcaaaccacagaaaaatacaaagggaaacttctgcttcactattcagacaaagacagccctaatgacatcaccaacagtcaaagcaattagagaccatacctaatattgtttaaattctagatgtaggctaacaatgaaaagtatttgccaaactgaataaaactgtcatggttaccttgaaaaaaaaaaaaaaaaaaaaaaaaaaaaa

SEQ ID NO: 1608 - protein, 336 aa, Homo sapien
MDYPTLLLALLHVYRALCEEVLWHTSVPFAENMSLECVYPSMGILTQVEWFKIGTQQDSIAIFSPTHGMVIRKPYAERVYFLNSTMASNNMTLFFRNASEDDVGYYSCSLYTYPQGTWQKVIQVVQSDSFEAAVPSNSHIVSEPGKNVTLTCQPQMTWPVQAVRWEKIQPRQIDLLTYCNLVHGRNFTSKFPRQIVSNCSHGRWSVIVIPDVTVSDSGLYRCYLQASAGENETFVMRLTVAEGKTDNQYTLFVAGGTVLLLLFVISITTIIVIFLNRRRRRERRDLFTESWDTQKAPNNYRSPISTGQPTNQSMDDTREDIYVNYPTFSRRPKTRV

SEQ ID NO: 1609 - DNA, 5010 bp, Homo sapien
ggcggctcgggacggaggacgcgctagtgtgagtgcgggcttctagaactacaccgaccctcgtgtcctcccttcatcctgcggggctggctggagcggccgctccggtgctgtccagcagccatagggagccgcacggggagcgggaaagcggtcgcggccccaggcggggcggccgggatggagcggggccgcgagcctgtggggaaggggctgtggcggcgcctcgagcggctgcaggttcttctgtgtggcagttcagaatgatggatcaagctagatcagcattctctaacttgtttggtggagaaccattgtcatatacccggttcagcctggctcggcaagtagatggcgataacagtcatgtggagatgaaacttgctgtagatgaagaagaaaatgctgacaataacacaaaggccaatgtcacaaaaccaaaaaggtgtagtggaagtatctgctatgggactattgctgtgatcgtctttttcttgattggatttatgattggctacttgggctattgtaaaggggtagaaccaaaaactgagtgtgagagactggcaggaaccgagtctccagtgagggaggagccaggagaggacttccctgcagcacgtcgcttatattgggatgacctgaagagaaagttgtcggagaaactggacagcacagacttcaccagcaccatcaagctgctgaatgaaaattcatatgtccctcgtgaggctggatctcaaaaagatgaaaatcttgcgttgtatgttgaaaatcaatttcgtgaatttaaactcagcaaagtctggcgtgatcaacattttgttaagattcaggtcaaagacagcgctcaaaactcggtgatcatagttgataagaacggtagacttgtttacctggtggagaatcctgggggttatgtggcgtatagtaaggctgcaacagttactggtaaactggtccatgctaattttggtactaaaaaagattttgaggatttatacactcctgtgaatggatctatagtgattgtcagagcagggaaaatcacctttgcagaaaaggttgcaaatgctgaaagcttaaatgcaattggtgtgttgatatacatggaccagactaaatttcccattgttaacgcagaactttcattctttggacatgctcatctggggacaggtgacccttacacacctggattcccttccttcaatcacactcagtttccaccatctcggtcatcaggattgcctaatatacctgtccagacaatctccagagctgctgcagaaaagctgtttgggaatatggaaggagactgtccctctgactggaaaacagactctacatgtaggatggtaacctcagaaagcaagaatgtgaagctcactgtgagcaatgtgctgaaagagataaaaattcttaacatctttggagttattaaaggctttgtagaaccagatcactatgttgtagttggggcccagagagatgcatggggccctggagctgcaaaatccggtgtaggcacagctctcctattgaaacttgcccagatgttctcagatatggtcttaaaagatgggtttcagcccagcagaagcattatctttgccagttggagtgctggagactttggatcggttggtgccactgaatggctagagggatacctttcgtccctgcatttaaaggctttcacttatattaatctggataaagcggttcttggtaccagcaacttcaaggtttctgccagcccactgttgtatacgcttattgagaaaacaatgcaaaatgtgaagcatccggttactgggcaatttctatatcaggacagcaactgggccagcaaagttgagaaactcactttagacaatgctgctttccctttccttgcatattctggaatcccagcagtttctttctgtttttgcgaggacacagattatccttatttgggtaccaccatggacacctataaggaactgattgagaggattcctgagttgaacaaagtggcacgagcagctgcagaggtcgctggtcagttcgtgattaaactaacccatgatgttgaattgaacctggactatgagaggtacaacagccaactgctttcatttgtgagggatctgaaccaatacagagcagacataaaggaaatgggcctgagtttacagtggctgtattctgctcgtggagacttcttccgtgctacttccagactaacaacagatttcgggaatgctgagaaaacagacagatttgtcatgaagaaactcaatgatcgtgtcatgagagtggagtatcacttcctctctccctacgtatctccaaaagagtctcctttccgacatgtcttctggggctccggctctcacacgctgccagctttactggagaacttgaaactgcgtaaacaaaataacggtgcttttaatgaaacgctgttcagaaaccagttggctctagctacttggactattcagggagctgcaaatgccctctctggtgacgtttgggacattgacaatgagttttaaatgtgatacccatagcttccatgagaacagcagggtagtctggtttctagacttgtgctgatcgtgctaaattttcagtagggctacaaaacctgatgttaaaattccatcccatcatcttggtactactagatgtctttaggcagcagcttttaatacagggtagataacctgtacttcaagttaaagtgaataaccacttaaaaaatgtccatgatggaatattcccctatctctagaattttaagtgctttgtaatgggaactgcctctttcctgttgttgttaatgaaaatgtcagaaaccagttatgtgaatgatctctctgaatcctaagggctggtctctgctgaaggttgtaagtggttcgcttactttgagtgatcctccaacttcatttgatgctaaataggagataccaggttgaaagacctctccaaatgagatctaagcctttccataaggaatgtagcaggtttcctcattcctgaaagaaacagttaactttcagaagagatgggcttgttttcttgccaatgaggtctgaaatggaggtccttctgctggataaaatgaggttcaactgttgattgcaggaataaggccttaatatgttaacctcagtgtcatttatgaaaagaggggaccagaagccaaagacttagtatattttcttttcctctgtcccttcccccataagcctccatttagttctttgttatttttgtttcttccaaagcacattgaaagagaaccagtttcaggtgtttagttgcagactcagtttgtcagactttaaagaataatatgctgccaaattttggccaaagtgttaatcttaggggagagctttctgtccttttggcactgagatatttattgtttatttatcagtgacagagttcactataaatggtgtttttttaatagaatataattatcggaagcagtgccttccataattatgacagttatactgtcggttttttttaaataaaagcagcatctgctaataaaacccaacagatactggaagttttgcatttatggtcaacacttaagggttttagaaaacagccgtcagccaaatgtaattgaataaagttgaagctaagatttagagatgaattaaatttaattaggggttgctaagaagcgagcactgaccagataagaatgctggttttcctaaatgcagtgaattgtgaccaagttataaatcaatgtcacttaaaggctgtggtagtactcctgcaaaattttatagctcagtttatccaaggtgtaactctaattcccatttgcaaaatttccagtacctttgtcacaatcctaacacattatcgggagcagtgtcttccataatgtataaagaacaaggtagtttttacctaccacagtgtctgtatcggagacagtgatctccatatgttacactaagggtgtaagtaattatcgggaacagtgtttcccataattttcttcatgcaatgacatcttcaaagcttgaagatcgttagtatctaacatgtatcccaactcctataattccctatcttttagttttagttgcagaaacattttgtggtcattaagcattgggtgggtaaattcaaccactgtaaaatgaaattactacaaaatttgaaatttagcttgggtttttgttacctttatggtttctccaggtcctctacttaatgagatagcagcatacatttataatgtttgctattgacaagtcattttaatttatcacattatttgcatgttacctcctataaacttagtgcggacaagttttaatccagaattgaccttttgacttaaagcagagggactttgtatagaaggtttgggggctgtggggaaggagagtcccctgaaggtctgacacgtctgcctacccattcgtggtgatcaattaaatgtaggtatgaataagttcgaagctccgtgagtgaaccatcatataaacgtgtagtacagctgtttgtcatagggcagttggaaacggcctcctagggaaaagttcatagggtctcttcaggttcttagtgtcacttacctagatttacagcctcacttgaatgtgtcactactcacagtctctttaatcttcagttttatctttaatctcctcttttatcttggactgacatttagcgtagctaagtgaaaaggtcatagctgagattcctggttcgggtgttacgcacacgtacttaaatgaaagcatgtggcatgttcatcgtataacacaatatgaatacagggcatgcattttgcagcagtgagtctcttcagaaaacccttttctacagttagggttgagttacttcctatcaagccagtacgtgctaacaggctcaatattcctgaatgaaatatcagactagtgacaagctcctggtcttgagatgtcttctcgttaaggagtagggccttttggaggtaaaggtata

SEQ ID NO: 1610 - protein, 760 aa, Homo sapien
MMDQARSAFSNLFGGEPLSYTRFSLARQVDGDNSHVEMKLAVDEEENADNNTKANVTKPKRCSGSICYGTIAVIVFFLIGFMIGYLGYCKGVEPKTECERLAGTESPVREEPGEDFPAARRLYWDDLKRKLSEKLDSTDFTSTIKLLNENSYVPREAGSQKDENLALYVENQFREFKLSKVWRDQHFVKIQVKDSAQNSVIIVDKNGRLVYLVENPGGYVAYSKAATVTGKLVHANFGTKKDFEDLYTPVNGSIVIVRAGKITFAEKVANAESLNAIGVLIYMDQTKFPIVNAELSFFGHAHLGTGDPYTPGFPSFNHTQFPPSRSSGLPNIPVQTISRAAAEKLFGNMEGDCPSDWKTDSTCRMVTSESKNVKLTVSNVLKEIKILNIFGVIKGFVEPDHYVVVGAQRDAWGPGAAKSGVGTALLLKLAQMFSDMVLKDGFQPSRSIIFASWSAGDFGSVGATEWLEGYLSSLHLKAFTYINLDKAVLGTSNFKVSASPLLYTLIEKTMQNVKHPVTGQFLYQDSNWASKVEKLTLDNAAFPFLAYSGIPAVSFCFCEDTDYPYLGTTMDTYKELIERIPELNKVARAAAEVAGQFVIKLTHDVELNLDYERYNSQLLSFVRDLNQYRADIKEMGLSLQWLYSARGDFFRATSRLTTDFGNAEKTDRFVMKKLNDRVMRVEYHFLSPYVSPKESPFRHVFWGSGSHTLPALLENLKLRKQNNGAFNETLFRNQLALATWTIQGAANALSGDVWDIDNEF

SEQ ID NO: 1611 - DNA, 2090 bp, Homo sapien
gttggcgaggagtttcctgtttcccccgcagcgctgagttgaagttgagtgagtcactcgcgcgcacggagcgacgacacccccgcgcgtgcacccgctcgggacaggagccggactcctgtgcagcttccctcggccgccgggggcctccccgcgcctcgccggcctccaggcccctcctggctggcgagcgggcgccacatctggcccgcacatctgcgctgccggcccggcgcggggtccggagagggcgcggcgcggagcgcagccaggggtccgggaaggcgccgtccgtgcgctgggggctcggtctatgacgagcagcggggtctgccatgggtcgggggctgctcaggggcctgtggccgctgcacatcgtcctgtggacgcgtatcgccagcacgatcccaccgcacgttcagaagtcggttaataacgacatgatagtcactgacaacaacggtgcagtcaagtttccacaactgtgtaaattttgtgatgtgagattttccacctgtgacaaccagaaatcctgcatgagcaactgcagcatcacctccatctgtgagaagccacaggaagtctgtgtggctgtatggagaaagaatgacgagaacataacactagagacagtttgccatgaccccaagctcccctaccatgactttattctggaagatgctgcttctccaaagtgcattatgaaggaaaaaaaaaagcctggtgagactttcttcatgtgttcctgtagctctgatgagtgcaatgacaacatcatcttctcagaagaatataacaccagcaatcctgacttgttgctagtcatatttcaagtgacaggcatcagcctcctgccaccactgggagttgccatatctgtcatcatcatcttctactgctaccgcgttaaccggcagcagaagctgagttcaacctgggaaaccggcaagacgcggaagctcatggagttcagcgagcactgtgccatcatcctggaagatgaccgctctgacatcagctccacgtgtgccaacaacatcaaccacaacacagagctgctgcccattgagctggacaccctggtggggaaaggtcgctttgctgaggtctataaggccaagctgaagcagaacacttcagagcagtttgagacagtggcagtcaagatctttccctatgaggagtatgcctcttggaagacagagaaggacatcttctcagacatcaatctgaagcatgagaacatactccagttcctgacggctgaggagcggaagacggagttggggaaacaatactggctgatcaccgccttccacgccaagggcaacctacaggagtacctgacgcggcatgtcatcagctgggaggacctgcgcaagctgggcagctccctcgcccgggggattgctcacctccacagtgatcacactccatgtgggaggcccaagatgcccatcgtgcacagggacctcaagagctccaatatcctcgtgaagaacgacctaacctgctgcctgtgtgactttgggctttccctgcgtctggaccctactctgtctgtggatgacctggctaacagtgggcaggtgggaactgcaagatacatggctccagaagtcctagaatccaggatgaatttggagaatgctgagtccttcaagcagaccgatgtctactccatggctctggtgctctgggaaatgacatctcgctgtaatgcagtgggagaagtaaaagattatgagcctccatttggttccaaggtgcgggagcacccctgtgtcgaaagcatgaaggacaacgtgttgagagatcgagggcgaccagaaattcccagcttctggctcaaccaccagggcatccagatggtgtgtgagacgttgactgagtgctgggaccacgacccagaggcccgtctcacagcccagtgtgtggcagaacgcttcagtgagctggagcatctggacaggctctcggggaggagctgctcggaggagaagattcctgaagacggctccctaaacactaccaaatagctcttatggggcaggctgggcatgtccaaagaggctgcccctctcaccaaa

SEQ ID NO: 1612 - protein, 567 aa, Homo sapien
MGRGLLRGLWPLHIVLWTRIASTIPPHVQKSVNNDMIVTDNNGAVKFPQLCKFCDVRFSTCDNQKSCMSNCSITSICEKPQEVCVAVWRKNDENITLETVCHDPKLPYHDFILEDAASPKCIMKEKKKPGETFFMCSCSSDECNDNIIFSEEYNTSNPDLLLVIFQVTGISLLPPLGVAISVIIIFYCYRVNRQQKLSSTWETGKTRKLMEFSEHCAIILEDDRSDISSTCANNINHNTELLPIELDTLVGKGRFAEVYKAKLKQNTSEQFETVAVKIFPYEEYASWKTEKDIFSDINLKHENILQFLTAEERKTELGKQYWLITAFHAKGNLQEYLTRHVISWEDLRKLGSSLARGIAHLHSDHTPCGRPKMPIVHRDLKSSNILVKNDLTCCLCDFGLSLRLDPTLSVDDLANSGQVGTARYMAPEVLESRMNLENAESFKQTDVYSMALVLWEMTSRCNAVGEVKDYEPPFGSKVREHPCVESMKDNVLRDRGRPEIPSFWLNHQGIQMVCETLTECWDHDPEARLTAQCVAERFSELEHLDRLSGRSCSEEKIPEDGSLNTTK

SEQ ID NO: 1613 - DNA, 894 bp, Homo sapien
cagtctcaatgggggcactggggctggagggcaggggtgggaggctccaggggaggggttccctcctgctagctgtggcaggagccacttctctggtgaccttgttgctggcggtgcctatcactgtcctggctgtgctggccttagtgccccaggatcagggaggactggtaacggagacggccgaccccggggcacaggcccagcaaggactggggtttcagaagctgccagaggaggagccagaaacagatctcagccccgggctcccagctgcccacctcataggcgctccgctgaaggggcaggggctaggctgggagacgacgaaggaacaggcgtttctgacgagcgggacgcagttctcggacgccgaggggctggcgctcccgcaggacggcctctattacctctactgtctcgtcggctaccggggccgggcgccccctggcggcggggacccccagggccgctcggtcacgctgcgcagctctctgtaccgggcggggggcgcctacgggccgggcactcccgagctgctgctcgagggcgccgagacggtgactccagtgctggacccggccaggagacaagggtacgggcctctctggtacacgagcgtggggttcggcggcctggtgcagctccggaggggcgagagggtgtacgtcaacatcagtcaccccgatatggtggacttcgcgagagggaagaccttctttggggccgtgatggtggggtgagggaatatgagtgcgtggtgcgagtgcgtgaatattgggggcccggacgcccaggaccccatggcagtgggaaaaatgtaggagactgtttggaaattgattttgaacctgatgaaaataaagaatggaaagcttcagtgctgccgataaa

SEQ ID NO: 1614 - protein, 244 aa, Homo sapien
MGALGLEGRGGRLQGRGSLLLAVAGATSLVTLLLAVPITVLAVLALVPQDQGGLVTETADPGAQAQQGLGFQKLPEEEPETDLSPGLPAAHLIGAPLKGQGLGWETTKEQAFLTSGTQFSDAEGLALPQDGLYYLYCLVGYRGRAPPGGGDPQGRSVTLRSSLYRAGGAYGPGTPELLLEGAETVTPVLDPARRQGYGPLWYTSVGFGGLVQLRRGERVYVNISHPDMVDFARGKTFFGAVMVG

SEQ ID NO: 1615 - DNA, 1592 bp, Homo sapien
ggagagatgatgagttgctgagtgtgcacacctttccggaacacatacacacaccctgctctgggatcccttgtgaggctgccctcatggagttccccctggcccagatatgtccccaagggagtcacgaagcccccatcccaaccttcagcaccttccagatcacagacatgacccgcaggagctgccagaacctgggctacactgcggcatctccccaggccccggaggctgcctccagcacagggaatgctgagagggcagaggaggtgcctggagaaggaagcctgttcctgcaggccgagacccgggcttggttccagaagacccaggcccactggctcctgcagcacggggcagcccctgcctggttccatggcttcatcacccggagggaggcagagaggctgctggagcccaagcctcaggggtgctacttggtgcggttcagcgagagcgcggtgaccttcgtgctgacttacaggagccggacttgctgccgccacttcctgctggcccagctcagggacgggcgccacgtggtgctgggcgaggacagcgcccacgcgcggctgcaggacctgctgctgcactacaccgcgcacccgctcagcccctacggggagacgctcaccgagcccctcgcccgacagactcctgagcctgcaggactttccctgaggaccgaagaatcaaactttggaagcaaaagccaggacccaaacccccagtacagcccaatcatcaaacaggggcaagccccagtcccgatgcagaaagagggggccggggagaaggagccctcccagctgctcaggcccaagcctcccatccccgccaaacctcagctgcccccagaagtctacacaatccctgttccacgacaccgcccggccccacgccccaagccctccaatcctatctacaatgagcctgatgaacccatagctttctatgccatgggccggggcagccctggggaagcccccagcaacatctatgtggaagtggaagatgagggcctacccgccacccttgggcaccctgtcctacggaagagctggtccaggcctgtcccaggaggccagaatacaggtggctcccagctgcattctgagaactctgtgattgggcaaggccctcccctgccccaccagcccccacccgcctggagacacaccctcccccacaatctttctagacaggtgcttcaggacagaggacaggcatggcttccccttgggcctcctcagtaggcggtctggcctgacccccaacaaagaagcctggaggtcagagaagcaaatgcggagcctgctccctcctaagaagatcccaagaatccaatggctcagtccttggtgatctaagacagcaaagaagtgtgcaaggagggccctgttagctcccactgtcctggtttctcctcctggagtctaatttccttggccctctgagccttttgagtctgggccctggtccaatgctgctgttgtctgaggaatggtttggtgagaacagatgttagaacttgtttgttgattcttgtctggctaataaatcatcaccaactgccttctcctacagggaaa

SEQ ID NO: 1616 - protein, 389 aa, Homo sapien
MEFPLAQICPQGSHEAPIPTFSTFQITDMTRRSCQNLGYTAASPQAPEAASSTGNAERAEEVPGEGSLFLQAETRAWFQKTQAHWLLQHGAAPAWFHGFITRREAERLLEPKPQGCYLVRFSESAVTFVLTYRSRTCCRHFLLAQLRDGRHVVLGEDSAHARLQDLLLHYTAHPLSPYGETLTEPLARQTPEPAGLSLRTEESNFGSKSQDPNPQYSPIIKQGQAPVPMQKEGAGEKEPSQLLRPKPPIPAKPQLPPEVYTIPVPRHRPAPRPKPSNPIYNEPDEPIAFYAMGRGSPGEAPSNIYVEVEDEGLPATLGHPVLRKSWSRPVPGGQNTGGSQLHSENSVIGQGPPLPHQPPPAWRHTLPHNLSRQVLQDRGQAWLPLGPPQ

SEQ ID NO: 1617 - DNA, 947 bp, Homo sapien
ggctcggggccggggccagcacccacactgggtctccacagcggcatggaggcctgcgtgtcttcactgctggtgctggccctgggggccctgtcagtaggcagctcctttgggacccagatcatcgggggccgggaggtgatcccccactcgcgcccgtacatggcctcactgcagagaaatggctcccacctgtgcgggggtgtcctggtgcacccaaagtgggtgctgacggctgcccactgcctggcccagcggatggcccagctgaggctggtgctggggctccacaccctggacagccccggtctcaccttccacatcaaggcagccatccagcaccctcgctacaagcccgtccctgccctggagaacgacctcgcgctgcttcagctggacgggaaagtgaagcccagccggaccatccggccgttggccctgcccagtaagcgccaggtggtggcagcagggactcggtgcagcatggccggctgggggctgacccaccagggcgggcgcctgtcccgggtgctgcgggagctggacctccaagtgctggacacccgcatgtgtaacaacagccgcttctggaacggcagcctctcccccagcatggtctgcctggcggccgactccaaggaccaggctccctgcaagggtgactcgggcgggcccctggtgtgtggcaaaggccgggtgttggccggagtcctgtccttcagctccagggtctgcactgacatcttcaagcctcccgtggccaccgctgtggcgccttacgtgtcctggatcaggaaggtcaccggccgatcggcctgatgccctggggtgatggggaccccctcgctgtctccacaggacccttcccctccaggggtgcagtggggtgggtgaggacgggtgggagggacagggagggaccaataaatcataatgaagaaacgctc

SEQ ID NO: 1618 - protein, 257 aa, Homo sapien
MEACVSSLLVLALGALSVGSSFGTQIIGGREVIPHSRPYMASLQRNGSHLCGGVLVHPKWVLTAAHCLAQRMAQLRLVLGLHTLDSPGLTFHIKAAIQHPRYKPVPALENDLALLQLDGKVKPSRTIRPLALPSKRQVVAAGTRCSMAGWGLTHQGGRLSRVLRELDLQVLDTRMCNNSRFWNGSLSPSMVCLAADSKDQAPCKGDSGGPLVCGKGRVLAGVLSFSSRVCTDIFKPPVATAVAPYVSWIRKVTGRSA

SEQ ID NO: 1619 - DNA, 1318 bp, Homo sapien
ctcctctaggccgccggccgcgaagcgctgagtcacggtgaggcgactggacccacactctcttaacctgccctccctgcactcgctcccggcggctcttcgcgtcacccccgccgctaaggctccaggtgccgctaccgcagcgtgagtacctggggctcctgcaggggtccactagccctccatcctctacagctcagcatcagaacactctctttttagactccgatatggggtcctccaagaaagttactctctcagtgctcagccgggagcagtcggaaggggttggagcgagggtccggagaagcattggcagacccgagttaaaaaatctggatccgtttttactgtttgatgaatttaaaggaggtagaccaggaggatttcctgatcatccacatcgaggttttgaaacagtatcctacctcctggaagggggcagcatggcccatgaagacttctgtggacacactggtaaaatgaacccaggagatttgcagtggatgactgcgggccggggcattctgcacgctgagatgccttgctcagaggagccagcccatggcctacaactgtgggttaatttgaggagctcagagaagatggtggagcctcagtaccaggaactgaaaagtgaagaaatccctaaacccagtaaggatggtgtgacagttgctgtcatttctggagaagccctgggaataaagtccaaggtttacactcgcacaccaaccttatatttggacttcaaattggacccaggagccaaacattcccaacctatccctaaagggtggacaagcttcatttacacgatatctggagatgtgtatattgggcccgatgatgcacaacaaaaaatagaacctcatcacacagcagtgcttggagaaggtgacagtgtccaggtggagaacaaggatcccaagagaagccactttgtcttaattgctggggagccattaagagaaccagttatccaacatggtccatttgtgatgaacaccaatgaagagatttctcaagctattcttgatttcagaaacgcaaaaaatgggtttgaaagggccaaaacctggaaatcaaagattgggaactagtggaaagcggaagagcaggtcttgatgtgtcctagaattttgccatttctgagattgagccattgaaggcattccatttctaaagcttatttagccggtgcttctaaagaattccacactaacgtgataacatggtttttgtaacaataaatgtaggatatttcctggcacatgcaaataaacctaatcattgtttctttaaaaaaaaaaaaaaa

SEQ ID NO: 1620 - protein, 290 aa, Homo sapien
MGSSKKVTLSVLSREQSEGVGARVRRSIGRPELKNLDPFLLFDEFKGGRPGGFPDHPHRGFETVSYLLEGGSMAHEDFCGHTGKMNPGDLQWMTAGRGILHAEMPCSEEPAHGLQLWVNLRSSEKMVEPQYQELKSEEIPKPSKDGVTVAVISGEALGIKSKVYTRTPTLYLDFKLDPGAKHSQPIPKGWTSFIYTISGDVYIGPDDAQQKIEPHHTAVLGEGDSVQVENKDPKRSHFVLIAGEPLREPVIQHGPFVMNTNEEISQAILDFRNAKNGFERAKTWKSKIGN

SEQ ID NO: 1621 - DNA, 1904 bp, Homo sapien
attgaaaatgaattttttgtattcaccagatattcttatatgagaagatctattttaaacagtctaaatattttttcttctgttggaccagcatggcaggatttaagcgagggtatgatggaaagattgctggattatatgatctggataaaaccttgggtcgaggccattttgccgtggttaaacttgccaggcatgtctttacgggtgaaaaggtggcagtaaaagttattgacaagacaaaactggacactctagctactggtcatcttttccaggaagtgagatgcatgaaactagtgcagcatcctaacatcgtccgcctttatgaagttattgacacccagaccaaactatatcttattctagaacttggggatggaggagatatgtttgattatataatgaaacatgaggagggtcttaatgaagacttggccaagaagtattttgctcagatagttcatgctatatcttattgccataaactccatgtggttcacagagacttaaaaccagagaatgtagtcttctttgaaaaacaaggtcttgtaaagttgacagactttgggttcagcaacaaatttcaaccagggaagaagctcactacaagctgtggatctcttgcatattccgctccagaaattctgcttggtgatgagtatgatgcacctgcagtagatatttggagtctgggagtgatccttttcatgttggtgtgtgagcagccgccctttcaagaagccaatgacagtgaaacactgacaatgatcatggattgcaaatatacagtaccatcccatgtgtctaaagagtgtaaagagtaagtaaaacaaagtatgtggaaaccttaaggactcagattaaaaccagaagttttaattccattaatatgtcaagaaaatttgagaggacttcaaacatccaagcatctgggttgattttaatttttgaatttaatatttctgctgttgtttcagagtgttcggtcggcgggggtgggggtggttagcccctgaatatgatctgaaatttaatattagagtacaaaatgtattcatctatttcttattcaagaaatctattacatgcctcttcaaccttcaggagtggtggttatttcacttgaactgaagaaataccatgggaactacctttctctgcatgagcaaaaagcaagatcacctggaattgttttaagttccagagaagagttagggcattttctttcctgaatagaccatcaacacactattttagggtttacatagtatgtctcataattttcttcacacaccttctgctaattgactaaagagctgtttaggtttatgtgactatgggaagccagcataaaaagtatactcaattatttggaatttaaagtagtacatagtactatgatatgtgtagtgagaaatacagtaatggaatagaactgttggaagttcagtattgacattttaagtgacattttttaatgagctcagctgagattatagccactacttacaggactttgctgtagaaacagagttttgagtttctcctatcagctggtaagaaggaaatctgattgcccaaggactttttttctctaaatgaagccccatctcaggtggatgtttaagaacttaggtattcaaggccgaggcaggcagatcacaaggtcaggagatcgagaccatcctgacttacatggtgaaaccccgtctctactaaaaatacagaaaattacctgggcgcctgtagttccagctactcaggaggctgaggcgggagaatggcgtgaaccctggaggtggagcttgcagtgagccgagatcgcgccactgcattccagcctgggcgacagagcgagactctgtctcaaaaaaaaaaaaaaaaaaaaaaaaaaaaaaaaa

SEQ ID NO: 1622 - protein, 244 aa, Homo sapien
MAGFKRGYDGKIAGLYDLDKTLGRGHFAVVKLARHVFTGEKVAVKVIDKTKLDTLATGHLFQEVRCMKLVQHPNIVRLYEVIDTQTKLYLILELGDGGDMFDYIMKHEEGLNEDLAKKYFAQIVHAISYCHKLHVVHRDLKPENVVFFEKQGLVKLTDFGFSNKFQPGKKLTTSCGSLAYSAPEILLGDEYDAPAVDIWSLGVILFMLVCEQPPFQEANDSETLTMIMDCKYTVPSHVSKECKE

SEQ ID NO: 1623 - DNA, 1182 bp, Homo sapien
ttcggcacgagagaactattaactgcctttcttctgtgggctgtgattttcagaggggaatgctaaagtatctcctgatatgcagcatgaatgaaaatggcaagtttcctggccttccttctgctcaactttcgtgtctgcctccttttgcttcagctgctcatgcctcactcagctcagttttctgtgcttggaccctctgggcccatcctggccatggtgggtgaagacgctgatctgccctgtcacctgttcccgaccatgagtgcagagaccatggagctgaagtgggtaagttccagcctaaggcaggtggtgaacgtgtatgcagatggaaaggaagtggaagacaggcagagtgcaccgtatcgagggagaacttcgattctgcgggatggcatcactgcagggaaggctgctttccgaatacacaacgtcacaggctctgacaggtggaagtacctgtgttatttccaagatggtgacttctatgaaaaagccctggtggagctgaaggttgcagcactgggttctgatcttcacgttgatgtgaagggttacaaggatggagggatccatctggagtgcaggtccactggctggtacccccaaccccaaatacagtggagcaacaacaagggagagaacatcccgactgtggaagcacctgtggttgcagacggagtgggcctgtatgcagtagcagcatctgtgatcatgagaggcagctctggggagggtgtatcctgtaccatcagaaattccctcctcggcctggaaaagacagccagcatttccatcgcaagacccttcttcaggagcgcccagaggtggatcgccgccctggcagggaccctgcctgtcttgctgctgctccttgggggagccggttacttcctgtggcaacagcaggaggaaaaaaagactcagttcagaaagaaaaagagagagcaagagttgagagaaatggcatggagcacaatgaagcaagaacaaagcacaagagtgaagctcctggaggaactcagatggagaagtatccagtatgcatctcggggagagagacattcagcctataatgaatggaaaaaggccctcttcaagcctggtgaggaaatgcttcagatgaggctccactttgttaaataaaatggatgaatgaaaaaaaaaaaaaaaaaaaaa

SEQ ID NO: 1624 - protein, 350 aa, Homo sapien
MASFLAFLLLNFRVCLLLLQLLMPHSAQFSVLGPSGPILAMVGEDADLPCHLFPTMSAETMELKWVSSSLRQVVNVYADGKEVEDRQSAPYRGRTSILRDGITAGKAAFRIHNVTGSDRWKYLCYFQDGDFYEKALVELKVAALGSDLHVDVKGYKDGGIHLECRSTGWYPQPQIQWSNNKGENIPTVEAPVVADGVGLYAVAASVIMRGSSGEGVSCTIRNSLLGLEKTASISIARPFFRSAQRWIAALAGTLPVLLLLLGGAGYFLWQQQEEKKTQFRKKKREQELREMAWSTMKQEQSTRVKLLEELRWRSIQYASRGERHSAYNEWKKALFKPGEEMLQMRLHFVK

SEQ ID NO: 1625 - DNA, 4857 bp, Homo sapien
ccgccgccactgccgtcgggtaaggtcccagcacggacatggcctcgcgcggcgcccgcccgggcccgagtcccccgcgccccgctttgtagccccccggcggagaggcggcctcgacggtgcggacggcgcagacggccgggcgggcggcatggaggcggcgcatctgctcccggccgccgacgtgctgcgccacttctcggtgacagccgagggcggcctgagcccggcgcaggtgaccggcgcgcgggagcgctacggccccaacgagctcccgagtgaggaagggaagtccctgtgggagctggtgctggaacagtttgaggacctcctggtgcgcatcctgctgctggctgcccttgtctcctttgtcctggcctggttcgaggagggcgaggagaccacgaccgccttcgtggagcccctggtcatcatgctgatcctcgtggccaacgccattgtgggcgtgtggcaggaacgcaacgccgagagtgccatcgaggccctgaaggagtatgagcctgagatgggcaaggtgatccgctcggaccgcaagggcgtgcagaggatccgtgcccgggacatcgtcccaggggacattgtagaagtggcagtgggggacaaagtgcctgctgacctccgcctcatcgagatcaagtccaccacgctgcgagtggaccagtccatcctgacgggtgaatctgtgtccgtgaccaagcacacagaggccatcccagaccccagagctgtgaaccaggacaagaagaacatgctgttttctggcaccaatatcacatcgggcaaagcggtgggtgtggccgtggccaccggcctgcacacggagctgggcaagatccggagccagatggcggcagtcgagcccgagcggacgccgctgcagcgcaagctggacgagtttggacggcagctgtcccacgccatctctgtgatctgcgtggccgtgtgggtcatcaacatcggccacttcgccgacccggcccacggtggctcctggctgcgtggcgctgtctactacttcaagatcgccgtggccctggcggtggcggccatccccgagggcctcccggctgtcatcactacatgcctggcactgggcacgcggcgcatggcacgcaagaacgccatcgtgcgaagcctgccgtccgtggagaccctgggctgcacctcagtcatctgctccgacaagacgggcacgctcaccaccaatcagatgtctgtctgccggatgttcgtggtagccgaggccgatgcgggctcctgccttttgcacgagttcaccatctcgggtaccacgtatacccccgagggcgaagtgcggcagggggatcagcctgtgcgctgcggccagttcgacgggctggtggagctggcgaccatctgcgccctgtgcaacgactcggctctggactacaacgaggccaagggtgtgtatgagaaggtgggagaggccacggagacagctctgacttgcctggtggagaagatgaacgtgttcgacaccgacctgcaggctctgtcccgggtggagcgagctggcgcctgtaacacggtcatcaagcagctgatgcggaaggagttcaccctggagttctcccgagaccggaaatccatgtccgtgtactgcacgcccacccgccctcaccctactggccagggcagcaagatgtttgtgaagggggctcctgagagtgtgatcgagcgctgtagctcagtccgcgtggggagccgcacagcacccctgacccccacctccagggagcagatcctggcaaagatccgggattggggctcaggctcagacacgctgcgctgcctggcactggccacccgggacgcgcccccaaggaaggaggacatggagctggacgactgcagcaagtttgtgcagtacgagacggacctgaccttcgtgggctgcgtaggcatgctggacccgccgcgacctgaggtggctgcctgcatcacacgctgctaccaggcgggcatccgcgtggtcatgatcacgggggataacaaaggcactgccgtggccatctgccgcaggcttggcatctttggggacacggaagacgtggcgggcaaggcctacacgggccgcgagtttgatgacctcagccccgagcagcagcgccaggcctgccgcaccgcccgctgcttcgcccgcgtggagcccgcacacaagtcccgcatcgtggagaacctgcagtcctttaacgagatcactgctatgactggcgatggagtgaacgacgcaccagccctgaagaaagcagagatcggcatcgccatgggctcaggcacggccgtggccaagtcggcggcagagatggtgctgtcagatgacaactttgcctccatcgtggctgcggtggaggagggccgggccatctacagcaacatgaagcaattcatccgctacctcatctcctccaatgttggcgaggtcgtctgcatcttcctcacggcaattctgggcctgcccgaagccctgatccctgtgcagctgctctgggtgaacctggtgacagacggcctacctgccacggctctgggcttcaacccgccagacctggacatcatggagaagctgccccggagcccccgagaagccctcatcagtggctggctcttcttccgatacctggctatcggagtgtacgtaggcctggccacagtggctgccgccacctggtggtttgtgtatgacgccgagggacctcacatcaacttctaccagctgaggaacttcctgaagtgctccgaagacaacccgctctttgccggcatcgactgtgaggtgttcgagtcacgcttccccaccaccatggccttgtccgtgctcgtgaccattgaaatgtgcaatgccctcaacagcgtctcggagaaccagtcgctgctgcggatgccgccctggatgaacccctggctgctggtggctgtggccatgtccatggccctgcacttcctcatcctgctcgtgccgcccctgcctctcattttccaggtgaccccactgagcgggcgccagtgggtggtggtgctccagatatctctgcctgtcatcctgctggatgaggccctcaagtacctgtcccggaaccacatgcacgcctgtctttatccaggccttctcaggacagtctcgcaggcctggagtaggcagccgctgaccacctcttggaccccagaccacaccgggttggcctctttgggccagggacacagcatcgtctcgctgtcagagctgctcagagagggaggaagcagggaagaaatgagccagaagtgagcgctgggaacagagtggagtctccggtgtgtacctcagactgatggtgcccatgtgttcgcctccgccccccacccttgccaccacactcgcccacttgcccaccgggtcccgccggataaatgacaggcccgaggtcagaatggccatccccgggccccgtcctggggtctctgtccccacttccttctggcctgggaggtctgtaattcctgtctcctggactctcctgggaagttccctgctctgcagctctggcccaggagctgcaggctgggagggggcagccaagaagccggagctggcagcatacccagagatccggggcccccccacccccaaatcacgagtgcagctggagcttgctcccccttgttcggaagctggacgttcacttggtgactggtgcctctgcactgacggaggactctgggggtccttcttaccggctctgacctctctcttcgtgcctggtctgggactgggtcagccctgggggatcagaaggggccatctgggcccagctgtgtacagcgagggtgggcagccccctccactccactctgcttccacaaagtcggctcccgagagctcgaggctgcttctgtttatatgtgcagggcccgggcgggtgaagggtcagagagacggacacaaggagccggcaggagggcggagcgaggatgtcctttcccgggagacaagtcgggaaagcctggctggactgcctcagccccgcgcgcctcctggactcagggttccccgtcctgagctcgggagatgttcagagtcacactgccgcccggtctgccacgcagaggtccaacttgccacccgcgtccctggtacctgagaccaccgacatcctcaggttcctgaccgtggcgcccttctacccagcccagtgtgcggccgccgcgctgtctgcacagctgggggcctctgagcctggtgggcttcctggactcttggcctcactccttgccccctccccacgacacccatgagccgaaaggatgtcactaaggatggctgattccccaagggcacccgctctccctccctccctgctggaggaacacgtcatatcagatgagaggaagatggcctctgatggacagaatttttctcttaactcagcttttgctactttggcaaaaactagcgaggggtagcagaaacctgcaccaaggattgtccctatgtcttggccactcctagagcgtgtgcagactgatgattttatatgtaaatcaagactcacatccctttcctagtcccccacatccaaagcccctcagcctgccttgcagaccaatgggctccatgttctgtagccccctcccctacgcctcacccctcctccctctcacaggttctgggcggccagtgagagaaacgcagtgggggaggcagggagtctggtgcctgcagagattctctgcttctttcctggggggaggtggggaggtcttagcaggagcgggccctgtacccacctgctgacctgctgtttggtagagaaataaaggttgtgtgactggggg

SEQ ID NO: 1626 - protein, 1052 aa, Homo sapien
MEAAHLLPAADVLRHFSVTAEGGLSPAQVTGARERYGPNELPSEEGKSLWELVLEQFEDLLVRILLLAALVSFVLAWFEEGEETTTAFVEPLVIMLILVANAIVGVWQERNAESAIEALKEYEPEMGKVIRSDRKGVQRIRARDIVPGDIVEVAVGDKVPADLRLIEIKSTTLRVDQSILTGESVSVTKHTEAIPDPRAVNQDKKNMLFSGTNITSGKAVGVAVATGLHTELGKIRSQMAAVEPERTPLQRKLDEFGRQLSHAISVICVAVWVINIGHFADPAHGGSWLRGAVYYFKIAVALAVAAIPEGLPAVITTCLALGTRRMARKNAIVRSLPSVETLGCTSVICSDKTGTLTTNQMSVCRMFVVAEADAGSCLLHEFTISGTTYTPEGEVRQGDQPVRCGQFDGLVELATICALCNDSALDYNEAKGVYEKVGEATETALTCLVEKMNVFDTDLQALSRVERAGACNTVIKQLMRKEFTLEFSRDRKSMSVYCTPTRPHPTGQGSKMFVKGAPESVIERCSSVRVGSRTAPLTPTSREQILAKIRDWGSGSDTLRCLALATRDAPPRKEDMELDDCSKFVQYETDLTFVGCVGMLDPPRPEVAACITRCYQAGIRVVMITGDNKGTAVAICRRLGIFGDTEDVAGKAYTGREFDDLSPEQQRQACRTARCFARVEPAHKSRIVENLQSFNEITAMTGDGVNDAPALKKAEIGIAMGSGTAVAKSAAEMVLSDDNFASIVAAVEEGRAIYSNMKQFIRYLISSNVGEVVCIFLTAILGLPEALIPVQLLWVNLVTDGLPATALGFNPPDLDIMEKLPRSPREALISGWLFFRYLAIGVYVGLATVAAATWWFVYDAEGPHINFYQLRNFLKCSEDNPLFAGIDCEVFESRFPTTMALSVLVTIEMCNALNSVSENQSLLRMPPWMNPWLLVAVAMSMALHFLILLVPPLPLIFQVTPLSGRQWVVVLQISLPVILLDEALKYLSRNHMHACLYPGLLRTVSQAWSRQPLTTSWTPDHTGLASLGQGHSIVSLSELLREGGSREEMSQK

SEQ ID NO: 1627 - DNA, 4844 bp, Homo sapien
ccgccgccactgccgtcgggtaaggtcccagcacggacatggcctcgcgcggcgcccgcccgggcccgagtcccccgcgccccgctttgtagccccccggcggagaggcggcctcgacggtgcggacggcgcagacggccgggcgggcggcatggaggcggcgcatctgctcccggccgccgacgtgctgcgccacttctcggtgacagccgagggcggcctgagcccggcgcaggtgaccggcgcgcgggagcgctacggccccaacgagctcccgagtgaggaagggaagtccctgtgggagctggtgctggaacagtttgaggacctcctggtgcgcatcctgctgctggctgcccttgtctcctttgtcctggcctggttcgaggagggcgaggagaccacgaccgccttcgtggagcccctggtcatcatgctgatcctcgtggccaacgccattgtgggcgtgtggcaggaacgcaacgccgagagtgccatcgaggccctgaaggagtatgagcctgagatgggcaaggtgatccgctcggaccgcaagggcgtgcagaggatccgtgcccgggacatcgtcccaggggacattgtagaagtggcagtgggggacaaagtgcctgctgacctccgcctcatcgagatcaagtccaccacgctgcgagtggaccagtccatcctgacgggtgaatctgtgtccgtgaccaagcacacagaggccatcccagaccccagagctgtgaaccaggacaagaagaacatgctgttttctggcaccaatatcacatcgggcaaagcggtgggtgtggccgtggccaccggcctgcacacggagctgggcaagatccggagccagatggcggcagtcgagcccgagcggacgccgctgcagcgcaagctggacgagtttggacggcagctgtcccacgccatctctgtgatctgcgtggccgtgtgggtcatcaacatcggccacttcgccgacccggcccacggtggctcctggctgcgtggcgctgtctactacttcaagatcgccgtggccctggcggtggcggccatccccgagggcctcccggctgtcatcactacatgcctggcactgggcacgcggcgcatggcacgcaagaacgccatcgtgcgaagcctgccgtccgtggagaccctgggctgcacctcagtcatctgctccgacaagacgggcacgctcaccaccaatcagatgtctgtctgccggatgttcgtggtagccgaggccgatgcgggctcctgccttttgcacgagttcaccatctcgggtaccacgtatacccccgagggcgaagtgcggcagggggatcagcctgtgcgctgcggccagttcgacgggctggtggagctggcgaccatctgcgccctgtgcaacgactcggctctggactacaacgaggccaagggtgtgtatgagaaggtgggagaggccacggagacagctctgacttgcctggtggagaagatgaacgtgttcgacaccgacctgcaggctctgtcccgggtggagcgagctggcgcctgtaacacggtcatcaagcagctgatgcggaaggagttcaccctggagttctcccgagaccggaaatccatgtccgtgtactgcacgcccacccgccctcaccctactggccagggcagcaagatgtttgtgaagggggctcctgagagtgtgatcgagcgctgtagctcagtccgcgtggggagccgcacagcacccctgacccccacctccagggagcagatcctggcaaagatccgggattggggctcaggctcagacacgctgcgctgcctggcactggccacccgggacgcgcccccaaggaaggaggacatggagctggacgactgcagcaagtttgtgcagtacgagacggacctgaccttcgtgggctgcgtaggcatgctggacccgccgcgacctgaggtggctgcctgcatcacacgctgctaccaggcgggcatccgcgtggtcatgatcacgggggataacaaaggcactgccgtggccatctgccgcaggcttggcatctttggggacacggaagacgtggcgggcaaggcctacacgggccgcgagtttgatgacctcagccccgagcagcagcgccaggcctgccgcaccgcccgctgcttcgcccgcgtggagcccgcacacaagtcccgcatcgtggagaacctgcagtcctttaacgagatcactgctatgactggcgatggagtgaacgacgcaccagccctgaagaaagcagagatcggcatcgccatgggctcaggcacggccgtggccaagtcggcggcagagatggtgctgtcagatgacaactttgcctccatcgtggctgcggtggaggagggccgggccatctacagcaacatgaagcaattcatccgctacctcatctcctccaatgttggcgaggtcgtctgcatcttcctcacggcaattctgggcctgcccgaagccctgatccctgtgcagctgctctgggtgaacctggtgacagacggcctacctgccacggctctgggcttcaacccgccagacctggacatcatggagaagctgccccggagcccccgagaagccctcatcagtggctggctcttcttccgatacctggctatcggagtgtacgtaggcctggccacagtggctgccgccacctggtggtttgtgtatgacgccgagggacctcacatcaacttctaccagctgaggaacttcctgaagtgctccgaagacaacccgctctttgccggcatcgactgtgaggtgttcgagtcacgcttccccaccaccatggccttgtccgtgctcgtgaccattgaaatgtgcaatgccctcaacagcgtctcggagaaccagtcgctgctgcggatgccgccctggatgaacccctggctgctggtggctgtggccatgtccatggccctgcacttcctcatcctgctcgtgccgcccctgcctctcattttccaggtgaccccactgagcgggcgccagtgggtggtggtgctccagatatctctgcctgtcatcctgctggatgaggccctcaagtacctgtcccggaaccacatgcacgcctgtctttatccaggccttctcaggacagtctcgcaggcctggagtaggcagccgctgaccacctcttggaccccagaccacaccggggccagggacacagcatcgtctcgctgtcagagctgctcagagagggaggaagcagggaagaaatgagccagaagtgagcgctgggaacagagtggagtctccggtgtgtacctcagactgatggtgcccatgtgttcgcctccgccccccacccttgccaccacactcgcccacttgcccaccgggtcccgccggataaatgacaggcccgaggtcagaatggccatccccgggccccgtcctggggtctctgtccccacttccttctggcctgggaggtctgtaattcctgtctcctggactctcctgggaagttccctgctctgcagctctggcccaggagctgcaggctgggagggggcagccaagaagccggagctggcagcatacccagagatccggggcccccccacccccaaatcacgagtgcagctggagcttgctcccccttgttcggaagctggacgttcacttggtgactggtgcctctgcactgacggaggactctgggggtccttcttaccggctctgacctctctcttcgtgcctggtctgggactgggtcagccctgggggatcagaaggggccatctgggcccagctgtgtacagcgagggtgggcagccccctccactccactctgcttccacaaagtcggctcccgagagctcgaggctgcttctgtttatatgtgcagggcccgggcgggtgaagggtcagagagacggacacaaggagccggcaggagggcggagcgaggatgtcctttcccgggagacaagtcgggaaagcctggctggactgcctcagccccgcgcgcctcctggactcagggttccccgtcctgagctcgggagatgttcagagtcacactgccgcccggtctgccacgcagaggtccaacttgccacccgcgtccctggtacctgagaccaccgacatcctcaggttcctgaccgtggcgcccttctacccagcccagtgtgcggccgccgcgctgtctgcacagctgggggcctctgagcctggtgggcttcctggactcttggcctcactccttgccccctccccacgacacccatgagccgaaaggatgtcactaaggatggctgattccccaagggcacccgctctccctccctccctgctggaggaacacgtcatatcagatgagaggaagatggcctctgatggacagaatttttctcttaactcagcttttgctactttggcaaaaactagcgaggggtagcagaaacctgcaccaaggattgtccctatgtcttggccactcctagagcgtgtgcagactgatgattttatatgtaaatcaagactcacatccctttcctagtcccccacatccaaagcccctcagcctgccttgcagaccaatgggctccatgttctgtagccccctcccctacgcctcacccctcctccctctcacaggttctgggcggccagtgagagaaacgcagtgggggaggcagggagtctggtgcctgcagagattctctgcttctttcctggggggaggtggggaggtcttagcaggagcgggccctgtacccacctgctgacctgctgtttggtagagaaataaaggttgtgtgactggggg

SEQ ID NO: 1628 - protein, 1044 aa, Homo sapien
MEAAHLLPAADVLRHFSVTAEGGLSPAQVTGARERYGPNELPSEEGKSLWELVLEQFEDLLVRILLLAALVSFVLAWFEEGEETTTAFVEPLVIMLILVANAIVGVWQERNAESAIEALKEYEPEMGKVIRSDRKGVQRIRARDIVPGDIVEVAVGDKVPADLRLIEIKSTTLRVDQSILTGESVSVTKHTEAIPDPRAVNQDKKNMLFSGTNITSGKAVGVAVATGLHTELGKIRSQMAAVEPERTPLQRKLDEFGRQLSHAISVICVAVWVINIGHFADPAHGGSWLRGAVYYFKIAVALAVAAIPEGLPAVITTCLALGTRRMARKNAIVRSLPSVETLGCTSVICSDKTGTLTTNQMSVCRMFVVAEADAGSCLLHEFTISGTTYTPEGEVRQGDQPVRCGQFDGLVELATICALCNDSALDYNEAKGVYEKVGEATETALTCLVEKMNVFDTDLQALSRVERAGACNTVIKQLMRKEFTLEFSRDRKSMSVYCTPTRPHPTGQGSKMFVKGAPESVIERCSSVRVGSRTAPLTPTSREQILAKIRDWGSGSDTLRCLALATRDAPPRKEDMELDDCSKFVQYETDLTFVGCVGMLDPPRPEVAACITRCYQAGIRVVMITGDNKGTAVAICRRLGIFGDTEDVAGKAYTGREFDDLSPEQQRQACRTARCFARVEPAHKSRIVENLQSFNEITAMTGDGVNDAPALKKAEIGIAMGSGTAVAKSAAEMVLSDDNFASIVAAVEEGRAIYSNMKQFIRYLISSNVGEVVCIFLTAILGLPEALIPVQLLWVNLVTDGLPATALGFNPPDLDIMEKLPRSPREALISGWLFFRYLAIGVYVGLATVAAATWWFVYDAEGPHINFYQLRNFLKCSEDNPLFAGIDCEVFESRFPTTMALSVLVTIEMCNALNSVSENQSLLRMPPWMNPWLLVAVAMSMALHFLILLVPPLPLIFQVTPLSGRQWVVVLQISLPVILLDEALKYLSRNHMHACLYPGLLRTVSQAWSRQPLTTSWTPDHTGARDTASSRCQSCSEREEAGKK

SEQ ID NO: 1629 - DNA, 542 bp, Homo sapien
acagtggtgagctcttagcttcaccaggctcatcaaagctgctccaggaaggcccaagccagaccagaagacatgcagatcatcaccacagccctggtgtgcttgctgctagctgggatgtggccggaagatgtggacagcaagagcatgcaggtacccttctccagatgttgcttctcatttgcggagcaagagattcccctgagggcaatcctgtgttacagaaataccagctccatctgctccaatgagggcttaatattcaagctgaagagaggcaaagaggcctgcgccttggacacagttggatgggttcagaggcacagaaaaatgctgaggcactgcccgtcaaaaagaaaatgagcagatttctttccattgtgggctctggaaaccacatggcttcacctgtccccgaaactaccagccctacaccattccttctgccctgcttttgctaggtcacagaggatctgcttggtcttgataagctatgttgttgcactttaaacatttaaattatacaatcatcaacccccaac

SEQ ID NO: 1630 - protein, 96 aa, Homo sapien
MQIITTALVCLLLAGMWPEDVDSKSMQVPFSRCCFSFAEQEIPLRAILCYRNTSSICSNEGLIFKLKRGKEACALDTVGWVQRHRKMLRHCPSKRK

SEQ ID NO: 1631 - DNA, 1935 bp, Homo sapien
agaccaaggagtggaaagttctccggcagccctgagatctcaagagtgacatttgtgagaccagctaatttgattaaaattctcttggaatcagctttgctagtatcatacctgtgccagatttcatcatgggaaacagctgttacaacatagtagccactctgttgctggtcctcaactttgagaggacaagatcattgcaggatccttgtagtaactgcccagctggtacattctgtgataataacaggaatcagatttgcagtccctgtcctccaaatagtttctccagcgcaggtggacaaaggacctgtgacatatgcaggcagtgtaaaggtgttttcaggaccaggaaggagtgttcctccaccagcaatgcagagtgtgactgcactccagggtttcactgcctgggggcaggatgcagcatgtgtgaacaggattgtaaacaaggtcaagaactgacaaaaaaaggttgtaaagactgttgctttgggacatttaacgatcagaaacgtggcatctgtcgaccctggacaaactgttctttggatggaaagtctgtgcttgtgaatgggacgaaggagagggacgtggtctgtggaccatctccagccgacctctctccgggagcatcctctgtgaccccgcctgcccctgcgagagagccaggacactctccgcagatcatctccttctttcttgcgctgacgtcgactgcgttgctcttcctgctgttcttcctcacgctccgtttctctgttgttaaacggggcagaaagaaactcctgtatatattcaaacaaccatttatgagaccagtacaaactactcaagaggaagatggctgtagctgccgatttccagaagaagaagaaggaggatgtgaactgtgaaatggaagtcaatagggctgttgggactttcttgaaaagaagcaaggaaatatgagtcatccgctatcacagctttcaaaagcaagaacaccatcctacataatacccaggattcccccaacacacgttcttttctaaatgccaatgagttggcctttaaaaatgcaccactttttttttttttttgacagggtctcactctgtcacccaggctggagtgcagtggcaccaccatggctctctgcagccttgacctctgggagctcaagtgatcctcctgcctcagtctcctgagtagctggaactacaaggaagggccaccacacctgactaacttttttgttttttgtttggtaaagatggcatttcaccatgttgtacaggctggtctcaaactcctaggttcactttggcctcccaaagtgctgggattacagacatgaactgccaggcccggccaaaataatgcaccacttttaacagaacagacagatgaggacagagctggtgataaaaaaaaaaaaaaaaaagcattttctagataccacttaacaggtttgagctagtttttttgaaatccaaagaaaattatagtttaaattcaattacatagtccagtggtccaactataattataatcaaaatcaatgcaggtttgttttttggtgctaatatgacatatgacaataagccacgaggtgcagtaagtacccgactaaagtttccgtgggttctgtcatgtaacacgacatgctccaccgtcaggggggagtatgagcagagtgcctgagtttagggtcaaggacaaaaaacctcaggcctggaggaagttttggaaagagttcaagtgtctgtatatcctatggtcttctccatcctcacaccttctgcctttgtcctgctcccttttaagccaggttacattctaaaaattcttaacttttaacataatattttataccaaagccaataaatgaactgcatatgaaaaaaaaaaaaaaaaaaaaaaaaaaaaaaaaaaaaaaaaaaaaaaaaaaaa

SEQ ID NO: 1632 - protein, 255 aa, Homo sapien
MGNSCYNIVATLLLVLNFERTRSLQDPCSNCPAGTFCDNNRNQICSPCPPNSFSSAGGQRTCDICRQCKGVFRTRKECSSTSNAECDCTPGFHCLGAGCSMCEQDCKQGQELTKKGCKDCCFGTFNDQKRGICRPWTNCSLDGKSVLVNGTKERDVVCGPSPADLSPGASSVTPPAPAREPGHSPQIISFFLALTSTALLFLLFFLTLRFSVVKRGRKKLLYIFKQPFMRPVQTTQEEDGCSCRFPEEEEGGCEL

SEQ ID NO: 1633 - DNA, 921 bp, Homo sapien
ttctatgcaaagcaaaaagccagcagcagccccaagctgataagattaatctaaagagcaaattatggtgtaatttcctatgctgaaactttgtagttaattttttaaaaaggtttcattttcctattggtctgatttcacaggaacattttacctgtttgtgaggcattttttctcctggaagagaggtgctgattggccccaagtgactgacaatctggtgtaacgaaaatttccaatgtaaactcattttccctcggtttcagcaattttaaatctatatatagagatatctttgtcagcattgcatcgttagcttctcctgataaactaattgcctcacattgtcactgcaaatcgacacctattaatgggtctcacctcccaactgcttccccctctgttcttcctgctagcatgtgccggcaactttgtccacggacacaagtgcgatatcaccttacaggagatcatcaaaactttgaacagcctcacagagcagaagactctgtgcaccgagttgaccgtaacagacatctttgctgcctccaagaacacaactgagaaggaaaccttctgcagggctgcgactgtgctccggcagttctacagccaccatgagaaggacactcgctgcctgggtgcgactgcacagcagttccacaggcacaagcagctgatccgattcctgaaacggctcgacaggaacctctggggcctggcgggcttgaattcctgtcctgtgaaggaagccaaccagagtacgttggaaaacttcttggaaaggctaaagacgatcatgagagagaaatattcaaagtgttcgagctgaatattttaatttatgagtttttgatagctttattttttaagtatttatatatttataactcatcataaaataaagtatatatagaatct

SEQ ID NO: 1634 - protein, 153 aa, Homo sapien [sequence omitted]

SEQ ID NO: 1635 - DNA, 921 bp, Homo sapien; identical to SEQ ID NO: 1633

SEQ ID NO: 1636 - protein, 153 aa, Homo sapien [sequence omitted]

SEQ ID NO: 1637 - DNA, 2343 bp, Homo sapien
cggccccccccggccacggcgcaccgcctccccgcccccgcccgccctcccccaccgcgcgcgctccgcccgccccggagcctcgccctccgccacgatgagcaaatgagcgcgagcgagggcatgaaatttaaattccactcaggggagaaagtgctgtgcttcgagcctgaccccaccaaggcgcgagtgctgtacgatgccaagattgttgtagttattgttgggaaagacgaaaaaggcagaaagatcccagaatatctgatccattttaatggttggaacagaagctgggatagatgggcagcagaagatcatgtgcttcgtgataccgatgaaaatcgtagattacagcgtaaattggcaagaaaagctgtagctcgcctgaggagcacaggaagaaagaagaagcgctgcaggttgcctggtgtggactctgtcttaaaaggcctccccactgaagaaaaagatgaaaatgatgaaaactcattaagcagttcctctgactgtagtgaaaacaaggatgaagaaataagtgaagaaagtgatattgaagaaaagactgaagtgaaagaagaaccagagcttcaaacaagaagggaaatggaagaaagaacaataactatagaaatccctgaagttctgaagaagcagctggaggatgattgttactacattaacaggaggaaacggttagtgaaacttccatgccagaccaacatcataacgattttggaatcctatgtgaagcattttgctatcaatgcagccttttcagccaatgagaggcctcgtcaccatcacgttatgccacatgccaacatgaacgtgcattatatcccagcagaaaagaatgttgacctttgtaaggagatggtggatggattaagaataacctttgattacactctcccgttggttttactctatccatatgaacaagctcagtataaaaaggtgacttcgtctaaattttttcttccaattaaggaaagtgccacaagcactaacaggagccaggaggaactctctcccagtccgcctttgttgaatccatccacgccacagtccacagagagtcagccgaccaccggtgaaccagccacccccaaaaggcgcaaagctgagccagaagcattgcagtctctgaggcggtccacgcgccacagtgccaactgtgacaggctttctgagagcagcgcttcacctcagcccaagcgccggcagcaggacacatccgccagcatgcccaagctcttcctgcacctggaaaagaagacacctgtgcatagcagatcatcttcacctattcctctgactcctagcaaggaagggagtgctgtgtttgctggctttgaagggagaagaactaatgaaataaacgaggtcctctcctggaagcttgtgcctgacaattaccccccaggtgaccagccgcctccaccctcttacatttatggggcacaacatttgctgcgattgtttgtgaaacttccagaaatccttggaaagatgtccttttctgagaagaatctgaaggctttattgaagcactttgatctctttttgaggtttttagcagaataccacgatgacttcttcccagagtcggcttatgtcgctgcctgtgaggcacattacagcaccaagaacccccgggcaatttattaaaatgttgttggttctgtaagagcaactgctctgtctagtttggcgctctgggttccaggtgaataactaacaaggtggtgggtctttacccacagcgcaaacacaatgcccaccttggggctctgttgtttgagttgcccacatactgcagttattctgttaggaatgattccctgggtgcctgaaagtgctctgacacgacacttgttactttgcaggccatctgtgatggcaaggaaaaagcaactatgttcacagtgaaatattcgtggaataggttaggccatttcagtagacattgcagttagttagcaagaaccacattgtctctttatttgttagcattaaacaaatttttttttgcaaattggttttatttttttgatgaagccgagcaactctgtccaaaaaggtttagtttgtactcggaaaccacaaagtagtctcaaagtattttagagggaatcgatattgatggcaaaagaaaatttgcagctatgcatttgcttctaacggttccctctctgtgaaacattatttttggtgatctaaagaaagcattgcctttcttatttgagattttacagctatactttgttgtgtaatgttatggttccctttctgtaaaatgttatttttggtgatctaaataaagcctgtcttgtttgaaag

SEQ ID NO: 1638 - protein, 521 aa, Homo sapien
MSASEGMKFKFHSGEKVLCFEPDPTKARVLYDAKIVVVIVGKDEKGRKIPEYLIHFNGWNRSWDRWAAEDHVLRDTDENRRLQRKLARKAVARLRSTGRKKKRCRLPGVDSVLKGLPTEEKDENDENSLSSSSDCSENKDEEISEESDIEEKTEVKEEPELQTRREMEERTITIEIPEVLKKQLEDDCYYINRRKRLVKLPCQTNIITILESYVKHFAINAAFSANERPRHHHVMPHANMNVHYIPAEKNVDLCKEMVDGLRITFDYTLPLVLLYPYEQAQYKKVTSSKFFLPIKESATSTNRSQEELSPSPPLLNPSTPQSTESQPTTGEPATPKRRKAEPEALQSLRRSTRHSANCDRLSESSASPQPKRRQQDTSASMPKLFLHLEKKTPVHSRSSSPIPLTPSKEGSAVFAGFEGRRTNEINEVLSWKLVPDNYPPGDQPPPPSYIYGAQHLLRLFVKLPEILGKMSFSEKNLKALLKHFDLFLRFLAEYHDDFFPESAYVAACEAHYSTKNPRAIY

SEQ ID NO: 1639 - DNA, 2366 bp, Homo sapien
gaccacgcgtatcgatgtcgacccacaggattgtcacagagggcagggtggtgactgaggaccagctcctcatgcttgaggctgtggtgatgcacctcgggatccgctctgcccgctgtgtcctgggcatggagggtcagcaggtcatcctgcacctgcccctatcccagaaggggcccttctggacatgggagcctagtgcccctcgaactctgctccaggtcctacaggatccagccctgaaagacctcgtcctcacctgccccaccctgccctggcattccctgatcctgcggccccagtatgagatccaagccatcatgcacatgcgcaggaccattgtcaagatcccttctaccctggaggtcgacgtggaggacgtcaccgcctcctcccggcacgtccactttatcaaaccgctgctgctgagcgaggtcctggcctgggaaggccctttccccctgtccatggagatcctggaggttcctgagggccgccccatcttcctcagcccgtgggtgggctccttgcaaaaaggccagaggctttgcgtctatggcctagcctcaccaccctggcgggtcctggcctcaagcaagggccgcaaggtgcccaggcacttcctggtgtcagggggctaccaaggcaagctgcggcggcggccaagggagttccccacggcctatgacctcctaggtgctttccagccaggccggccactccgggtggtggccacaaaggactgtgagggcgagagggaggagaatcccgagttcacgtccctggctgtgggtgaccggctggaggtgctggggcctggccaggcccatggggcccagggcagtgacgtggatgtcttggtttgtcagcggctgagtgaccaggctggggaagatgaggaggaagagtgcaaagaggaggcagagacccagagcgggtcctgctgcccttccacttccctggcagtttcgtggaggagatgagtgacagccggcgctacagcctggcagatctgactgcccagttttcaatgccttgtgaggtcaaggtggtggccaaggacaccagccaccccaatgaccctcagaacctccttcctgggcctgcggctggaggagaagatcacagagccattcttggtggtgagcctggactctgagctgggatgtgctttgagatccctccccggaggctggacctgactgtcgtggaggccaaggggcagccagacttgccagaggggtctctccccatagccacagtggaggaagctggaacagacaccttttattattgtcttcggaagttaccagcctgtgagatccaagcccccccacccaggccccctaaaaatcagggcctcagcaagcagaggagacacagcagtgagggaggcgtcaagtcttctcaagtcttaggattgcagcaacacgttcggctgcccaaacccaaggcgaagaccttgccagagttcatcaaggatggctccagtacgtacagcaagattcctgcccacaggaagggccacaggcccgctaagccccaaaggcaggatctagatgatgatgaacatgattatgaagaaatacttgagcaatttcagaaaaccatctaagtgctggaggaaccacgcttcctaactgctgcttctcagggaatccgacaccagccaaccattttaagcctctaaaagacctcgggcaagtctcacagaaactgagctgcagacggggagtagctttgtggaaactgatttgatggacactgcaccagcttccttcaggttctagattcttgctacttagggcgggctggtttggacctaacatctcgcacgtgactccctcagcctcagagccttgggatgcagagcagctggcagggttcctctcaatcctgcaaccccagctgtcccaccggtggatgcagaggggaatccgaggccatcaaccttggtgacagcagcgcagtgccaatgctgatcacactgcatgggagattttgttaacgtctgccacccccactctcacccccaagctctaagcccccgggaggcctggactgtcttcctcatctctgtagcaccaagcctgatagatctgtatatggtaaacaggggtttaaccacatgtggttaacatggattaatgtgggaatttggcttcaagaacacaaccttaggaccttgggccccaaaagctggtggtgaaatgagaggagccaatttaagaagacccttatggagacctgaggctgcagaaactggtaggtttcatcaggtggttaaagtcgtcaaagttgtaagtgactaaccaagattatttcattttaaaaccacagaataaaaatgacacctgagcttctcc

SEQ ID NO: 1640 - protein, 284 aa, Homo sapien
MEGQQVILHLPLSQKGPFWTWEPSAPRTLLQVLQDPALKDLVLTCPTLPWHSLILRPQYEIQAIMHMRRTIVKIPSTLEVDVEDVTASSRHVHFIKPLLLSEVLAWEGPFPLSMEILEVPEGRPIFLSPWVGSLQKGQRLCVYGLASPPWRVLASSKGRKVPRHFLVSGGYQGKLRRRPREFPTAYDLLGAFQPGRPLRVVATKDCEGEREENPEFTSLAVGDRLEVLGPGQAHGAQGSDVDVLVCQRLSDQAGEDEEEECKEEAETQSGSCCPSTSLAVSWRR

SEQ ID NO: 1641 - DNA, 1121 bp, Homo sapien
ctagctctgtgggaaggttttgggctctctggctcggattttgcaatttctccctggggactgccgtggagccgcatccactgtggattataattgcaacatgacgctggaagagctcgtggcgtgcgacaacgcggcgcagaagatgcagacggtgaccgccgcggtggaggagcttttggtggccgctcagcgccaggatcgcctcacagtgggggtgtacgagtcggccaagttgatgaatgtggacccagacagcgtggtcctctgcctcttggccattgacgaggaggaggaggatgacatcgccctgcaaatccacttcacgctcatccagtccttctgctgtgacaacgacatcaacatcgtgcgggtgtcgggcaatgcgcgcctggcgcagctcctgggagagccggccgagacccagggcaccaccgaggcccgagacctccactgtcttcccttcctacagaaccctcacacggacgcctggaagagccacggcttggtggaggtggccagctactgcgaagaaagccggggcaacaaccagtgggtcccctacatctctcttcaggaacgctgaggcccttcccagcagcagaatctgttgagttgctgccaacaaacaaaaaatacaataaatatttgaaccccctcccccccagcacaacccccccaaaacaacccaacccacgaggaccatcgggggcaggtcgttggagactgaagagaaagagagagaggagaagggagtgaggggccgctgccgccttccccatcacggagggtccagactgtccactcgggggtggagtgagactgactgcaagccccaccctccttgagactggagctgagcgtctgcatacgagagacttggttgaaacttggttggtccttgtctgcaccctcgacaagaccacactttgggacttgggagctggggctgaagttgctctgtacccatgaactcccagtttgcgaattaataagagacaatctattttgttacttgcacttgttattcgaaccactgagagcgagatgggaagcatagatatctatatttttatttctactatgagggccttgtaataaatttctaaagcctcaaaaaa

SEQ ID NO: 1642 - protein, 161 aa, Homo sapien
MTLEELVACDNAAQKMQTVTAAVEELLVAAQRQDRLTVGVYESAKLMNVDPDSVVLCLLAIDEEEEDDIALQIHFTLIQSFCCDNDINIVRVSGNARLAQLLGEPAETQGTTEARDLHCLPFLQNPHTDAWKSHGLVEVASYCEESRGNNQWVPYISLQER

SEQ ID NO: 1643 - DNA, 2089 bp, Homo sapien
gtttgagcagcattgttagagcctgtggaaaacactttacaactgtgtaactgtcttcatctttacagaggaatagtctacaaaggaagacttgtaacctggagaagagacctgtcatttactccatcctttatagtgatgctacaggacgaagaggaatggataaaaacattggcgagcaactcaataaagcgtatgaagccttccggcaggcatgcatggatagagattctgcagtaaaagaattacagcaaaagactgagaactatgagcagagaatacgtgaacaacaggaacagctgtcacttcaacagactattattgacaagctaaaatctcagttacttcttgtgaattccactcaagataacaattatggctgtgttcctctgcttgaagacagtgaaacaagaaagaataatttgactcttgatcagccacaagataaagtgatttcaggaatagcaagagaaaaactaccaaaggtaagaagacaagaggtttcttctcctagaaaagaaacttcagcaaggagtcttggcagtcctttgctccatgaaaggggtaatatagagaagactttctgggatctgaaagaagaatttcataaaatatgcatgctagcaaaagcacagaaagaccacttaagcaaacttaatataccagacactgcaactgaaacacagtgctctgtgcctatacagtgtacggataaaacagataaacaagaagcgctgtttaagcctcaggctaaagatgatataaatagaggtgcaccatccatcacatctgtcacaccaagaggactgtgcagagatgaggaagacacctcttttgaatcactttctaaattcaatgtcaagtttccacctatggacaatgactcaactttcttacatagcactccagagagacccggcatccttagtcctgccacgtctgaggcagtgtgccaagagaaatttaatatggagttcagagacaacccagggaactttgttaaaacagaagaaactttatttgaaattcagggaattgaccccatagcttcagctatacaaaaccttaaaacaactgacaaaacaaagccctcaaatctcgtaaacacttgtatcaggacaactctggatagagctgcgtgtttgccacctggagaccataatgcattatatgtaaatagcttcccacttctggacccatctgatgcaccttttccctcactcgattccccgggaaaagcaatccgaggaccacagcagcccatttggaagccctttcctaatcaagacagtgactcggtggtactaagtggcacagactcagaactgcatatacctcgagtatgtgaattctgtcaagcagttttcccaccatccattacatccaggggggatttccttcggcatcttaattcacacttcaatggagagacttaagacacatttgaaaacagacatatcaagttctatgtgatgattttgggtttttaatactataaatacttgattgtaaactaaattcaagatcatttataggaaaatctagtttcacagctatttgaatttttttctggatttactatataactcttattttttaaaagatcattctgttctttcaaggagaaataagcctaaaagaagaaaaacaaaaaaaattctgtataaaactgtaatcctttgtattcatgtttacagtgctattactataattcaaaattatgtatgtgacttagagttatataatcataatttatgtttatttcaaatatctaagtttattgcttggatttctagtgagagctgttgaatttggtgatgtcaaatgtttctagggtttttttagtttgtttttattgaaaaatttaattatttatgctataggtgatattctctttgaataaacctataatagaaaatagcagacaacataaacatctttgtaaatatcaaacctaatacatttcttgtccagtgataaaacaactggtagaattatttaaacactttagatttttaaataatatacatggctttaatttttactgtgtgtatagctacatgatgaaattaattaaatattaagaggt

SEQ ID NO: 1644 - protein, 425 aa, Homo sapien
MDKNIGEQLNKAYEAFRQACMDRDSAVKELQQKTENYEQRIREQQEQLSLQQTIIDKLKSQLLLVNSTQDNNYGCVPLLEDSETRKNNLTLDQPQDKVISGIAREKLPKVRRQEVSSPRKETSARSLGSPLLHERGNIEKTFWDLKEEFHKICMLAKAQKDHLSKLNIPDTATETQCSVPIQCTDKTDKQEALFKPQAKDDINRGAPSITSVTPRGLCRDEEDTSFESLSKFNVKFPPMDNDSTFLHSTPERPGILSPATSEAVCQEKFNMEFRDNPGNFVKTEETLFEIQGIDPIASAIQNLKTTDKTKPSNLVNTCIRTTLDRAACLPPGDHNALYVNSFPLLDPSDAPFPSLDSPGKAIRGPQQPIWKPFPNQDSDSVVLSGTDSELHIPRVCEFCQAVFPPSITSRGDFLRHLNSHFNGET

SEQ ID NO: 1645 - DNA, 3122 bp, Homo sapien
cgctgcggccgctatcccctccggaccatggccgacgacgacgtgctgttcgaggatgtgtacgagctgtgcgaggtgatcggaaagggtcccttcagtgttgtacgacgatgtatcaacagagaaactgggcaacaatttgctgtaaaaattgttgatgtagccaagttcacatcaagtccagggttaagtacagaagatctaaagcgggaagccagtatctgtcatatgctgaaacatccacacattgtagagttattggagacatatagctcagatggaatgctttacatggttttcgaatttatggatggagcagatctgtgttttgaaatcgtaaagcgagctgacgctggttttgtgtacagtgaagctgtagccagccattatatgagacagatactggaagctctacgctactgccatgataataacataattcacagggatgtgaagccccactgtgttctccttgcctcaaaagaaaactcggcacctgttaaacttggaggctttggggtagctattcaattaggggagtctggacttgtagctggaggacgtgttggaacacctcattttatggcaccagaagtggtcaaaagagagccttacggaaagcctgtagacgtctgggggtgcggtgtgatcctttttatcctgctcagtggttgtttgcctttttacggaaccaaggaaagattgtttgaaggcattattaaaggaaaatataagatgaatccaaggcagtggagccatatctctgaaagtgccaaagacctagtacgtcgcatgctgatgctggatccagctgaaaggatcactgtttatgaagcactgaatcacccatggcttaaggagcgggatcgttacgcctacaagattcatcttccagaaacagtagagcagctgaggaaattcaatgcaaggaggaaactaaagggtgcagtactagccgctgtgtcaagtcacaaattcaactcattctatggggatccccctgaagagttaccagatttctccgaagaccctacctcctcagggcttctagcagcagaaagagcagtctcacaggtgctggacagcctggaagagattcatgcgcttacagactgcagtgaaaaggacctagattttctacacagtgttttccaggatcagcatcttcacacactactagatctgtatgacaaaattaacacaaagtcttcaccacaaatcaggaatcctccaagcgatgcagtacagagagccaaagaggtattggaagaaatttcatgttaccctgagaataacgacgcaaaggaactaaagcgtattttaacacaacctcatttcatggccttacttcagactcacgacgtagtggcacatgaagtttacagtgatgaagcattgagggtcacacctcctcccacctctccctatttaaacggcgattctccagaaagtgctaacggaggcatggatatggagaatgtgaccagagttcggctggtacagtttcaaaagaacacagatgaaccaatgggaatcactttaaaaatgaatgaactaaatcattgtattgttgcaagaattatgcatgggggcatgattcacaggcaaggtacacttcatgttggtgatgaaattcgagaaatcaatggcatcagtgtggctaaccaaacagtggaacaactgcaaaaaatgcttagggaaatgcgggggagtattaccttcaagattgtgccaagttaccgcactcagtcttcgtcctgtgagagagattccccttccacttccagacagtccccagctaatggtcatagcagcactaacaattctgtttcggacttgccatcaactacccaaccaaaaggacgacagatctatgtaagagcacaatttgaatatgatccagccaaggatgacctcatcccctgtaaagaagctggcattcgattcagagttggtgacatcatccagattattagtaaggatgatcataattggtggcagggtaaactggaaaactccaaaaatggaactgcaggtctcattccttcttctgaacttcaggaatggcgagtagcttgcattgccatggagaagaccaaacaggagcagcaggccagctgtacttggtttggcaagaaaaagaagcagtacaaagataaatatttggcaaagcacaatgcagatcttgtcacatatgaagaagtagtaaaactgccagcattcaagaggaaaacactagtcttattaggcgcacatggtgttgggagaagacacataaaaaacactctcatcacaaagcacccagaccggtttgcgtaccctattccacatacaaccagacctccaaagagagacgaagaaaatggaaagaattattactttgtatctcatgaccaaatgatgcaagacatctctaataacgagtacttggagtacggcagccacgaggatgcgatgtatgggacaaaactggagaccatccggaagatccacgagcaggggctgattgcaatactggacgtggagcctcaggcactgaaggtcctgagaactgcagagtttgctccttttgttgttttcattgctgcaccaactattactccaggtttaaatgaggatgaatctcttcagcgtctgcagaaggagtctgacatcttacagagaacatatgcacactacttcgatctcacaattatcaacaatgaaattgatgagacaatcagacatctggaggaagctgttgagctcgtgtgcacagccccacagtgggtccctgtctcctgggtctattaggcctctccccagatatctgagcataactgggagcacctcatttgtggaaaagcctctttgttatcggccttgtgtcagcaggtcatggtccctagagactacctagttgtagtgtgacctacatttataattattgtcatgtccgaatagataggaggagaaaaacaattacacactaatttaaagagacagtatcttttttaatcagttctcctaaactttaataaaatgtatctttaaatgtatgtattattcaatcctttggaatgttatatttttggaaatcatagctttttatttccaaggcccctaaaactgcacaaaataga

SEQ ID NO: 1646 - protein, 921 aa, Homo sapien
MADDDVLFEDVYELCEVIGKGPFSVVRRCINRETGQQFAVKIVDVAKFTSSPGLSTEDLKREASICHMLKHPHIVELLETYSSDGMLYMVFEFMDGADLCFEIVKRADAGFVYSEAVASHYMRQILEALRYCHDNNIIHRDVKPHCVLLASKENSAPVKLGGFGVAIQLGESGLVAGGRVGTPHFMAPEVVKREPYGKPVDVWGCGVILFILLSGCLPFYGTKERLFEGIIKGKYKMNPRQWSHISESAKDLVRRMLMLDPAERITVYEALNHPWLKERDRYAYKIHLPETVEQLRKFNARRKLKGAVLAAVSSHKFNSFYGDPPEELPDFSEDPTSSGLLAAERAVSQVLDSLEEIHALTDCSEKDLDFLHSVFQDQHLHTLLDLYDKINTKSSPQIRNPPSDAVQRAKEVLEEISCYPENNDAKELKRILTQPHFMALLQTHDVVAHEVYSDEALRVTPPPTSPYLNGDSPESANGGMDMENVTRVRLVQFQKNTDEPMGITLKMNELNHCIVARIMHGGMIHRQGTLHVGDEIREINGISVANQTVEQLQKMLREMRGSITFKIVPSYRTQSSSCERDSPSTSRQSPANGHSSTNNSVSDLPSTTQPKGRQIYVRAQFEYDPAKDDLIPCKEAGIRFRVGDIIQIISKDDHNWWQGKLENSKNGTAGLIPSSELQEWRVACIAMEKTKQEQQASCTWFGKKKKQYKDKYLAKHNADLVTYEEVVKLPAFKRKTLVLLGAHGVGRRHIKNTLITKHPDRFAYPIPHTTRPPKRDEENGKNYYFVSHDQMMQDISNNEYLEYGSHEDAMYGTKLETIRKIHEQGLIAILDVEPQALKVLRTAEFAPFVVFIAAPTITPGLNEDESLQRLQKESDILQRTYAHYFDLTIINNEIDETIRHLEEAVELVCTAPQWVPVSWVY

SEQ ID NO: 1647 - DNA, 2262 bp, Homo sapien
tgagccggccgcacgcggaggatcctaaggagcagctctgttgcgacataggccgagcagcgaggcccagctccctgaaacaacagtaacctacccctgtgggtcatcatcatgccctccgacctggccaagaagaaggcagccaaaaagaaggaggctgccaaagctcgacagcggcccagaaaaggacatgaagaaaatggagatgttgtcacagaaccacaggtggcagagaagaatgaggccaatggcagagagaccacagaagtagatttgctgaccaaggagctagaggactttgagatgaagaaagctgctgctcgagctgtcactggcgtcctggcctctcaccccaacagtactgatgttcacatcatcaacctctcacttacctttcatggtcaagagctgctcagtgacaccaaactggaattaaactcaggccgtcgttatggcctcattggtttaaatggaattggaaagtccatgctgctctctgctattgggaagcgtgaagtgcccatccctgagcacatcgacatctaccatctgactcgagagatgccccctagtgacaagacacccttgcattgtgtgatggaagtcgacacagagcgggccatgctggagaaagaggcagagcggctggctcatgaggatgcggagtgtgagaagctcatggagctctacgagcgcctggaggagctggatgccgacaaggcagagatgagggcctcgcggatcttgcatggactgggtttcacacctgccatgcagcgcaagaagctaaaagacttcagtgggggctggaggatgagggttgcccttgccagagccctctttattcggcccttcatgctgctcctggatgagcctaccaaccacctggacctagatgcttgcgtgtggttggaagaagaactaaaaacttttaagcgcatcttggtcctcgtctcccattcccaggattttctgaatggtgtctgtaccaatatcattcacatgcacaacaagaaactgaagtattatacgggtaattatgatcagtacgtgaagacgcggctagagctggaggagaaccagatgaagaggtttcactgggagcaagatcagattgcacacatgaagaactacattgcgaggtttggtcatggcagtgccaagctggcccggcaggcccagagcaaggagaagacgctacagaaaatgatggcatcaggactgacagagagggtcgtgagcgataagacactgtcattttatttcccaccatgtggcaagatccctccacctgtcattatggtgcaaaatgtgagcttcaagtatacaaaagatgggccttgcatctacaataatctagaatttggaattgaccttgacacacgagtggctctggtagggcccaatggagcagggaagtcaactcttctgaagctgctaactggagagctactacccacagatggcatgatccgaaaacactctcatgtcaagatagggcgttaccatcagcatttacaagagcagctggacttagatctctcacctttggagtacatgatgaagtgctacccagagatcaaggagaaggaagaaatgaggaagatcattgggcgatacggtctcactgggaaacaacaggtgagcccaatccggaacttgtcagacgggcagaagtgccgagtgtgtctggcctggctggcctggcagaacccccacatgctcttcctggatgaacccaccaatcacctggatatcgagaccatcgacgccctggcagatgccatcaatgagtttgagggtggtatgatgctggtcagccatgacttcagactcattcagcaggttgcacaggaaatttgggtctgtgagaagcagacaatcaccaagtggcctggagacatcctggcttacaaggagcacctcaagtccaagctggtggatgaggagccccagctcaccaagaggacccacaacgtgtgcaccctgacattggcatctctgccaaggccatgagcatcatgaactcgtttgtaaacgacgtgtttgagcagctggcgtgtgaggctgcccggctggcccagtactcgggccggaccaccctgacatcccgagaagtccagacggctgtgcgtctgctgctgcctggggagctggccaagcacgctgtgtctgagggcaccaaggctgtcaccaagtacaccagctccaagtgacccagggcctgacaaaaataaagggtgaactgttaaaaaaaaaaaa

SEQ ID NO: 1648 - protein, 634 aa, Homo sapien
MPSDLAKKKAAKKKEAAKARQRPRKGHEENGDVVTEPQVAEKNEANGRETTEVDLLTKELEDFEMKKAAARAVTGVLASHPNSTDVHIINLSLTFHGQELLSDTKLELNSGRRYGLIGLNGIGKSMLLSAIGKREVPIPEHIDIYHLTREMPPSDKTPLHCVMEVDTERAMLEKEAERLAHEDAECEKLMELYERLEELDADKAEMRASRILHGLGFTPAMQRKKLKDFSGGWRMRVALARALFIRPFMLLLDEPTNHLDLDACVWLEEELKTFKRILVLVSHSQDFLNGVCTNIIHMHNKKLKYYTGNYDQYVKTRLELEENQMKRFHWEQDQIAHMKNYIARFGHGSAKLARQAQSKEKTLQKMMASGLTERVVSDKTLSFYFPPCGKIPPPVIMVQNVSFKYTKDGPCIYNNLEFGIDLDTRVALVGPNGAGKSTLLKLLTGELLPTDGMIRKHSHVKIGRYHQHLQEQLDLDLSPLEYMMKCYPEIKEKEEMRKIIGRYGLTGKQQVSPIRNLSDGQKCRVCLAWLAWQNPHMLFLDEPTNHLDIETIDALADAINEFEGGMMLVSHDFRLIQQVAQEIWVCEKQTITKWPGDILAYKEHLKSKLVDEEPQLTKRTHNVCTLTLASLPRP

SEQ ID NO: 1649 - DNA, 1431 bp, Homo sapien
atgaccatggaaacagttgaatcccagcatgatggaagtataacagcttctttgacagagagcaagtctgctcatgtgcagactcagactgggcaaatttcaatccctgctttagctcagtgcagtgagctgagatcaggcaccagaagaggctccccagctgtaactctagtgcagttaccttcgggccaaactatacatgtccagggagtaattcagacaccacagccatgggttattcagtcatcagaaatacacaccgttcaggtagcagcaattgcagagacagatgaatctgcagaatcagaaggtgtaattgattctcataaacgtagagaaatcctttcacgaagaccctcttataggaaaatactgaatgaactgtcctctgatgtgcctggtgttcccaagattgaagaagagagatcagaggaagaaggaacaccacctagtattgctaccatggcagtaccaactagcatatatcagactagcacggggcaatacattgctatagcccaaggtggaacaatccagatttctaacccaggatctgatggtgttcagggactgcaggcattaacaatgacaaattcaggagctcctccaccaggtgctacaattgtacagtacgcagcacaatcagctgatggcacacagcagttctttgtcccaggcagccaggttgttgttcaagctgccactggtgacatgccaacttaccagatccgagctcctactgctgctttgccacagggagtggtgatggctgcatcgcccggaagtttgcacagtccccagcagctggcagaagaagcaacacgcaaacgagagctgaggctaatgaaaaacagagaagctgcccgggagtgtcgcaggaagaagaaagaatatgtcaaatgtcttgaaaatcgtgtggctgtgcttgaaaaccaaaacaagactctcattgaggaactcaaggccctcaaagatctttattgccataaagtagagtaactgtctttgacttggaccttgtttactctaatcaaggcaggagatgcagcagtcctacttattgccatgtggacttgtgggaaggacacgtgtgacccttaagaatccagtttggattagtgtttgaaattgaattgggaatgttgttccaggatgtggaatgcagcgtgatcacacttaccgagcttactttgatctgtttgtcaatagcatgcaaaaaatgctttgtttgccctttgcttctgctttttttcagggaagctgccaaagaatgtcgacgtcgaaagaaagaatatgtaaaatgcctggagagccgagttgcagtgctggaagtccagaacaagaagcttatagaggaacttgaaaccttgaaagacatttgttctcccaaaactgattactagaaatatttaactatgaactgattacaga

SEQ ID NO: 1650 - protein, 332 aa, Homo sapien
MTMETVESQHDGSITASLTESKSAHVQTQTGQISIPALAQCSELRSGTRRGSPAVTLVQLPSGQTIHVQGVIQTPQPWVIQSSEIHTVQVAAIAETDESAESEGVIDSHKRREILSRRPSYRKILNELSSDVPGVPKIEEERSEEEGTPPSIATMAVPTSIYQTSTGQYIAIAQGGTIQISNPGSDGVQGLQALTMTNSGAPPPGATIVQYAAQSADGTQQFFVPGSQVVVQAATGDMPTYQIRAPTAALPQGVVMAASPGSLHSPQQLAEEATRKRELRLMKNREAARECRRKKKEYVKCLENRVAVLENQNKTLIEELKALKDLYCHKVE

SEQ ID NO: 1651 - DNA, 1272 bp, Homo sapien
gaattcggccaaagaggcctatgcttctctgaagacttgcagcaaggcttgctgaggctcacagaagatagccccagtgttttggagtggttttgaatgtgattctgagatcagactgactgagctggaatcctggctttatatcttaccagctacacaaccttggagtcttagaaattttttcttttcaataagcagtcatccttactttccctcaagatgacaaacagttcgttcttctgcccagtttataaagatctggagccattcacgtattttttttatttagttttccttgttggaattattggaagttgttttgcaacctgggcttttatacagaagaatacgaatcacaggtgtgtgagcatctacttaattaatttgcttacagccgatttcctgcttactctggcattaccagtgaaaattgttgttgacttgggtgtggcaccttggaagctgaagatattccactgccaagtaacagcctgcctcatctatatcaatatgtatttatcaattatcttcttagcatttgtcagcattgaccgctgtcttcagctgacacacagctgcaagatctaccgaatacaagaacccggatttgccaaaatgatatcaaccgttgtgtggctaatggtccttcttataatggtgccaaatatgatgattcccatcaaagacatcaaggaaaagtcaaatgtgggttgtatggagtttaaaaaggaatttggaagaaattggcatttgctgacaaatttcatatgtgtagcaatatttttaaatttctcagccatcattttaatatccaattgccttgtaattcgacagctctacagaaacaaagataatgaaaattacccaaatgtgaaaaaggctctcatcaacatacttttagtgaccacgggctacatcatatgctttgttccttaccacattgtccgaatcccgtataccctcagccagacagaagtcataactgattgctcaaccaggatttcactcttcaaagccaaagaggctacactgctcctggctgtgtcgaacctgtgctttgatcctatcctgtactatcacctctcaaaagcattccgctcaaaggtcactgagacttttgcctcacctaaagagaccaaggctcagaaagaaaaattaagatgtgaaaataatgcataaaagacaggattttttgtgctaccaattctggccttactggaccataaagttaattatagctttgaaagataaaaaaaaaaaaaaagcggccgc

SEQ ID NO: 1652 - protein, 319 aa, Homo sapien
MTNSSFFCPVYKDLEPFTYFFYLVFLVGIIGSCFATWAFIQKNTNHRCVSIYLINLLTADFLLTLALPVKIVVDLGVAPWKLKIFHCQVTACLIYINMYLSIIFLAFVSIDRCLQLTHSCKIYRIQEPGFAKMISTVVWLMVLLIMVPNMMIPIKDIKEKSNVGCMEFKKEFGRNWHLLTNFICVAIFLNFSAIILISNCLVIRQLYRNKDNENYPNVKKALINILLVTTGYIICFVPYHIVRIPYTLSQTEVITDCSTRISLFKAKEATLLLAVSNLCFDPILYYHLSKAFRSKVTETFASPKETKAQKEKLRCENNA

SEQ ID NO: 1653 - DNA, 1421 bp, Homo sapien; identical to SEQ ID NO: 1301

SEQ ID NO: 1654 - protein, 348 aa, Homo sapien; identical to SEQ ID NO: 1302

SEQ ID NO: 1655 - DNA, 1670 bp, Homo sapien
ccaaccacaagcaccaaagcagaggggcaggcagcacaccacccagcagccagagcaccagcccagccatggtccttgaggtgagtgaccaccaagtgctaaatgacgccgaggttgccgccctcctggagaacttcagctcttcctatgactatggagaaaacgagagtgactcgtgctgtacctccccgccctgcccacaggacttcagcctgaacttcgaccgggccttcctgccagccctctacagcctcctctttctgctggggctgctgggcaacggcgcggtggcagccgtgctgctgagccggcggacagccctgagcagcaccgacaccttcctgctccacctagctgtagcagacacgctgctggtgctgacactgccgctctgggcagtggacgctgccgtccagtgggtctttggctctggcctctgcaaagtggcaggtgccctcttcaacatcaacttctacgcaggagccctcctgctggcctgcatcagctttgaccgctacctgaacatagttcatgccacccagctctaccgccgggggcccccggcccgcgtgaccctcacctgcctggctgtctgggggctctgcctgcttttcgccctcccagacttcatcttcctgtcggcccaccacgacgagcgcctcaacgccacccactgccaatacaacttcccacaggtgggccgcacggctctgcgggtgctgcagctggtggctggctttctgctgcccctgctggtcatggcctactgctatgcccacatcctggccgtgctgctggtttccaggggccagcggcgcctgcgggccatgcggctggtggtggtggtcgtggtggcctttgccctctgctggaccccctatcacctggtggtgctggtggacatcctcatggacctgggcgctttggcccgcaactgtggccgagaaagcagggtagacgtggccaagtcggtcacctcaggcctgggctacatgcactgctgcctcaacccgctgctctatgcctttgtaggggtcaagttccgggagcggatgtggatgctgctcttgcgcctgggctgccccaaccagagagggctccagaggcagccatcgtcttcccgccgggattcatcctggtctgagacctcagaggcctcctactcgggcttgtgaggccggaatccgggctcccctttcgcccacagtctgacttccccgcattccaggctcctccctccctctgccggctctggctctccccaatatcctcgctcccgggactcactggcagccccagcaccaccaggtctcccgggaagccaccctcccagctctgaggactgcaccattgctgctccttagctgccaagccccatcctgccgcccgaggtggctgcctggagccccactgcccttctcatttggaaactaaaacttcatcttccccaagtgcggggagtacaaggcatggcgtagagggtgctgccccatgaagccacagcccaggcctccagctcagcagtgactgtggccatggtccccaagacctctatatttgctcttttatttttatgtctaaaatcctgcttaaaacttttcaataaacaagatcgtcaggaccaaaaaaaaaaaaaaaaaaaaaaaaaaaaaaaaaaaaaaaaaaaaaaa

SEQ ID NO: 1656 - protein, 368 aa, Homo sapien
MVLEVSDHQVLNDAEVAALLENFSSSYDYGENESDSCCTSPPCPQDFSLNFDRAFLPALYSLLFLLGLLGNGAVAAVLLSRRTALSSTDTFLLHLAVADTLLVLTLPLWAVDAAVQWVFGSGLCKVAGALFNINFYAGALLLACISFDRYLNIVHATQLYRRGPPARVTLTCLAVWGLCLLFALPDFIFLSAHHDERLNATHCQYNFPQVGRTALRVLQLVAGFLLPLLVMAYCYAHILAVLLVSRGQRRLRAMRLVVVVVVAFALCWTPYHLVVLVDILMDLGALARNCGRESRVDVAKSVTSGLGYMHCCLNPLLYAFVGVKFRERMWMLLLRLGCPNQRGLQRQPSSSRRDSSWSETSEASYSGL

SEQ ID NO: 1657 - DNA, 2903 bp, Homo sapien
tgaaggctggttgttcagactgagcttcctgcctgcctgtaccccgccaacagcttcagaagaaggtgactggtggctgcctgaggaataccagtgggcaagagaattagcatttctggagcatctgctgtctgagcagcccctgggtgcgtccactttctgggcacgtgaggttgggccttggccgcctgagcccttgagttggtcacttgaaccttgggaatattgagattatattctcctgccttttaaaaagatggacttcagcagaaatctttatgatattggggaacaactggacagtgaagatctggcctccctcaagttcctgagcctggactacattccgcaaaggaagcaagaacccatcaaggatgccttgatgttattccagagactccaggaaaagagaatgttggaggaaagcaatctgtccttcctgaaggagctgctcttccgaattaatagactggatttgctgattacctacctaaacactagaaaggaggagatggaaagggaacttcagacaccaggcagggctcaaatttctgcctacaggttccacttctgccgcatgagctgggctgaagcaaacagccagtgccagacacagtctgtacctttctggcggagggtcgatcatctattaataagggtcatgctctatcagatttcagaagaagtgagcagatcagaattgaggtcttttaagtttcttttgcaagaggaaatctccaaatgcaaactggatgatgacatgaacctgctggatattttcatagagatggagaagagggtcatcctgggagaaggaaagttggacatcctgaaaagagtctgtgcccaaatcaacaagagcctgctgaagataatcaacgactatgaagaattcagcaaaggggaggagttgtgtggggtaatgacaatctcggactctccaagagaacaggatagtgaatcacagactttggacaaagtttaccaaatgaaaagcaaacctcggggatactgtctgatcatcaacaatcacaattttgcaaaagcacgggagaaagtgcccaaacttcacagcattagggacaggaatggaacacacttggatgcaggggctttgaccacgacctttgaagagcttcattttgagatcaagccccacgatgactgcacagtagagcaaatctatgagattttgaaaatctaccaactcatggaccacagtaacatggactgcttcatctgctgtatcctctcccatggagacaagggcatcatctatggcactgatggacaggaggcccccatctatgagctgacatctcagttcactggtttgaagtgcccttcccttgctggaaaacccaaagtgttttttattcaggcttgtcagggggataactaccagaaaggtatacctgttgagactgattcagaggagcaaccctatttagaaatggatttatcatcacctcaaacgagatatatcccggatgaggctgactttctgctggggatggccactgtgaataactgtgtttcctaccgaaaccctgcagagggaacctggtacatccagtcactttgccagagcctgagagagcgatgtcctcgaggcgatgatattctcaccatcctgactgaagtgaactatgaagtaagcaacaaggatgacaagaaaaacatggggaaacagatgcctcagcctactttcacactaagaaaaaaacttgtcttcccttctgattgatggtgctattttgtttgttttgttttgttttgtttttttgagacagaatctcgctctgtcgcccaggctggagtgcagtggcgtgatctcggctcaccgcaagctccgcctcccgggttcaggccattctcctgcctcagcctcccgagtagctgggactacaggggcccgccaccacacctggctaattttttaaaaatatttttagtagagacagggtttcactgtgttagccagggtggtcttgatctcctgacctcgtgatccacccacctcggcctcccaaagtgctgggattacaggcgtgagccaccgcgcctggccgatggtactatttagatataacactatgtttatttactaattttctagattttctactttattaattgttttgcacttttttataagagctaaagttaaataggatattaacaacaataacactgtctcctttctcttacgcttaaggctttgggaatgtttttagctggtggcaataaataccagacacgtacaaaatccagctatgaatatagagggcttatgattcagattgttatctatcaactataagcccactgttaatattctattaactttaattctctttcaaagctaaattccacactaccacattaaaaaaattagaaagtagccacgtatggtggctcatgtctataatcccagcactttgggaggttgaggtgggaggatttgcttgaacccaagaggtccaaggctgcagtgagccatgttcacaccgctgcactcaagcttgggtgacagagcaagaccccgtccccaaaaaaattttttttttaataaacccaaatttgtttgaaaacttttaaaaattcaaatgatttttacaagttttaaataagctctccccaaacttgctttatgccttcttattgcttttatgatatatatatgcttggctaactatatttgctttttgctaacaatgctctggggtctttttatgcatttgcatttgctctttcatctctgcttggattattttaaatcattaggaattaagttatctttaaaatttaagtatcttttttccaaaacattttttaatagaataaaatataatttgatcttaaaaaaaaaaaaaaaaaaaaaaaaaaaaaaaaaaaaaaaa

SEQ ID NO: 1658 - protein, 496 aa, Homo sapien
MDFSRNLYDIGEQLDSEDLASLKFLSLDYIPQRKQEPIKDALMLFQRLQEKRMLEESNLSFLKELLFRINRLDLLITYLNTRKEEMERELQTPGRAQISAYRFHFCRMSWAEANSQCQTQSVPFWRRVDHLLIRVMLYQISEEVSRSELRSFKFLLQEEISKCKLDDDMNLLDIFIEMEKRVILGEGKLDILKRVCAQINKSLLKIINDYEEFSKGEELCGVMTISDSPREQDSESQTLDKVYQMKSKPRGYCLIINNHNFAKAREKVPKLHSIRDRNGTHLDAGALTTTFEELHFEIKPHDDCTVEQIYEILKIYQLMDHSNMDCFICCILSHGDKGIIYGTDGQEAPIYELTSQFTGLKCPSLAGKPKVFFIQACQGDNYQKGIPVETDSEEQPYLEMDLSSPQTRYIPDEADFLLGMATVNNCVSYRNPAEGTWYIQSLCQSLRERCPRGDDILTILTEVNYEVSNKDDKKNMGKQMPQPTFTLRKKLVFPSD

SEQ ID NO: 1659 - DNA, 2081 bp, Homo sapien
cccgggtgtacgtgtaaaattatgatcaaataaatttgtatgccttttctcctattaacctgccttttttgtcagcgattgtcagtgaaacttcagagggcaaaggggaagttttccttggcccctccagttttggtgctgtgaacaggataccaaagctgctctgttcttctggaagctgcaatgaagggaaccaaggacctgacaagccagcagaaggagtctaacgtgaagacattttgctccaagaatatcctagccatccttggcttctcctctatcatagctgtgatagctttgcttgctgtggggttgacccagaacaaagcattgccagaaaacgttaagtatgggattgtgctggatgcgggttcttctcacacaagtttatacatctataagtggccagcagaaaaggagaatgacacaggcgtggtgcatcaagtagaagaatgcagggttaaaggtcctggaatctcaaaatttgttcagaaagtaaatgaaataggcatttacctgactgattgcatggaaagagctagggaagtgattccaaggtcccagcaccaagagacacccgtttacctgggagccacggcaggcatgcggttgctcaggatggaaagtgaagagttggcagacagggttctggatgtggtggagaggagcctcagcaactacccctttgacttccagggtgccaggatcattactggccaagaggaaggtgcctatggctggattactatcaactatctgctgggcaaattcagtcagaaaacaaggtggttcagcatagtcccatatgaaaccaataatcaggaaacctttggagctttggaccttgggggagcctctacacaagtcacttttgtaccccaaaaccagactatcgagtccccagataatgctctgcaatttcgcctctatggcaaggactacaatgtctacacacatagcttcttgtgctatgggaaggatcaggcactctggcagaaactggccaaggacattcaggttgcaagtaatgaaattctcagggacccatgctttcatcctggatataagaaggtagtgaacgtaagtgacctttacaagaccccctgcaccaagagatttgagatgactcttccattccagcagtttgaaatccagggtattggaaactatcaacaatgccatcaaagcatcctggagctcttcaacaccagttactgcccttactcccagtgtgccttcaatgggattttcttgccaccactccagggggattttggggcattttcagctttttactttgtgatgaagtttttaaacttgacatcagagaaagtctctcaggaaaaggtgactgagatgatgaaaaagttctgtgctcagccttgggaggagataaaaacatcttacgctggagtaaaggagaagtacctgagtgaatactgcttttctggtacctacattctctccctccttctgcaaggctatcatttcacagctgattcctgggagcacatccatttcattggcaagatccagggcagcgacgccggctggactttgggctacatgctgaacctgaccaacatgatcccagctgagcaaccattgtccacacctctctcccactccacctatgtcttcctcatggttctattctccctggtccttttcacagtggccatcataggcttgcttatctttcacaagccttcatatttctggaaagatatggtatagcaaaagcagctgaaatatgctggctggagtgaggaaaaaatcgtccagggagcattttcctccatcgcagtgttcaaggccatccttccctgtctgccagggccagtcttgacgagtgtgaagcttccttggcttttactgaagcctttcttttggaggtattcaatatcctttgcctcaaggacttcggcagatactgtctctttcatgagtttttcccagctacacctttctcctttgtactttgtgcttgtataggttttaaagacctgacacctttcataatctttgctttataaaagaacaatattgactttgtctagaaaaaaaaaaaaaaaaaaaaa

SEQ ID NO: 1660 - protein, 517 aa, Homo sapien
MKGTKDLTSQQKESNVKTFCSKNILAILGFSSIIAVIALLAVGLTQNKALPENVKYGIVLDAGSSHTSLYIYKWPAEKENDTGVVHQVEECRVKGPGISKFVQKVNEIGIYLTDCMERAREVIPRSQHQETPVYLGATAGMRLLRMESEELADRVLDVVERSLSNYPFDFQGARIITGQEEGAYGWITINYLLGKFSQKTRWFSIVPYETNNQETFGALDLGGASTQVTFVPQNQTIESPDNALQFRLYGKDYNVYTHSFLCYGKDQALWQKLAKDIQVASNEILRDPCFHPGYKKVVNVSDLYKTPCTKRFEMTLPFQQFEIQGIGNYQQCHQSILELFNTSYCPYSQCAFNGIFLPPLQGDFGAFSAFYFVMKFLNLTSEKVSQEKVTEMMKKFCAQPWEEIKTSYAGVKEKYLSEYCFSGTYILSLLLQGYHFTADSWEHIHFIGKIQGSDAGWTLGYMLNLTNMIPAEQPLSTPLSHSTYVFLMVLFSLVLFTVAIIGLLIFHKPSYFWKDMV

SEQ ID NO: 1661 - DNA, 6754 bp, Homo sapien
gtcgacgtggcggccggcggcggctgcgggctgagcggcgagtttccgatttaaagctgagctgcgaggaaaatggcggcgggaggatcaaaatacttgctggatggtggactcagagaccaataaaaataaactgcttgaacatcctttgactggttagccagttgctgatgtatattcaagatgagtggattaggagaaaacttggatccactggccagtgattcacgaaaacgcaaattgccatgtgatactccaggacaaggtcttacctgcagtggtgaaaaacggagacgggagcaggaaagtaaatatattgaagaattggctgagctgatatctgccaatcttagtgatattgacaatttcaatgtcaaaccagataaatgtgcgattttaaaggaaacagtaagacagatacgtcaaataaaagagcaaggaaaaactatttccaatgatgatgatgttcaaaaagccgatgtatcttctacagggcagggagttattgataaagactccttaggaccgcttttacttcaggcattggatggtttcctatttgtggtgaatcgagacggaaacattgtatttgtatcagaaaatgtcacacaatacctgcaatataagcaagaggacctggttaacacaagtgtttacaatatcttacatgaagaagacagaaaggattttcttaagaatttaccaaaatctacagttaatggagtttcctggacaaatgagacccaaagacaaaaaagccatacatttaattgccgtatgttgatgaaaacaccacatgatattctggaagacataaacgccagtcctgaaatgcgccagagatatgaaacaatgcagtgctttgccctgtctcagccacgagctatgatggaggaaggggaagatttgcaatcttgtatgatctgtgtggcacgccgcattactacaggagaaagaacatttccatcaaaccctgagagctttattaccagacatgatctttcaggaaaggttgtcaatatagatacaaattcactgagatcctccatgaggcctggctttgaagatataatccgaaggtgtattcagagattttttagtctaaatgatgggcagtcatggtcccagaaacgtcactatcaagaagttaccagtgatgggatattttccccaacagcttatcttaatggccatgcagaaaccccagtatatcgattctcgttggctgatggaactatagtgactgcacagacaaaaagcaaactcttccgaaatcctgtaacaaatgatcgacatggctttgtctcaacccacttccttcagagagaacagaatggatatagaccaaacccaaatcctgttggacaagggattagaccacctatggctggatgcaacagttcggtaggcggcatgagtatgtcgccaaaccaaggcttacagatgccgagcagcagggcctatggcttggcagaccctagcaccacagggcagatgagtggagctaggtatgggggttccagtaacatagcttcattgacccctgggccaggcatgcaatcaccatcttcctaccagaacaacaactataggctcaacatgagtagccccccacatgggagtcctggtcttgccccaaaccagcagaatatcatgatttctcctcgtaatcgtgggagtccaaagatagcctcacatcagttttctcctgttgcaggtgtgcactctcccatggcatcttctggcaatactgggaaccacagcttttccagcagctctctcagtgccctgcaagccatcagtgaaggtgtggggacttcccttttatctactctgtcatcaccaggccccaaattggataactctcccaatatgaatattacccaaccaagtaaagtaagcaatcaggattccaagagtcctctgggcttttattgcgaccaaaatccagtggagagttcaatgtgtcagtcaaatagcagagatcacctcagtgacaaagaaagtaaggagagcagtgttgagggggcagagaatcaaaggggtcctttggaaagcaaaggtcataaaaaattactgcagttacttacctgttcttctgatgaccggggtcattcctccttgaccaactcccccctagattcaagttgtaaagaatcttctgttagtgtcaccagcccctctggagtctcctcctctacatctggaggagtatcctctacatccaatatgcatgggtcactgttacaagagaagcaccggattttgcacaagttgctgcagaatgggaattcaccagctgaggtagccaagattactgcagaagccactgggaaagacaccagcagtataacttcttgtggggacggaaatgttgtcaagcaggagcagctaagtcctaagaagaaggagaataatgcacttcttagatacctgctggacagggatgatcctagtgatgcactctctaaagaactacagccccaagtggaaggagtggataataaaatgagtcagtgcaccagctccaccattcctagctcaagtcaagagaaagaccctaaaattaagacagagacaagtgaagagggatctggagacttggataatctagatgctattcttggtgatctgactagttctgacttttacaataattccatatcctcaaatggtagtcatctggggactaagcaacaggtgtttcaaggaactaattctctgggtttgaaaagttcacagtctgtgcagtctattcgtcctccatataaccgagcagtgtctctggatagccctgtttctgttggctcaagtcctccagtaaaaaatatcagtgctttccccatgttaccaaagcaacccatgttgggtgggaatccaagaatgatggatagtcaggaaaattatggctcaagtatgggagactggggcttaccaaactcaaaggccggcagaatggaacctatgaattcaaactccatgggaagaccaggaggagattataatacttctttacccagacctgcactgggtggctctattcccacattgcctcttcggtctaatagcataccaggtgcgagaccagtattgcaacagcagcagcagatgcttcaaatgaggcctggtgaaatccccatgggaatgggggctaatccctatggccaagcagcagcatctaaccaactgggttcctggcccgatggcatgttgtccatggaacaagtttctcatggcactcaaaataggcctcttcttaggaattccctggatgatcttgttgggccaccttccaacctggaaggccagagtgacgaaagagcattattggaccagctgcacactcttctcagcaacacagatgccacaggcctggaagaaattgacagagctttgggcattcctgaacttgtcaatcagggacaggcattagagcccaaacaggatgctttccaaggccaagaagcagcagtaatgatggatcagaaggcaggattatatggacagacatacccagcacaggggcctccaatgcaaggaggctttcatcttcagggacaatcaccatcttttaactctatgatgaatcagatgaaccagcaaggcaattttcctctccaaggaatgcacccacgagccaacatcatgagaccccggacaaacacccccaagcaacttagaatgcagcttcagcagaggctgcagggccagcagtttttgaatcagagccgacaggcacttgaattgaaaatggaaaaccctactgctggtggtgctgcggtgatgaggcctatgatgcagccccagcagggttttcttaatgctcaaatggtcgcccaacgcagcagagagctgctaagtcatcacttccgacaacagagggtggctatgatgatgcagcagcagcaacagcagcagcagcagcagcagcagcagcaacagcaacagcaacagcaacagcagcaacagcagcaaacccaggccttcagcccacctcctaatgtgactgcttcccccagcatggatgggcttttggcaggacccacaatgccacaagctcctccgcaacagtttccatatcaaccaaattatggaatgggacaacaaccagatccagcctttggtcgagtgtctagtcctcccaatgcaatgatgtcgtcaagaatgggtccctcccagaatcccatgatgcaacacccgcaggctgcatccatctatcagtcctcagaaatgaagggctggccatcaggaaatttggccaggaacagctccttttcccagcagcagtttgcccaccaggggaatcctgcagtgtatagtatggtgcacatgaatggcagcagtggtcacatgggacagatgaacatgaaccccatgcccatgtctggcatgcctatgggtcctgatcagaaatactgctgacatctctgcaccaggacctcttaaggaaaccactgtacaaatgacactgcactaggattattgggaaggaatcattgttccaggcatccatcttggaagaaaggaccagctttgagctccatcaagggtattttaagtgatgtcatttgagcaggactggattttaagccgaagggcaatatctacgtgtttttcccccctccttctgctgtgtatcatggtgttcaaaacagaaatgttttttggcattccacctcctagggatataattctggagacatggagtgttactgatcataaaacttttgtgtcacttttttctgccttgctagccaaaatctcttaaatacacgtaggtgggccagagaacattggaagaatcaagagagattagaatatctggtttctctagttgcagtattggacaaagagcatagtcccagccttcaggtgtagtagttctgtgttgaccctttgtccagtggaattggtgattctgaattgtcctttactaatggtgttgagttgctctgtccctattatttgccctaggctttctcctaatgaaggttttcatttgccattcatgtcctgtaatacttcacctccaggaactgtcatggatgtccaaatggctttgcagaaaggaaatgagatgacagtatttaatcgcagcagtagcaaacttttcacatgctaatgtgcagctgagtgcactttatttaaaaagaatggataaatgcaatattcttgaggtcttgagggaatagtgaaacacattcctggtttttgcctacacttacgtgttagacaagaactatgatttttttttttaaagtactggtgtcaccctttgcctatatggtagagcaataatgctttttaaaaataaacttctgaaaacccaaggccaggtactgcattctgaatcagaatctcgcagtgtttctgtgaatagatttttttgtaaatatgacctttaagatattgtattatgtaaaatatgtatatacctttttttgtaggtcacaacaactcatttttacagagtttgtgaagctaaatatttaacattgttgatttcagtaagctgtgtggtgaggctaccagtggaagagacatcccttgacttttgtggcctgggggaggggtagtgcaccacagcttttccttccccaccccccagccttagatgcctcgctcttttcaatctcttaatctaaatgctttttaaagagattatttgtttagatgtaggcattttaattttttaaaaattcctctaccagaactaagcactttgttaatttggggggaaagaatagatatggggaaataaacttaaaaaaaaatcaggaatttaaaaaaaacgagcaatttgaagagaatcttttggattttaagcagtccgaaataatagcaattcatgggctgtgtgtgtgtgtgtatgtgtgtgtgtgtgtgtgtatgtttaattatgttaccttttcatcccctttaggagcgttttcagattttggttcgtaagacctgaatcccatattgagatctcgagtagaatccttggtgtggtttctggtgtctgctcagctgtcccctcattctactaatgtgatgctttcattatgtccctgtggattagaatagtgtcagttatttcttaagtaactcagtacccagaacagccagttttactgtgattcagagccacagtctaactgagcaccttttaaacccctccctcttctgccccctaccacttttctgctgttgcctctctttgacacctgttttagtcagttgggaggaagggaaaaatcaagtttaattccctttatctgggttaattcatttggttcaaatagttgacggaattgggtttctgaatgtctgtgaatttcagaggtctctgctagccttggtatcattttctagcaataactgagagccagttaattttaagaatttcacacatttagccaatctttctagatgtctctgaaggtaagatcatttaatatctttgatatgcttacgagtaagtgaatcctgattatttccagacccaccaccagagtggatcttattttcaaagcagtatagacaattatgagtttgccctctttcccctaccaagttcaaaatatatctaagaaagattgtaaatccgaaaacttccattgtagtggcctgtgcttttcagatagtatactctcctgtttggagacagaggaagaaccaggtcagtctgtctctttttcagctcaattgtatctgacccttctttaagttatgtgtgtggggagaaatagaatggtgctcttatgtcgac

SEQ ID NO: 1662 - protein, 1412 aa, Homo sapien
MSGLGENLDPLASDSRKRKLPCDTPGQGLTCSGEKRRREQESKYIEELAELISANLSDIDNFNVKPDKCAILKETVRQIRQIKEQGKTISNDDDVQKADVSSTGQGVIDKDSLGPLLLQALDGFLFVVNRDGNIVFVSENVTQYLQYKQEDLVNTSVYNILHEEDRKDFLKNLPKSTVNGVSWTNETQRQKSHTFNCRMLMKTPHDILEDINASPEMRQRYETMQCFALSQPRAMMEEGEDLQSCMICVARRITTGERTFPSNPESFITRHDLSGKVVNIDTNSLRSSMRPGFEDIIRRCIQRFFSLNDGQSWSQKRHYQEVTSDGIFSPTAYLNGHAETPVYRFSLADGTIVTAQTKSKLFRNPVTNDRHGFVSTHFLQREQNGYRPNPNPVGQGIRPPMAGCNSSVGGMSMSPNQGLQMPSSRAYGLADPSTTGQMSGARYGGSSNIASLTPGPGMQSPSSYQNNNYRLNMSSPPHGSPGLAPNQQNIMISPRNRGSPKIASHQFSPVAGVHSPMASSGNTGNHSFSSSSLSALQAISEGVGTSLLSTLSSPGPKLDNSPNMNITQPSKVSNQDSKSPLGFYCDQNPVESSMCQSNSRDHLSDKESKESSVEGAENQRGPLESKGHKKLLQLLTCSSDDRGHSSLTNSPLDSSCKESSVSVTSPSGVSSSTSGGVSSTSNMHGSLLQEKHRILHKLLQNGNSPAEVAKITAEATGKDTSSITSCGDGNVVKQEQLSPKKKENNALLRYLLDRDDPSDALSKELQPQVEGVDNKMSQCTSSTIPSSSQEKDPKIKTETSEEGSGDLDNLDAILGDLTSSDFYNNSISSNGSHLGTKQQVFQGTNSLGLKSSQSVQSIRPPYNRAVSLDSPVSVGSSPPVKNISAFPMLPKQPMLGGNPRMMDSQENYGSSMGDWGLPNSKAGRMEPMNSNSMGRPGGDYNTSLPRPALGGSIPTLPLRSNSIPGARPVLQQQQQMLQMRPGEIPMGMGANPYGQAAASNQLGSWPDGMLSMEQVSHGTQNRPLLRNSLDDLVGPPSNLEGQSDERALLDQLHTLLSNTDATGLEEIDRALGIPELVNQGQALEPKQDAFQGQEAAVMMDQKAGLYGQTYPAQGPPMQGGFHLQGQSPSFNSMMNQMNQQGNFPLQGMHPRANIMRPRTNTPKQLRMQLQQRLQGQQFLNQSRQALELKMENPTAGGAAVMRPMMQPQQGFLNAQMVAQRSRELLSHHFRQQRVAMMMQQQQQQQQQQQQQQQQQQQQQQQQQQTQAFSPPPNVTASPSMDGLLAGPTMPQAPPQQFPYQPNYGMGQQPDPAFGRVSSPPNAMMSSRMGPSQNPMMQHPQAASIYQSSEMKGWPSGNLARNSSFSQQQFAHQGNPAVYSMVHMNGSSGHMGQMNMNPMPMSGMPMGPDQKYC

SEQ ID NO: 1663 - DNA, 798 bp, Homo sapien
atgaataaacaaagaggaaccttctcagaagtgagtctggcccaggacccaaagccgcagcaaaggaaacctaaaggcaataaaagctccatttcaggaaccgaacaggaaatattccaagtagaattaaaccttcaaaatgcttctctgaatcatcaagggattgacaaaatatatgactgccaaggtttactgccacctccagagaagctcactgccgaggtcctaggaatcatttgcattgtcctgatggccactgtgttaaaaacaatagttcttattcctttcctggagcagaacaattcttccccgaatacaagaacgcagaaagcacgtccttgtggccattgtcctgaggagtggattacatattccaacagttgttactacattggtaaggaaagaagaacttgggaagagagtttgcaggcctgtgcttcaaagaactcttctagtctgctttctatagataatgaagaagaaatgaaatttctggccagcattttaccttcctcatggattggtgtgtttcgtaacagcagtcatcatccatgggtgacaataaatggtttggctttcaaacatgagataaaagactcagatcatgctgaacgtaactgtgcaatgctacatgtacgtggacttatatcagaccagtgtggatcttcaagaatcattgtgagcataagctttagaattaaagcgcttgagcttgcagtgcatcagataaaattttatatttgttcaaacagaaatgatattatgattgcataagccttaaaatgaattgtgttattt

SEQ ID NO: 1664 - protein, 257 aa, Homo sapien
MNKQRGTFSEVSLAQDPKPQQRKPKGNKSSISGTEQEIFQVELNLQNASLNHQGIDKIYDCQGLLPPPEKLTAEVLGIICIVLMATVLKTIVLIPFLEQNNSSPNTRTQKARPCGHCPEEWITYSNSCYYIGKERRTWEESLQACASKNSSSLLSIDNEEEMKFLASILPSSWIGVFRNSSHHPWVTINGLAFKHEIKDSDHAERNCAMLHVRGLISDQCGSSRIIVSISFRIKALELAVHQIKFYICSNRNDIMIA

SEQ ID NO: 1665 - DNA, 1916 bp, Homo sapien
acttctgacagtggggaaagcagctgtgtgtgatagcttggaaggtttactgctgcctcaagtcctcttctctgcagttgaggtttcaggtttcaatcctcccaataccacaagacagagcacggggcggctgccgcctccgcctccgcgccttaacctaggcggcttgccgaagatctcagccccgcggccgcgcgctcgccctgccctagaccagggttgggcgcagcggcggaggtggcttctgggctgcgcgagctgggagagctgggaggcggcgatcgcagctgggccgggacttccttcctccaccgcacggcaacaaaacaaccctgcggcaggcactgagtgcttcgcagctgtctgggcgagaggcacagcgatgggctccgtgctgagcaccgacagcggcaaatcggcgcccgcctctgccaccgcgcgggccctggagcgcaggagggacccggagttgcccgtcacgtccttcgactgcgccgtgtgccttgaggtgttacaccagcctgtccggacccgctgcggccacgtattctgccgttcctgtattgctaccagtctgaagaacaacaagtggacctgtccttattgccgggcatatcttccttcagaaggagttccagcaactgatgtagccaaaagaatgaaatcagagtataagaactgcgctgagtgtgacaccctggtttgcctcagtgaaatgagggcacatattcggacttgtcagaagtacatagataagtatggaccactacaagaacttgaggagacagcagcaaggtgtgtatgtcccttttgtcagagggaactgtatgaagacagcttgctggatcattgtattactcatcacagatcggaacggaggcctgtgttctgtccactttgccgtttaatacccgatgagaatccaagcagcttcagcggcaatttaataagacatctgcaagttagtcacactttgttttatgatgatttcatagattttaatataattgaggaagctcttatccgaagagtcttagaccggtcacttcttgaatatgtgaatcactcgaacaccacataattttattaaaacgaagggaaaagggaccactgaattgcaccatttaagatgctgcttgaacaaatgggagggaagttgtcaatgattgatgggcaaaaatgtacaacacagttatgtgtttgtccatgtttattgttatagtgcatttaaaaactgctttaattttaatggtttaaatctgttttacatccttgagattcttacacatctaacaacaaaaaaaattatctacatcagtcattgttacatggaaaagacaggtggtaggcaagtaggtggaggatctcggtttgcaaattagataatactctgtgtataatgctacatatcaataactaccatcatggttaggcacgataactaatctttgttctgtgtaaaaaaatatggagagtgaaacaaagtgcagacattcaaagaaataagaaatctgctccaatgctcttgttctaatctctaataggttaacgttaataatcttgtatgggagttggaaaggaaaattttggaagtcaagaaagtccatttaggccggacgcggtggcttacgcttgtagtcccagcactttgggaggctgaggcaggcggatcacagggtcgggagttcgagaccagcctggccaacactggtctctgtgaaactccgtctctactgaaaatgcaaagattggctggacgtgttggcgggcatctgtgataccagctacttgggaggctgaggcagaagaatcgcttgagcccgggaggcggaggttgcagtgagctgagatcgcgccagtacactccagcctgggtaacagagctagactccatctcaaaaaaaaaaaaaaaaaaa

SEQ ID NO: 1666 - protein, 232 aa, Homo sapien
MGSVLSTDSGKSAPASATARALERRRDPELPVTSFDCAVCLEVLHQPVRTRCGHVFCRSCIATSLKNNKWTCPYCRAYLPSEGVPATDVAKRMKSEYKNCAECDTLVCLSEMRAHIRTCQKYIDKYGPLQELEETAARCVCPFCQRELYEDSLLDHCITHHRSERRPVFCPLCRLIPDENPSSFSGNLIRHLQVSHTLFYDDFIDFNIIEEALIRRVLDRSLLEYVNHSNTT

SEQ ID NO: 1667 - DNA, 1705 bp, Homo sapien
gtttttttcccttctgagcaatggagcttaccatctttatcctgagactggccatttacatcctgacatttcccttgtacctgctgaactttctgggcttgtggagctggatatgcaaaaaatggttcccctacttcttggtgaggttcactgtgatatacaacgaacagatggcaagcaagaagcgggagctcttcagtaacctgcaggagtttgcgggcccctccgggaaactctccctgctggaagtgggctgtggcacgggggccaacttcaagttctacccacctgggtgcagggtgacctgtattgaccccaaccccaactttgagaagtttttgatcaagagcattgcagagaaccgacacctgcagtttgagcgctttgtggtagctgccggggagaacatgcaccaggtggctgatggctctgtggatgtggtggtctgcaccctggtgctgtgctctgtgaagaaccaggagcggattctccgcgaggtgtgcagagtgctgagaccgggaggggctttctatttcatggagcatgtggcagctgagtgttcgacttggaattacttctggcaacaagtcctggatcctgcctggcaccttctgtttgatgggtgcaacctgaccagagagagctggaaggccctggagcgggccagcttctctaagctgaagctgcagcacatccaggccccactgtcctgggagttggtgcgccctcatatctatggatatgctgtgaaatagtgtgagctggcagttaagagctgaatggctcaaagaatttaaagcttcagttttacatttaaaatgctaagtgggagaagagaaaccttttttttggggggcggtttttttggtttgttgttggttttttttttttttttggcaagactccgtctcaaaaaaaaaaaaaaaaaaaaaaagaagtagagacagggagacagggtctcactgtgttgcctaggccggtcttgaactcctgggctcaagtgattctcccaccttgacctcctaaattgttgggattacaggtgtgagacagtgcacctggccgaaatagctcaagtttctgaaaaacaaatctgaatctatttgttattcttagcgtcactggtctggctttcagaattaacatacaaggttgccacacctagttctgcccagctttatgtcttttattccagtattccaccaaagtttgttttcctgcattccagttctcaagtcttaagataaagattgtacttgacagtttagtatatccataaaactatttgaggtggttaaggttcttgggttcattttccttaatactttgctgaatattgtagattgtaggcaatgaaaaagtctactaaattaggaaaaccttgaataattaggtatcctaggtaagagcccctaaacatcaagcaatctgtgagtctgtaaagaaataaatattttttggattattcttatctaattccacccctgttggaagatgatttctttgttctttgcaactatggaagctgtgaaaatcatcacaagtgcctctgaaagcgagtgttaggttggttagagggtttaatattttctgcaatggtttgtaggaattttaataaatgtagtatattttctgagatgattttgtaaaagtactattttaaatatcaaatcaaccaataaattcacatttgtgttaggaacag

SEQ ID NO: 1668 - protein, 244 aa, Homo sapien
MELTIFILRLAIYILTFPLYLLNFLGLWSWICKKWFPYFLVRFTVIYNEQMASKKRELFSNLQEFAGPSGKLSLLEVGCGTGANFKFYPPGCRVTCIDPNPNFEKFLIKSIAENRHLQFERFVVAAGENMHQVADGSVDVVVCTLVLCSVKNQERILREVCRVLRPGGAFYFMEHVAAECSTWNYFWQQVLDPAWHLLFDGCNLTRESWKALERASFSKLKLQHIQAPLSWELVRPHIYGYAVK

SEQ ID NO: 1669 - DNA, 5360 bp, Homo sapien
ttgaggtgcattgaaatgttccaagctgttacttaccttaacatgttcttgaggtaccatggcatggattaaaaggaaatttggtaagtggcctccacttaaacgacttactagggaagctatgtgaaattatttaaaagggcgaggggatcaaatagtacttatccttcatgcaaaagttgtacagaagtcatatggaatgaaaaaggttttttgccctcccccttgtgtatatcttatgggcagtggatggaagaaaataaaattacaaatgaaatgcgatggttgttctgaacaaggctctcatccatgtgcatttattgggataggaaatagtgaccaagaaatgcagcagctaaacttggaaggaaagaactattgcacagccaaaacattgtacatatctgattcagacaagcaaaagcacttcatgttgtctgtaaaggtgttctatggcaacggtgatgacattggtgtgttcctcagcaagtcgtccaaaccttccaaaaagaagcagtcattgaaaaatgctgacttatgcattggctcaggaacaaaggtggctctgtttaatcgactacgatcccagacagttagtaccagatacttgcatgtagaaggagggaattttcatgccagttcacagcagtggggagcatttacattattcttggatgatgatggatcagaaggagaagaattcacagtcagagatggctacattcattatggacaaacagtcaagcttgtgtgctcagttactggcatggcactcccaagattgataattaggaaagttgataagcagaccacattattggatgcagatgatcctgtgtcacaactccataaatgtgcatttgaccttgaggatacagaaagaatgtacttatgcctttctcaagaaagaataattcaatttcaggccactccatgcccaacagaaccaaataaagagatgataaatgatggtgcttcctgggcaatcattagcacacataaggcgaagtatacattttatgagagaatgggccctgtccttgccctggtcatgcctatgcctgtcgtagagagccttaagttgaatggcggtggggacgaagcaatgcttgaacttacaggacagaatttcactccaaatttacgagtgtggtttggggatgtagaagctgaaactatgtacaggtgtggagagagtatgctccgtgttgtcccagacgttctgcattctgagaaggttggagatagttcccagcaaccagtccaggtttcagtaactttggtccgaaatgatggaatcatatattccaccagccttacctttacctacacaccagaagcagggccgcggccacattgcagtgtagcaggcgcaatccttaaggccagttcaagccacgtgccccctaatgaattaaacacaaacagcgatggaagttacacaaatgccagcacaaattcaaccagtgtcacatcatctacaccaacagtggtatcctgaactaccgtctttttgctaagactcaaacggcttgagtgcagcaaaaagttgacaaaaaaggaaaaaaaaatgaacagtcttttgtggtttattgggaaacttttcataccaggtgatactattctaaaaccccgttgtctccctgcaagtgctgatttgaaatgcagaagccacagtaaaaaaaaaaaaaaaaaaaaaaaaaaaagaaaaaaaaatcaaaatgtataaatattggaaatcaagtttttcagctgttttgttggttggttggttggtttttgtttggttttgtttaaagggacaagaagtaaataatgtggctggaatacaagttgaacaaactagaagacacaaatctaacatagtttttatggaccaaggaacttgtatattgtataagctttagtaaaaggtacattttcaccatacctttttttatatcacggtattatagtacaccttgttaccaataggttgttctcttccccaccctcctttgagctttgctctaaaatacattctggttccaagcctgaccatccttgtttaatctatcatactcttccaggtttttttttttggtctaaggctggaacttttttctttttttttcagctgaagtcttatgactttttcatgagtcaaaattgtttggatttcacgaagtcaaatcttgcaaaggcctgcatattttttttaagattatatgaagtctgtgcaaaaagctttaaaaaattgcctctgccttgcctgcatacatgcaatgtatgtaacttagtctctcttctcagacactgttgggtagttatttctgtgttttctttttttaaaaaaaaatatggacttattgtggtttatctgagaggttctaacattcacatgcaatttggtgtggcatttagctattatgagttattggcgcgaacttgtttgatatttgaagtgtctctccccttttcccatgacgtaatacataggtgtgttccaggatttgttcaggtttttccccccctcctaatcttgtacataacttgtattttgtgtaagttaaacattttatttgaacttggaatgttcccagtgatttcattcagcagggtattttctgccttgttggcaagtagcaaaaaatatgggaagtatttgctaccagttgttagatggtgccccttattggtagaatcaggaaaatgtccgcaaaagcatgttttattatctttacttttttggggggttggagggggtagcctagccagacatcatgtaatcttaaaacataagatgcttttattagatgatcaactaaaaatagctggaagacagtactttagaaacaaaatagttagtaagatatataatgcaaatgtaacttatgttttcatttttttctctgccttttttttttgttttttttctttttttccagtactgagcatctccacaaatgtctcctactcagaaaatgtttcttttctttcagttgagatttggtgcattcagggttgtaggttggccttgcttgctaacccgccggttttaccgtgctttattcctgaactttgtttatgcctttgtttggttcttctgaaattgcagcagactcattgggctacatttagtacaggaaccacgtgtgtaatgttatacaacacagtcagtaatacaatcatccctcttagagtaaaaactacctctagattgtgtaagctttttactgtccataaaacaggagccacagtaccttatgaatgcaaaactgtaacttcctacagtgtttccccacagaacattgtctttctggtgtctgggctgtttttgaaaaagtttccattaatagactttttagaaattattattagtagcattttttttccagctttgcgtcttcatcactcactcaagtgtcagactatgcactgtaaatatcttcctaacatctttaaatcgccttttcctcagttttcaaggggaaggtcatttgtaaagcacgttaggtggttaaatcagttattgcggttttctcttacagcaagcctttttaatcacccccaggctgcattttattctatatcgccttttttcttcaaatctgctccaatcatccacttctctcttataagctattcctgcctcacacctaaatctgtttcagtgatcaagggcagaactcattgtggccttatctttctttgttgtaattgttcactgtctctttcttacagaccacttattctgagtagtagttattcctccctatggagtcatggcaggaatcattacacagtgcttttgttcagagcatggacatgttccaggtgctgctttgctttaacggccacaagtttcctccacttctcaggtttggtatttagtaaggaatcaattaaattaaccaataacaaaagagatacttttgaagaacaaactattctttacccattttgtagctcaaaaataatttttcaagttcatgaccttattaaaatgaacttgtgtttttttaacaaacgtctattttattttgatagtttctttccgaagataattgaaatattatactgtaacccttttcttttcttttttgaaaagtccaagaatgtacttatacaggatttttccccacctatttttggccattctcataccacagacaaaagagtgaatgattgtcattgtagcttattgtttatcagtagttcttttgtagctgcttacattttttctttcatggtttgtgaatcatttcagtatgtaatttataggaaccttgtcctctggtatagtagactgtgtgccctcctccaggatggcattattagacatgctggtcatttaccctcagaaagactctcttatagaatggtgagtgcttcagttatagtatgtttgaattttaaaaaattcctgtttagaatgtatctatgctctcatgactatgcagtttctaacatacacatagaagctgagtctctgatccaatatgtttttatttgttccattaatttatcacatagattgggaaggcaagctaaaagccttaaaaatgccctttatattttgagtgatttcagcgttgaacacagtatactatctaaatttgctgctcactttcttaaactgttgcaattaaaggcatgtttatacatgactaatcgtgaaatgtttgtcactcttactgcacagacttatctgcaatcaaactggttagtttttttgttttgttttgttttattgtttttaatgaatctggtaccatctgtgctttcacaaaaaacttccaatgccatttttgagaactaacctaacagtcatgctaaccagaaaatccactggggaggaggttcctttgaaacaaaatgctgttcagttagtaaccaagttactttgattgcaaaagcagctgtgtttctgataagtactgaacaaatgtgtgtaattttctgtgccagacttatgactttgttttcaagcactgtaatgtgggatggatggttagaaacaataatatatagggtttctgttaaccctttcaggactcaactgtatctccttttgttaattttcccctgtgttgtgataaattgtttgccagcattcagtactgtgttggtgcagatgaggtttatatctcattttagcttatttcttgtacctttcagcatgcctacgcattcagtccttaaggggtttattttacaaactgtgcgcctgaagtttattagcaataagatagaaaatgagcaagtttataccataattttgagaaaaaaagaatctgctcagttccatatttcatccgtgaaaaacttgcaatacgagcagtttcaaggaataaataaaaaggaaatgaaaccattgt

SEQ ID NO: 1670 - protein, 420 aa, Homo sapien
MGSGWKKIKLQMKCDGCSEQGSHPCAFIGIGNSDQEMQQLNLEGKNYCTAKTLYISDSDKQKHFMLSVKVFYGNGDDIGVFLSKSSKPSKKKQSLKNADLCIGSGTKVALFNRLRSQTVSTRYLHVEGGNFHASSQQWGAFTLFLDDDGSEGEEFTVRDGYIHYGQTVKLVCSVTGMALPRLIIRKVDKQTTLLDADDPVSQLHKCAFDLEDTERMYLCLSQERIIQFQATPCPTEPNKEMINDGASWAIISTHKAKYTFYERMGPVLALVMPMPVVESLKLNGGGDEAMLELTGQNFTPNLRVWFGDVEAETMYRCGESMLRVVPDVLHSEKVGDSSQQPVQVSVTLVRNDGIIYSTSLTFTYTPEAGPRPHCSVAGAILKASSSHVPPNELNTNSDGSYTNASTNSTSVTSSTPTVVS

SEQ ID NO: 1671 - DNA, 2867 bp, Homo sapien
tcccgtggagcagaggggcaaagtggcaggaacctcttaaagggcgagacgggcggcgaccgagaacgcggtcggcccggtccccgccgcacccagcccagagaagagtttagtgactgaggccgaaaattcacagcaccaacagaaggaagagggtgaggaagccataaactcaggccaacaagaacctcagcaggaggaatcttgtcaaacagcagctgaaggagataattggtgtgaacacaaggtgaaagcttctaatggagacactcctacacatgaagacttgaccaagaacaaggagcggacatcagaaagcagaggactttcacgactattctcctcgtttctcaaaaggcccaaatctcaggtgtccgaggaagaaggcaaagaagtagagtcagataaagaaaaaggtgaaggaggtcagaaagagatagaatttggaaccagtcttgatgaagagatcattttaaaggccccaattgcagctcctgaaccggaactcaaaacagacccatctttggatcttcattcattaagcagtgcagaaacacagcctcaccattacaattaagaattatttttagagtcttcttatttctgaagcatgtgaatattatctcgatcgttaaaagtcctgctcaggaagaactcagagaagatccagattctgaaattaaggaaggagaaggacttgaagagtgctccaaaatagaagtaaaagaagaaagccctcaatcaaaagcagaaacagaattaaaagcttcccaaaaaccaatcagaaaacacaggaacatgcactgcaaggtttctttgttggatgacacagtttatgaatgtgttgtggagaaacatgctaagggacaagatttgcttaaacgagtatgtgagcatctcaatcttttggaagaagactattttggtctagccatttgggataacgcaacctctaagacatggctggattccgccaaagaaataaaaaagcaggttcgtggtgtcccttggaattttacatttaatgtaaagttttatccacctgacccagcacagttaacagaagacataacaagatattatttatgtcttcagcttcggcaggacatagttgcaggacgtctgccctgttcctttgcaaccttagcattattaggttcttacaccatccagtctgaactgggagactacgacccagaactccatggcgtggattatgttagtgattttaaactggccccgaatcagaccaaggaacttgaagagaaggtcatggaactgcataagtcatacaggtccatgactccagctcaggctgacttggagtttcttgagaatgccaaaaagttgtctatgtatggagttgatcttcataaagcaaaggacttggaaggagtagatatcatcctaggtgtctgctctagtggccttctggtttacaaagataagctgagaattaaccgcttcccttggcccaaagtgctgaagatttcttataaacgtagtagctttttcatcaagattcggcctggagagcaagagcagtatgaaagtaccatcggattcaaacttcccagttaccgagcagctaagaaattatggaaagtctgtgtagaacatcacacgtttttcagattgacatctacagacaccattcccaaaagcaaatttcttgcgctaggatccaaatttcgatacagtggccggactcaagctcagaccaggcaagctagtgctctaattgacaggcctgccccacacttcgagcgtacagcaagtaaacgggcgtcccggagcctcgatggagcagcagctgtcgattcggcagaccgaagtcctcggcccacttctgcacctgccattactcagggtcaggttgcagaaggtggcgtcctagatgcctctgctaaaaaaacagtggtccctaaagcacagaaggaaacagtgaaggctgaagtgaaaaaggaagacgagccacctgagcaagctgagccagagcccacagaagcatggaagaaaaagagagaaagactagatggtgaaaacatttatatcagacatagcaatttaatgttggaggatttagacaagagtcaagaggagatcaaaaaacatcatgccagcatcagtgagctgaaaaagaacttcatggagtctgtaccagaaccacggcctagtgaatgggataaacgcttatccactcactcacccttccgaactcttaacatcaatgggcaaatccccacaggagaaggacctcccctggtgaagacacaaactgtcaccatctcagataatgccaatgctgtgaaaagtgaaatcccaaccaaagacgtccctattgtccacactgagaccaagaccatcacttatgaggctgcccagactgtaaaaggtgggatttcagagacacgtattgaaaagagaattgtgatcacaggagatgctgatattgaccatgatcaggtccttgtacaagccatcaaggaggcaaaggagcagcacccagacatgtcagtgaccaaggtggtcgtccaccaggagaccgagattgctgatgagtgagctcaggaactaacctaccccaactctgcccttctcccatccaagagaaaccacgaaaatgataaagaagctaacctgccatagtcagacttcagactttcaagattattctaaatcaccagaaaattaatttcagtttctattgggagtttataccaagagattcttctagatctcattgatccttttgaagagctttttctatattaggatatcagaattgttcaacttttcactctatagactgttttaagagttttggggggtttttaattgggtggtttgtaaccccttcagcctag

SEQ ID NO: 1672 - protein, 588 aa, Homo sapien
MHCKVSLLDDTVYECVVEKHAKGQDLLKRVCEHLNLLEEDYFGLAIWDNATSKTWLDSAKEIKKQVRGVPWNFTFNVKFYPPDPAQLTEDITRYYLCLQLRQDIVAGRLPCSFATLALLGSYTIQSELGDYDPELHGVDYVSDFKLAPNQTKELEEKVMELHKSYRSMTPAQADLEFLENAKKLSMYGVDLHKAKDLEGVDIILGVCSSGLLVYKDKLRINRFPWPKVLKISYKRSSFFIKIRPGEQEQYESTIGFKLPSYRAAKKLWKVCVEHHTFFRLTSTDTIPKSKFLALGSKFRYSGRTQAQTRQASALIDRPAPHFERTASKRASRSLDGAAAVDSADRSPRPTSAPAITQGQVAEGGVLDASAKKTVVPKAQKETVKAEVKKEDEPPEQAEPEPTEAWKKKRERLDGENIYIRHSNLMLEDLDKSQEEIKKHHASISELKKNFMESVPEPRPSEWDKRLSTHSPFRTLNINGQIPTGEGPPLVKTQTVTISDNANAVKSEIPTKDVPIVHTETKTITYEAAQTVKGGISETRIEKRIVITGDADIDHDQVLVQAIKEAKEQHPDMSVTKVVVHQETEIADE

SEQ ID NO: 1673 - DNA, 1979 bp, Homo sapien
caggactgcctgagacaagccacaagctgaacagagaaagtggattgaacaaggacgcatttccccagtacatccacaacatgctgtccacatctcgttctcggtttatcagaaataccaacgagagcggtgaagaagtcaccaccttttttgattatgattacggtgctccctgtcataaatttgacgtgaagcaaattggggcccaactcctgcctccgctctactcgctggtgttcatctttggttttgtgggcaacatgctggtcgtcctcatcttaataaactgcaaaaagctgaagtgcttgactgacatttacctgctcaacctggccatctctgatctgctttttcttattactctcccattgtgggctcactctgctgcaaatgagtgggtctttgggaatgcaatgtgcaaattattcacagggctgtatcacatcggttattttggcggaatcttcttcatcatcctcctgacaatcgatagatacctggctattgtccatgctgtgtttgctttaaaagccaggacggtcacctttggggtggtgacaagtgtgatcacctggttggtggctgtgtttgcttctgtcccaggaatcatctttactaaatgccagaaagaagattctgtttatgtctgtggcccttattttccacgaggatggaataatttccacacaataatgaggaacattttggggctggtcctgccgctgctcatcatggtcatctgctactcgggaatcctgaaaaccctgcttcggtgtcgaaacgagaagaagaggcatagggcagtgagagtcatcttcaccatcatgattgtttactttctcttctggactccctataacattgtcattctcctgaacaccttccaggaattcttcggcctgagtaactgtgaaagcaccagtcaactggaccaagccacgcaggtgacagagactcttgggatgactcactgctgcatcaatcccatcatctatgccttcgttggggagaagttcagaaggtatctctcggtgttcttccgaaagcacatcaccaagcgcttctgcaaacaatgtccagttttctacagggagacagtggatggagtgacttcaacaaacacgccttccactggggagcaggaagtctcggctggtttataaaacgaggagcagtttgattgttgtttataaagggagataacaatctgtatataacaacaaacttcaagggtttgttgaacaatagaaacctgtaaagcaggtgcccaggaacctcagggctgtgtgtactaatacagactatgtcacccaatgcatatccaacatgtgctcagggaataatccagaaaaactgtgggtagagactttgactctccagaaagctcatctcagctcctgaaaaatgcctcattaccttgtgctaatcctctttttctagtcttcataatttcttcactcaatctctgattctgtcaatgtcttgaaatcaagggccagctggaggtgaagaagagaatgtgacaggcacagatgaatgggagtgagggatagtggggtcagggctgagaggagaaggagggagacatgagcatggctgagcctggacaaagacaaaggtgagcaaagggctcacgcattcagccaggagatgatactggtccttagccccatctgccacgtgtatttaaccttgaagggttcaccaggtcagggagagtttgggaactgcaataacctgggagttttggtggagtccgatgattctcttttgcataagtgcatgacatatttttgctttattacagtttatctatggcacccatgcaccttacatttgaaatctatgaaatatcatgctccattgttcagatgcttcttaggccacatccccctgtctaaaaattcagaaaatttttgtttataaaagatgcattatctatgatatgctaatatatgtatatgcaatataaaatttag

SEQ ID NO: 1674 - protein, 360 aa, Homo sapien
MLSTSRSRFIRNTNESGEEVTTFFDYDYGAPCHKFDVKQIGAQLLPPLYSLVFIFGFVGNMLVVLILINCKKLKCLTDIYLLNLAISDLLFLITLPLWAHSAANEWVFGNAMCKLFTGLYHIGYFGGIFFIILLTIDRYLAIVHAVFALKARTVTFGVVTSVITWLVAVFASVPGIIFTKCQKEDSVYVCGPYFPRGWNNFHTIMRNILGLVLPLLIMVICYSGILKTLLRCRNEKKRHRAVRVIFTIMIVYFLFWTPYNIVILLNTFQEFFGLSNCESTSQLDQATQVTETLGMTHCCINPIIYAFVGEKFRRYLSVFFRKHITKRFCKQCPVFYRETVDGVTSTNTPSTGEQEVSAGL

SEQ ID NO: 1675 - DNA, 1364 bp, Homo sapien
ctgtattgtggttcctggaacactttagaggcttgtgattctactgcttcttattcacactataatacatgtctcaccaatagatgattcaagaacatcatttaaatacacaatttttcattctctatttttgctaaatttcttcatactcaactttcagattctttaatctccagctcagcttcaacaattcaacgctgttctttctgaaaaagtacacatcgtgccttctctacttcgctcttggaacataatttctcatggcagtgtttaagaccactctgtggaggttaatttctgggaccttagggataatatgcctttcgttgatggctacgttgggaattttgttgaaaaattcttttactaaactgagtattgagccagcatttactccaggacccaacatagaactccagaaagactctgactgctgttcttgccaagaaaaatgggttgggtaccggtgcaactgttacttcatttccagtgaacagaaaacttggaacgaaagtcggcatctctgtgcttctcagaaatccagcctgcttcagcttcaaaacacagatgaactggattttatgagctccagtcaacaattttactggattggactctcttacagtgaggagcacaccgcctggttgtgggagaatggctctgcactctcccagtatctatttccatcatttgaaacttttaatacaaagaactgcatagcgtataatccaaatggaaatgctttagatgaatcctgtgaagataaaaatcgttatatctgtaagcaacagctcatttaaatgtttcttggggcagagaaggtggagagtaaagacccaacattactaacaatgatacagttgcatgttatattattactaattgtctacttctggagtctataaaatgtttttaaacagtgtcatatacaattgtcatgtatgtgaaacaatgtgttttaaaattgatgaaattcgttcacctacatttgagaattataaaattaacataaagaattttgtattttcatttaatgtatataatgttaaattcaatgtagttttattacacatttatgtaattttatttacattcttgctaattctcagcagaaatttaaataagatttaattcacatcaaataaaatttagaaaataaaatttaactcacactgcccaggctggagcatagtggcaagatcatagctcattgcaagctcaagtgatcctcctgactcagcctcccaagtagctaggactgcaggcaccatgtcactatgcccgactaatttttaatttttaattttttgtcaagacaaggtcttgctatgttgcccaggctggtcttgaactcctggcctcaa

SEQ ID NO: 1676 - protein, 179 aa, Homo sapien
MAVFKTTLWRLISGTLGIICLSLMATLGILLKNSFTKLSIEPAFTPGPNIELQKDSDCCSCQEKWVGYRCNCYFISSEQKTWNESRHLCASQKSSLLQLQNTDELDFMSSSQQFYWIGLSYSEEHTAWLWENGSALSQYLFPSFETFNTKNCIAYNPNGNALDESCEDKNRYICKQQLI

SEQ ID NO: 1677 - DNA, 1271 bp, Homo sapien
ctgtattgtggttcctggaacactttagaggcttgtgattctactgcttcttattcacactataatacatgtctcaccaatagatgattcaagaacatcatttaaatacacaatttttcattctctatttttgctaaatttcttcatactcaactttcagattctttaatctccagctcagcttcaacaattcaacgctgttctttctgaaaaagtacacatcgtgccttctctacttcgctcttggaacataatttctcatggcagcttttactaaactgagtattgagccagcatttactccaggacccaacatagaactccagaaagactctgactgctgttcttgccaagaaaaatgggttgggtaccggtgcaactgttacttcatttccagtgaacagaaaacttggaacgaaagtcggcatctctgtgcttctcagaaatccagcctgcttcagcttcaaaacacagatgaactggattttatgagctccagtcaacaattttactggattggactctcttacagtgaggagcacaccgcctggttgtgggagaatggctctgcactctcccagtatctatttccatcatttgaaacttttaatacaaagaactgcatagcgtataatccaaatggaaatgctttagatgaatcctgtgaagataaaaatcgttatatctgtaagcaacagctcatttaaatgtttcttggggcagagaaggtggagagtaaagacccaacattactaacaatgatacagttgcatgttatattattactaattgtctacttctggagtctataaaatgtttttaaacagtgtcatatacaattgtcatgtatgtgaaacaatgtgttttaaaattgatgaaattcgttcacctacatttgagaattataaaattaacataaagaattttgtattttcatttaatgtatataatgttaaattcaatgtagttttattacacatttatgtaattttatttacattcttgctaattctcagcagaaatttaaataagatttaattcacatcaaataaaatttagaaaataaaatttaactcacactgcccaggctggagcatagtggcaagatcatagctcattgcaagctcaagtgatcctcctgactcagcctcccaagtagctaggactgcaggcaccatgtcactatgcccgactaatttttaatttttaattttttgtcaagacaaggtcttgctatgttgcccaggctggtcttgaactcctggcctcaa

SEQ ID NO: 1678 - protein, 148 aa, Homo sapien
MAAFTKLSIEPAFTPGPNIELQKDSDCCSCQEKWVGYRCNCYFISSEQKTWNESRHLCASQKSSLLQLQNTDELDFMSSSQQFYWIGLSYSEEHTAWLWENGSALSQYLFPSFETFNTKNCIAYNPNGNALDESCEDKNRYICKQQLI

SEQ ID NO: 1679 - DNA, 982 bp, Homo sapien
agacaattttcagcaggaagaagtagaaaggataaaatggatcctgcaccacgggaacctcacagcacctcacttcttttggttttctttctctttggggcacctctggactcactccccagcatgaaggcgctgagcccggtgcgcggctgctacgaggcggtgtgctgcctgtcggaacgcagtctggccatcgcccggggccgagggaagggcccggcagctgaggagccgctgagcttgctggacgacatgaaccactgctactcccgcctgcgggaactggtacccggagtcccgagaggcactcagcttagccaggtggaaatcctacagcgcgtcatcgactacattctcgacctgcaggtagtcctggccgagccagcccctggaccccctgatggcccccaccttcccatccagacagccgagctcgctccggaacttgtcatctccaacgacaaaaggagcttttgccactgactcggccgtgtcctgacacctccagaacgcaggtgctggcgcccgttctgcctgggaccccgggaacctctcctgccggaagccggacggcagggatgggccccaacttcgccctgcccacttgacttcaccaaatcccttcctggagactgaacctggtgctcaggagcgaaggactgtgaacttgtggcctgaagagccagagctagctctggccaccagctgggcgacgtcaccctgctcccaccccaccccaagttctaaggtcttttcagagcgtggaggtgtggaaggagtggctgctctccaaactatgccaaggcggcggcagagctggtcttctggtctccttggagaaaggttctgttgccctgatttatgaactctataatagagtatataggttttgtaccttttttacaggaaggtgactttctgtaacaatgcgatgtatattaaactttttataaaagttaacattttgcataataaacgattt

SEQ ID NO: 1680 - protein, 148 aa, Homo sapien
MDPAPREPHSTSLLLVFFLFGAPLDSLPSMKALSPVRGCYEAVCCLSERSLAIARGRGKGPAAEEPLSLLDDMNHCYSRLRELVPGVPRGTQLSQVEILQRVIDYILDLQVVLAEPAPGPPDGPHLPIQTAELAPELVISNDKRSFCH

SEQ ID NO: 1681 - DNA, 10211 bp, Homo sapien
gagaggtcgttttcccgtccccgagagcaagtttatttacaaatgttggagtaataaagaaggcagaacaaaatgagctgggctttggaagaatggaaagaagggctgcctacaagagctcttcagaaaattcaagagcttgaaggacagcttgacaaactgaagaaggaaaagcagcaaaggcagtttcagcttgacagtctcgaggctgcgcctcagaagcaaacacagaaggttgaaaatgaaaaaaccgagggtacaaacctgaaaagggagaatcaaagattgatggaaatatgtgaaagtctggagaaaactaagcagaagatttctcatgaacttcaagtcaaggagtcacaagtgaatttccaggaaggacaactgaattcaggcaaaaaacaaatagaaaaactggaacaggaacttaaaaggtgtaaatctgagcttgaaagaagccaacaagctgcgcagtctgcagatgtctctctgaatccatgcaatacaccacaaaaaatttttacaactccactaacaccaagtcaatattatagtggttccaagtatgaagatctaaaagaaaaatataataaagaggttgaagaacgaaaaagattagaggcagaggttaaagccttgcaggctaaaaaagcaagccagactcttccacaagccaccatgaatcaccgcgacattgcccggcatcaggcttcatcatctgtgttctcatggcagcaagagaagaccccaagtcatctttcatctaattctcaaagaactccaattaggagagatttctctgcatcttacttttctggggaacaagaggtgactccaagtcgatcaactttgcaaatagggaaaagagatgctaatagcagtttctttgacaattctagcagtcctcatcttttggatcaattaaaagcgcagaatcaagagctaagaaacaagattaatgagttggaactacgcctgcaaggacatgaaaaagaaatgaaaggccaagtgaataagtttcaagaactccaactccaactggagaaagcaaaagtggaattaattgaaaaagagaaagttttgaacaaatgtagggatgaactagtgagaacaacagcacaatacgaccaggcgtcaaccaagtatactgcattggaacaaaaactgaaaaaattgacggaagatttgagttgtcagcgacaaaatgcagaaagtgccagatgttctctggaacagaaaattaaggaaaaagaaaaggagtttcaagaggagctctcccgtcaacagcgttctttccaaacactggaccaggagtgcatccagatgaaggccagactcacccaggagttacagcaagccaagaatatgcacaacgtcctgcaggctgaactggataaactcacatcagtaaagcaacagctagaaaacaatttggaagagtttaagcaaaagttgtgcagagctgaacaggcgttccaggcgagtcagatcaaggagaatgagctgaggagaagcatggaggaaatgaagaaggaaaacaacctccttaagagtcactctgagcaaaaggccagagaagtctgccacctggaggcagaactcaagaacatcaaacagtgtttaaatcagagccagaattttgcagaagaaatgaaagcgaagaatacctctcaggaaaccatgttaagagatcttcaagaaaaaataaatcagcaagaaaactccttgactttagaaaaactgaagcttgctgtggctgatctggaaaagcagcgagattgttctcaagaccttttgaagaaaagagaacatcacattgaacaacttaatgataagttaagcaagacagagaaagagtccaaagccttgctgagtgctttagagttaaaaaagaaagaatatgaattgaaagaagagaaaactctgttttcttgttggaaaagtgaaaacgaaaaacttttaactcagatggaatcagaaaaggaaaacttgcagagtaaaattaatcacttggaaacttgtctgaagacacagcaaataaaaagtcatgaatacaacgagagagtaagaacgctggagatggacagagaaaacctaagtgtcgagatcagaaaccttcacaacgtgttagacagtaagtcagtggaggtagagacccagaaactagcttatatggagctacagcagaaagctgagttctcagatcagaaacatcagaaggaaatagaaaatatgtgtttgaagacttctcagcttactgggcaagttgaagatctagaacacaagcttcagttactgtcaaatgaaataatggacaaagaccggtgttaccaagacttgcatgccgaatatgagagcctcagggatctgctaaaatccaaagatgcttctctggtgacaaatgaagatcatcagagaagtcttttggcttttgatcagcagcctgccatgcatcattcctttgcaaatataattggagaacaaggaagcatgccttcagagaggagtgaatgtcgtttagaagcagaccaaagtccgaaaaattctgccatcctacaaaatagagttgattcacttgaattttcattagagtctcaaaaacagatgaactcagacctgcaaaagcagtgtgaagagttggtgcaaatcaaaggagaaatagaagaaaatctcatgaaagcagaacagatgcatcaaagttttgtggctgaaacaagtcagcgcattagtaagttacaggaagacacttctgctcaccagaatgttgttgctgaaaccttaagtgcccttgagaacaaggaaaaagagctgcaacttttaaatgataaggtagaaactgagcaggcagagattcaagaattaaaaaagagcaaccatctacttgaagactctctaaaggagctacaacttttatccgaaaccctaagcttggagaagaaagaaatgagttccatcatttctctaaataaaagggaaattgaagagctgacccaagagaatgggactcttaaggaaattaatgcatccttaaatcaagagaagatgaacttaatccagaaaagtgagagttttgcaaactatatagatgaaagggagaaaagcatttcagagttatctgatcagtacaagcaagaaaaacttattttactacaaagatgtgaagaaaccggaaatgcatatgaggatcttagtcaaaaatacaaagcagcacaggaaaagaattctaaattagaatgcttgctaaatgaatgcactagtctttgtgaaaataggaaaaatgagttggaacagctaaaggaagcatttgcaaaggaacaccaagaattcttaacaaaattagcatttgctgaagaaagaaatcagaatctgatgctagagttggagacagtgcagcaagctctgagatctgagatgacagataaccaaaacaattctaagagcgaggctggtggtttaaagcaagaaatcatgactttaaaggaagaacaaaacaaaatgcaaaaggaagttaatgacttattacaagagaatgaacagctgatgaaggtaatgaagactaaacatgaatgtcaaaatctagaatcagaaccaattaggaactctgtgaaagaaagagagagtgagagaaatcaatgtaattttaaacctcagatggatcttgaagttaaagaaatttctctagatagttataatgcgcagttggtgcaattagaagctatgctaagaaataaggaattaaaacttcaggaaagtgagaaggagaaggagtgcctgcagcatgaattacagacaattagaggagatcttgaaaccagcaatttgcaagacatgcagtcacaagaaattagtggccttaaagactgtgaaatagatgcggaagaaaagtatatttcagggcctcatgagttgtcaacaagtcaaaacgacaatgcacaccttcagtgctctctgcaaacaacaatgaacaagctgaatgagctagagaaaatatgtgaaatactgcaggctgaaaagtatgaactcgtaactgagctgaatgattcaaggtcagaatgtatcacagcaactaggaaaatggcagaagaggtagggaaactactaaatgaagttaaaatattaaatgatgacagtggtcttctccatggtgagttagtggaagacataccaggaggtgaatttggtgaacaaccaaatgaacagcaccctgtgtctttggctccattggacgagagtaattcctacgagcacttgacattgtcagacaaagaagttcaaatgcactttgccgaattgcaagagaaattcttatctttacaaagtgaacacaaaattttacatgatcagcactgtcagatgagctctaaaatgtcagagctgcagacctatgttgactcattaaaggccgaaaatttggtcttgtcaacgaatctgagaaactttcaaggtgacttggtgaaggagatgcagctgggcttggaggaggggctcgttccatccctgtcatcctcttgtgtgcctgacagctctagtcttagcagtttgggagactcctccttttacagagctcttttagaacagacaggagatatgtctcttttgagtaatttagaaggggctgtttcagcaaaccagtgcagtgtagatgaagtattttgcagcagtctgcaggaggagaatctgaccaggaaagaaaccccttcggccccagcgaagggtgttgaagagcttgagtccctctgtgaggtgtaccggcagtccctcgagaagctagaagagaaaatggaaagtcaagggattatgaaaaataaggaaattcaagagctcgagcagttattaagttctgaaaggcaagagcttgactgccttaggaagcagtatttgtcagaaaatgaacagtggcaacagaagctgacaagcgtgactctggagatggagtccaagttggcggcagaaaagaaacagacggaacaactgtcacttgagctggaagtagcacgactccagctacaaggtctggacttaagttctcggtctttgcttggcatcgacacagaagatgctattcaaggccgaaatgagagctgtgacatatcaaaagaacatacttcagaaactacagaaagaacaccaaagcatgatgttcatcagatttgtgataaagatgctcagcaggacctcaatctagacattgagaaaataactgagactggtgcattgaaacccacaggagagtgctctggggaacagtccccagataccaattatgagcctccaggggaagataaaacccagggctcttcagaatgcatttctgaattgtcattttctggtcctaatgctttggtacctatggatttcctggggaatcaggaagatatccataatcttcaactgcgggtaaaagagacatcaaatgagaatttgagattacttcatgtgatagaggaccgtgacagaaaagttgaaagtttgctaaatgaaatgaaagaattagactcaaaactccatttacaggaggtacaactaatgaccaaaattgaagcatgcatagaattggaaaaaatagttggggaacttaagaaagaaaactcagatttaagtgaaaaattggaatatttttcttgtgatcaccaggagttactccagagagtagaaacttctgaaggcctcaattctgatttagaaatgcatgcagataaatcatcacgtgaagatattggagataatgtggccaaggtgaatgacagctggaaggagagatttcttgatgtggaaaatgagctgagtaggatcagatcggagaaagctagcattgagcatgaagccctctacctggaggctgacttagaggtagttcaaacagagaagctatgtttagaaaaagacaatgaaaataagcagaaggttattgtctgccttgaagaagaactctcagtggtcacaagtgagagaaaccagcttcgtggagaattagatactatgtcaaaaaaaaccacggcactggatcagttgtctgaaaaaatgaaggagaaaacacaagagcttgagtctcatcaaagtgagtgtctccattgcattcaggtggcagaggcagaggtgaaggaaaagacggaactccttcagactttgtcctctgatgtgagtgagctgttaaaagacaaaactcatctccaggaaaagctgcagagtttggaaaaggactcacaggcactgtctttgacaaaatgtgagctggaaaaccaaattgcacaactgaataaagagaaagaattgcttgtcaaggaatctgaaagcctgcaggccagactgagtgaatcagattatgaaaagctgaatgtctccaaggccttggaggccgcactggtggagaaaggtgagttcgcattgaggctgagctcaacacaggaggaagtgcatcagctgagaagaggcatcgagaaactgagagttcgcattgaggccgatgaaaagaagcagctgcacatcgcagagaaactgaaagaacgcgagcgggagaatgattcacttaaggataaagttgagaaccttgaaagggaattgcagatgtcagaagaaaaccaggagctagtgattcttgatgccgagaattccaaagcagaagtagagactctaaaaacacaaatagaagagatggccagaagcctgaaagtttttgaattagaccttgtcacgttaaggtctgaaaaagaaaatctgacaaaacaaatacaagaaaaacaaggtcagttgtcagaactagacaagttactctcttcatttaaaagtctgttagaagaaaaggagcaagcagagatacagatcaaagaagaatctaaaactgcagtggagatgcttcagaatcagttaaaggagctaaatgaggcagtagcagccttgtgtggtgaccaagaaattatgaaggccacagaacagagtctagacccaccaatagaggaagagcatcagctgagaaatagcattgaaaagctgagagcccgcctagaagctgatgaaaagaagcagctctgtgtcttacaacaactgaaggaaagtgagcatcatgcagatttacttaagggtagagtggagaaccttgaaagagagctagagatagccaggacaaaccaagagcatgcagctcttgaggcagagaattccaaaggagaggtagagaccctaaaagcaaaaatagaagggatgacccaaagtctgagaggtctggaattagatgttgttactataaggtcagaaaaagaaaatctgacaaatgaattacaaaaagagcaagagcgaatatctgaattagaaataataaattcatcatttgaaaatattttgcaagaaaaagagcaagagaaagtacagatgaaagaaaaatcaagcactgccatggagatgcttcaaacacaattaaaagagctcaatgagagagtggcagccctgcataatgaccaagaagcctgtaaggccaaagagcagaatcttagtagtcaagtagagtgtcttgaacttgagaaggctcagttgctacaaggccttgatgaggccaaaaataattatattgttttgcaatcttcagtgaatggcctcattcaagaagtagaagatggcaagcagaaactggagaagaaggatgaagaaatcagtagactgaaaaatcaaattcaagaccaagagcagcttgtctctaaactgtcccaggtggaaggagagcaccaactttggaaggagcaaaacttagaactgagaaatctgacagtggaattggagcagaagatccaagtgctacaatccaaaaatgcctctttgcaggacacattagaagtgctgcagagttcttacaagaatctagagaatgagcttgaattgacaaaaatggacaaaatgtcctttgttgaaaaagtaaacaaaatgactgcaaaggaaactgagctgcagagggaaatgcatgagatggcacagaaaacagcagagctgcaagaagaactcagtggagagaaaaataggctagctggagagttgcagttactgttggaagaaataaagagcagcaaagatcaattgaaggagctcacactagaaaatagtgaattgaagaagagcctagattgcatgcacaaagaccaggtggaaaaggaagggaaagtgagagaggaaatagctgaatatcagctacggcttcatgaagctgaaaagaaacaccaggctttgcttttggacacaaacaaacagtatgaagtagaaatccagacataccgagagaaattgacttctaaagaagaatgtctcagttcacagaagctggagatagaccttttaaagtctagtaaagaagagctcaataattcattgaaagctactactcagattttggaagaattgaagaaaaccaagatggacaatctaaaatatgtaaatcagttgaagaaggaaaatgaacgtgcccaggggaaaatgaagttgttgatcaaatcctgtaaacagctggaagaggaaaaggagatactgcagaaagaactctctcaacttcaagctgcacaggagaagcagaaaacaggtactgttatggataccaaggtcgatgaattaacaactgagatcaaagaactgaaagaaactcttgaagaaaaaaccaaggaggcagatgaatacttggataagtactgttccttgcttataagccatgaaaagttagagaaagctaaagagatgttagagacacaagtggcccatctgtgttcacagcaatctaaacaagattcccgagggtctcctttgctaggtccagttgttccaggaccatctccaatcccttctgttactgaaaagaggttatcatctggccaaaataaagcttcaggcaagaggcaaagatccagtggaatatgggagaatggtggaggaccaacacctgctaccccagagagcttttctaaaaaaagcaagaaagcagtcatgagtggtattcaccctgcagaagacacggaaggtactgagtttgagccagagggacttccagaagttgtaaagaaagggtttgctgacatcccgacaggaaagactagcccatatatcctgcgaagaacaaccatggcaactcggaccagcccccgcctggctgcacagaagttagcgctatccccactgagtctcggcaaagaaaatcttgcagagtcctccaaaccaacagctggtggcagcagatcacaaaaggtcaaagttgctcagcggagcccagtagattcaggcaccatcctccgagaacccaccacgaaatccgtcccagtcaataatcttcctgagagaagtccgactgacagccccagagagggcctgagggtcaagcgaggccgacttgtccccagccccaaagctggactggagtccaagggcagtgagaactgtaaggtccagtgaaggcactttgtgtgtcagtacccctgggaggtgccagtcattgaatagataaggctgtgcctacaggacttctctttagtcagggcatgctttattagtgaggagaaaacaattccttagaagtcttaaatatattgtactctttagatctcccatgtgtaggtattgaaaaagtttggaagcactgatcacctgttagcattgccattcctctactgcaatgtaaatagtataaagctatgtatataaagctttttggtaatatgttacaattaaaatgacaagcactatatcacaatctctgtttgtatgtgggttttacactaaaaaaatgcaaaacacattttattcttctaattaacagctcctaggaaaatgtagacttttgctttatgatattctatctgtagtatgaggcatggaatagttttgtatcgggaatttctcagagctgagtaaaatgaaggaaaagcatgttatgtgtttttaaggaaaatgtgcacacatatacatgtaggagtgtttatctttctcttacaatctgttttagacatctttgcttatgaaacctgtacatatgtgtgtgtgggtatgtgtttatttccagtgagggctgcaggcttcctagaggtgtgctataccatgcgtctgtcgttgtgcttttttctgtttttagaccaattttttacagttctttggtaagcattgtcgtatctggtgatggattaacatatagcctttgttttctaataaaatagtcgccttcgttttctgtaaaaaaaaaaaaaaaaaaaaaa

SEQ ID NO: 1682 - protein, 2000 aa, Homo sapien
MSWALEEWKEGLPTRALQKIQELEGQLDKLKKEKQQRQFQLDSLEAAPQKQTQKVENEKTEGTNLKRENQRLMEICESLEKTKQKISHELQVKESQVNFQEGQLNSGKKQIEKLEQELKRCKSELERSQQAAQSADVSLNPCNTPQKIFTTPLTPSQYYSGSKYEDLKEKYNKEVEERKRLEAEVKALQAKKASQTLPQATMNHRDIARHQASSSVFSWQQEKTPSHLSSNSQRTPIRRDFSASYFSGEQEVTPSRSTLQIGKRDANSSFFDNSSSPHLLDQLKAQNQELRNKINELELRLQGHEKEMKGQVNKFQELQLQLEKAKVELIEKEKVLNKCRDELVRTTAQYDQASTKYTALEQKLKKLTEDLSCQRQNAESARCSLEQKIKEKEKEFQEELSRQQRSFQTLDQECIQMKARLTQELQQAKNMHNVLQAELDKLTSVKQQLENNLEEFKQKLCRAEQAFQASQIKENELRRSMEEMKKENNLLKSHSEQKAREVCHLEAELKNIKQCLNQSQNFAEEMKAKNTSQETMLRDLQEKINQQENSLTLEKLKLAVADLEKQRDCSQDLLKKREHHIEQLNDKLSKTEKESKALLSALELKKKEYELKEEKTLFSCWKSENEKLLTQMESEKENLQSKINHLETCLKTQQIKSHEYNERVRTLEMDRENLSVEIRNLHNVLDSKSVEVETQKLAYMELQQKAEFSDQKHQKEIENMCLKTSQLTGQVEDLEHKLQLLSNEIMDKDRCYQDLHAEYESLRDLLKSKDASLVTNEDHQRSLLAFDQQPAMHHSFANIIGEQGSMPSERSECRLEADQSPKNSAILQNRVDSLEFSLESQKQMNSDLQKQCEELVQIKGEIEENLMKAEQMHQSFVAETSQRISKLQEDTSAHQNVVAETLSALENKEKELQLLNDKVETEQAEIQELKKSNHLLEDSLKELQLLSETLSLEKKEMSSIISLNKREIEELTQENGTLKEINASLNQEKMNLIQKSESFANYIDEREKSISELSDQYKQEKLILLQRCEETGNAYEDLSQKYKAAQEKNSKLECLLNECTSLCENRKNELEQLKEAFAKEHQEFLTKLAFAEERNQNLMLELETVQQALRSEMTDNQNNSKSEAGGLKQEIMTLKEEQNKMQKEVNDLLQENEQLMKVMKTKHECQNLESEPIRNSVKERESERNQCNFKPQMDLEVKEISLDSYNAQLVQLEAMLRNKELKLQESEKEKECLQHELQTIRGDLETSNLQDMQSQEISGLKDCEIDAEEKYISGPHELSTSQNDNAHLQCSLQTTMNKLNELEKICEILQAEKYELVTELNDSRSECITATRKMAEEVGKLLNEVKILNDDSGLLHGELVEDIPGGEFGEQPNEQHPVSLAPLDESNSYEHLTLSDKEVQMHFAELQEKFLSLQSEHKILHDQHCQMSSKMSELQTYVDSLKAENLVLSTNLRNFQGDLVKEMQLGLEEGLVPSLSSSCVPDSSSLSSLGDSSFYRALLEQTGDMSLLSNLEGAVSANQCSVDEVFCSSLQEENLTRKETPSAPAKGVEELESLCEVYRQSLEKLEEKMESQGIMKNKEIQELEQLLSSERQELDCLRKQYLSENEQWQQKLTSVTLEMESKLAAEKKQTEQLSLELEVARLQLQGLDLSSRSLLGIDTEDAIQGRNESCDISKEHTSETTERTPKHDVHQICDKDAQQDLNLDIEKITETGALKPTGECSGEQSPDTNYEPPGEDKTQGSSECISELSFSGPNALVPMDFLGNQEDIHNLQLRVKETSNENLRLLHVIEDRDRKVESLLNEMKELDSKLHLQEVQLMTKIEACIELEKIVGELKKENSDLSEKLEYFSCDHQELLQRVETSEGLNSDLEMHADKSSREDIGDNVAKVNDSWKERFLDVENELSRIRSEKASIEHEALYLEADLEVVQTEKLCLEKDNENKQKVIVCLEEELSVVTSERNQLRGELDTMSKKTTALDQLSEKMKEKTQELESHQSECLHC

SEQ ID NO: 1683 - DNA, 3213 bp, Homo sapien
gaccgaagcaagagctggttcaggtggcagccacagcagcctcagggacctcagcaactatggcctcctgcccagactctgataatagctgggtgcttgctggctccgagagcctgccagtggagacactgggcccggcatccaggatggacccagaatctgagagagccctgcaggcccctcacagcccctccaagacagatgggaaagaattagctgggaccatggatggagaagggacgctcttccagactgaaagccctcagtctggcagcattctaacagaggagactgaggtcaagggcaccctggaaggtgatgtttgtggtgtggagcctcctggcccaggagacacagtagtccagggagacctgcaggagaccaccgtggtgacaggcctgggaccagacacacaggacctggaaggccagagccctccacagagcctgccttcaacccccaaagcagcttggatcagggaggagggccgctgctccagcagtgacgatgacaccgacgtggacatggagggtctgcggagacggcggggccgggaggccggcccacctcagcccatggtgcccctggctgtggagaaccaggctgggggtgagggtgcaggcggggagctgggcatctccctcaacatgtgcctccttggggccctggttctgcttggcctgggggtcctcctcttctcaggtggcctctcagagtctgagactgggcccatggaggaagtggagcggcaggtcctcccagaccccgaggtgctggaagctgtgggggacaggcaggatgggctaagggaacagctgcaggccccagtgcctcctgacagtgtccccagcctgcaaaacatgggtcttctgctggacaagctggccaaggagaaccaggacatccggctgctgcaggcccagctgcaggcccaaaaggaagagcttcagagcctgatgcaccagcccaaagggctagaggaggagaatgcccagctccggggggctctgcagcagggcgaagccttccagcgggctctggagtcagagctgcagcagctgcgggcccggctccaggggctggaggccgactgtgtccggggcccagatggggtgtgcctcagtgggggtagaggcccacagggtgacaaggccatcagggagcaaggccccagggagcaggagccagaactcagcttcctgaagcagaaggaacagctggaggctgaggcacaggcattaaggcaagagttagagaggcagcgacggctgctggggtctgtacagcaggatctggagaggagcttgcaggatgccagccgcggggacccagctcatgctggcttggctgagctgggccacagattggcccagaaactgcagggcctggagaactggggccaggaccctggggtctctgccaatgcctcaaaggcctggcaccagaagtcccacttccagaattctagggagtggagtggaaaggaaaagtggtgggatgggcagagagaccggaaggctgagcactggaaacataagaaggaagaatctggccgggaaaggaagaagaactggggaggtcaggaggacagggagccagcaggaaggtggaaggagggcaggccaagggtggaggagtcggggagcaagaaggagggcaagcgacagggcccgaaggaacccccaaggaaaagtggtagcttccactcctctggagaaaagcagaagcaacctcggtggagggaagggactaaggacagccatgaccccctgccatcctgggcagagctgttgaggcccaagtaccgggcaccccagggctgctcaggtgtggacgagtgtgcccggcaggagggcctgactttctttggcacagagctagccccagtgcggcaacaggagctggcctctctgctaagaacatacttggcacggctgccctgggctgggcagctgaccaaggagctacccctctcacctgctttctttggtgaggatggcatcttccgtcatgaccgcctccgcttccgggattttgtggatgccctggaggacagcttggaggaggtggctgtgcaacagacaggtgatgatgatgaagtagatgactttgaggacttcatcttcagccacttctttggagacaaagcactgaagaagaggtcagggaagaaggacaagcactcacagagcccaagagctgcggggcccagggaggggcacagccatagccaccaccaccaccaccggggctgacaccctgccccacagggaatggccttggcctggcccagcccaagatcccagcgttatctaactcctggagggtggactctgtcctggcttgtttggtgtcctcagatatctttcacacagtagagcaaaatcaccagccctgcactgatgtcactttatgtagaaaaaggccttagctggacctgcgttgccgtctatgcaaatgcatgcaaatactccaggccctgggatgtgggcttgtgttttgtcactgtgaagggggagatgggagaggagcctgttttggggtggggtctggggaaggcaatctgattctgaagctaaagagctttcatcctcttgagtgtatgtccccatagtgggccccttgacccacatgctgaccggtgccttgggatttgactagagttgctggctcgaggcccagcacgaggacttaccctggggttttgttaggtttggaagcagctgtccctagggggtgaagtcccccccctttttttttttacccctgcttctcccacggcttcacctccctatgtgaactgtagactcagatcccaataaagtgctgttgcagctatgatgctaggtggtttctaagcacaggggacaccccacaccccctgcctgaatggatgggtccatcccaggcactggtacttgcccccttgttctgtatccccctttgcccttgccttgcccttccaacaaaccctaggcccttgagaagctgatacttctccttttgctcacagctgccttggccccacccctgggagatgtagcaaattgagtgtgggttttggagtctgagcctcaggctcaaatccaggccaagtgatcttgggcaagttaatctctgggaactttgggtttcttatcctcaaaaaaggcgatggaagggctggggaagtgattaaataaaagcaacgcaagaaaaaaaaaaaaaaaaaaa

SEQ ID NO: 1684 - protein, 731 aa, Homo sapien
MASCPDSDNSWVLAGSESLPVETLGPASRMDPESERALQAPHSPSKTDGKELAGTMDGEGTLFQTESPQSGSILTEETEVKGTLEGDVCGVEPPGPGDTVVQGDLQETTVVTGLGPDTQDLEGQSPPQSLPSTPKAAWIREEGRCSSSDDDTDVDMEGLRRRRGREAGPPQPMVPLAVENQAGGEGAGGELGISLNMCLLGALVLLGLGVLLFSGGLSESETGPMEEVERQVLPDPEVLEAVGDRQDGLREQLQAPVPPDSVPSLQNMGLLLDKLAKENQDIRLLQAQLQAQKEELQSLMHQPKGLEEENAQLRGALQQGEAFQRALESELQQLRARLQGLEADCVRGPDGVCLSGGRGPQGDKAIREQGPREQEPELSFLKQKEQLEAEAQALRQELERQRRLLGSVQQDLERSLQDASRGDPAHAGLAELGHRLAQKLQGLENWGQDPGVSANASKAWHQKSHFQNSREWSGKEKWWDGQRDRKAEHWKHKKEESGRERKKNWGGQEDREPAGRWKEGRPRVEESGSKKEGKRQGPKEPPRKSGSFHSSGEKQKQPRWREGTKDSHDPLPSWAELLRPKYRAPQGCSGVDECARQEGLTFFGTELAPVRQQELASLLRTYLARLPWAGQLTKELPLSPAFFGEDGIFRHDRLRFRDFVDALEDSLEEVAVQQTGDDDEVDDFEDFIFSHFFGDKALKKRSGKKDKHSQSPRAAGPREGHSHSHHHHHRG

SEQ ID NO: 1685 - DNA, 1425 bp, Homo sapien
cagtctgagaacaagaaagaagaacttctgtctcgagggtctcactgtcaaccaggccagagtgcagtgaagatcatacctcactacatccgtgaactcccgggctcctcccacctaagtctcttgagtagctgggacttcaggagactgaagccaaggataccagcagagccaacatttgcttcaagttcctgggcctgctgacagcgtgcaggatgctgttggaacccggcagaggctgctgtgccctggccatcctgctggcaattgtggacatccagtctggtggatgcattaacatcaccagctcagcttcccaggaaggaacgcgactaaacttaatctgtactgtatggcataagaaagaagaggctgaggggtttgtagtgtttttgtgcaaggacaggtctggagactgttctcctgagaccagtttaaaacagctgagacttaaaagggatcctgggatagatggtgttggtgaaatatcatctcagttgatgttcaccataagccaagtcacaccgttgcacagtgggacctaccagtgttgtgccagaagccagaagtcaggtatccgccttcagggccattttttctccattctattcacagagacagggaactacacagtgacgggattgaaacaaagacaacaccttgagttcagccataatgaaggcactctcagttcaggcttcctacaagaaaaggtctgggtaatgctggtcaccagccttgtggcccttcaagctttgtaagcctgtccaaaagaacttttaaaacagctacagcaagatgagtctgactatggcttagtatctttctcattacaataggcacagagaagaatgcaacagggcacaggggaagagatgctaaatataccaagaatctgtggaaatataagctggggcaaatcagtgtaatccttgactttgctcctcaccatcagggcaaacttgccttcttccctcctaagctccagtaaataaacagaacagctttcaccaaagtgggtagtatagtcctcaaatatcggataaatatatgcgtttttgtaccccagaaaaacttttcctccctcttcatcaacatagtaaaataagtcaaacaaaatgagaacaccaaattttgggggaataaatttttatttaacactgcaaaggaaagagagagaaaacaagcaaagataggtaggacagaaaggaagacagccagatccagtgattgacttggcatgaaaatgagaaaatgcagacagacctcaacattcaacattcaacaacatccatacagcactgctggaggaagaggaagatttgtgcagaccaagagcaccacagactacaactgcccagcttcatctaaatacttgttaacctctttggtcatttctctttttaaataaatgcccatagcagt

SEQ ID NO: 1686 - protein, 181 aa, Homo sapien
MLLEPGRGCCALAILLAIVDIQSGGCINITSSASQEGTRLNLICTVWHKKEEAEGFVVFLCKDRSGDCSPETSLKQLRLKRDPGIDGVGEISSQLMFTISQVTPLHSGTYQCCARSQKSGIRLQGHFFSILFTETGNYTVTGLKQRQHLEFSHNEGTLSSGFLQEKVWVMLVTSLVALQAL

SEQ ID NO: 1687 - DNA, 1282 bp, Homo sapien
aagccacccagcctatgcatccgctcctcaatcctctcctgttggcactgggcctcatggcgcttttgttgaccacggtcattgctctcacttgccttggcggctttgcctccccaggccctgtgcctccctctacagccctcagggagctcattgaggagctggtcaacatcacccagaaccagaaggctccgctctgcaatggcagcatggtatggagcatcaacctgacagctggcatgtactgtgcagccctggaatccctgatcaacgtgtcaggctgcagtgccatcgagaagacccagaggatgctgagcggattctgcccgcacaaggtctcagctgggcagttttccagcttgcatgtccgagacaccaaaatcgaggtggcccagtttgtaaaggacctgctcttacatttaaagaaactttttcgcgagggacagttcaactgaaacttcgaaagcatcattatttgcagagacaggacctgactattgaagttgcagattcatttttctttctgatgtcaaaaatgtcttgggtaggcgggaaggagggttagggaggggtaaaattccttagcttagacctcagcctgtgctgcccgtcttcagcctagccgacctcagccttccccttgcccagggctcagcctggtgggcctcctctgtccagggccctgagctcggtggacccagggatgacatgtccctacacccctcccctgccctagagcacactgtagcattacagtgggtgccccccttgccagacatgtggtgggacagggacccacttcacacacaggcaactgaggcagacagcagctcaggcacacttcttcttggtcttatttattattgtgtgttatttaaatgagtgtgtttgtcaccgttggggattggggaagactgtggctgctagcacttggagccaagggttcagagactcagggccccagcactaaagcagtggacaccaggagtccctggtaataagtactgtgtacagaattctgctacctcactggggtcctggggcctcggagcctcatccgaggcagggtcaggagaggggcagaacagccgctcctgtctgccagccagcagccagctctcagccaacgagtaatttattgtttttccttgtatttaaatattaaatatgttagcaaagagttaatatatagaagggtaccttgaacactgggggaggggacattgaacaagttgtttcattgactatcaaactgaagccagaaataaagttggtgacagat

SEQ ID NO: 1688 - protein, 146 aa, Homo sapien
MHPLLNPLLLALGLMALLLTTVIALTCLGGFASPGPVPPSTALRELIEELVNITQNQKAPLCNGSMVWSINLTAGMYCAALESLINVSGCSAIEKTQRMLSGFCPHKVSAGQFSSLHVRDTKIEVAQFVKDLLLHLKKLFREGQFN

SEQ ID NO: 1689 - DNA, 825 bp, Homo sapien
atcactctctttaatcactactcacattaacctcaactcctgccacaatgtacaggatgcaactcctgtcttgcattgcactaattcttgcacttgtcacaaacagtgcacctacttcaagttcgacaaagaaaacaaagaaaacacagctacaactggagcatttactgctggatttacagatgattttgaatggaattaataattacaagaatcccaaactcaccaggatgctcacatttaagttttacatgcccaagaaggccacagaactgaaacagcttcagtgtctagaagaagaactcaaacctctggaggaagtgctgaatttagctcaaagcaaaaactttcacttaagacccagggacttaatcagcaatatcaacgtaatagttctggaactaaagggatctgaaacaacattcatgtgtgaatatgcagatgagacagcaaccattgtagaatttctgaacagatggattaccttttgtcaaagcatcatctcaacactaacttgataattaagtgcttcccacttaaaacatatcaggccttctatttatttatttaaatatttaaattttatatttattgttgaatgtatggttgctacctattgtaactattattcttaatcttaaaactataaatatggatcttttatgattctttttgtaagccctaggggctctaaaatggtttaccttatttatcccaaaaatatttattattatgttgaatgttaaatatagtatctatgtagattggttagtaaaactatttaataaatttgataaatataaaaaaaaaaaacaaaaaaaaaaa

SEQ ID NO: 1690 - protein, 156 aa, Homo sapien
MYRMQLLSCIALILALVTNSAPTSSSTKKTKKTQLQLEHLLLDLQMILNGINNYKNPKLTRMLTFKFYMPKKATELKQLQCLEEELKPLEEVLNLAQSKNFHLRPRDLISNINVIVLELKGSETTFMCEYADETATIVEFLNRWITFCQSIISTLT

SEQ ID NO: 1691 - DNA, 2918 bp, Homo sapien
caggacagagcatggatcgcctacagactgcactcctggttgtcctcgtcctccttgctgtggcgcttcaagcaactgaggcaggcccctacggcgccaacatggaagacagcgtctgctgccgtgattacgtccgttaccgtctgcccctgcgcgtggtgaaacacttctactggacctcagactcctgcccgaggcctggcgtggtgttgctaaccttcagggataaggagatctgtgccgatcccagagtgccctgggtgaagatgattctcaataagctgagccaatgaagagcctactctgatgaccgtggccttggctcctccaggaaggctcaggagccctacctccctgccattatagctgctccccgccagaagcctgtgccaactctctgcattccctgatctccatccctgtggctgtcacccttggtcacctccgtgctgtcactgccatctcccccctgacccctctaacccatcctctgcctccctccctgcagtcagagggtcctgttcccatcagcgattcccctgcttaaacccttccatgactccccactgccctaagctgaggtcagtctcccaagcctggcatgtggccctctggatctgggttccatctctgtctccagcctgcccacttcccttcatgaatgttgggttctagctccctgttctccaaacccatactacacatcccacttctgggtctttgcctgggatgttgctgacacccagaaagtcccaccacctgcacatgtgtagccccaccagccctccaaggcattgctcgcccaagcagctggtaattccatttcatgtattagatgtcccctggccctctgtcccctcttaataaccctagtcacagtctccgcagattcttgggatttgggggttttctcccccacctctccactagttggaccaaggtttctagctaagttactctagtctccaagcctctagcatagagcactgcagacaggccctggctcagaatcagagcccagaaagtggctgcagacaaaatcaataaaactaatgtccctcccctctccctgccaaaaggcagttacatatcaatacagagactcaaggtcactagaaatgggccagctgggtcaatgtgaagccccaaatttgcccagattcacctttcttcccccactccctttttttttttttttttgagatggagtttcgctcttgtcacccacgctggagtgcaatggtgtggtcttggcttattgaagcctctgcctcctgggttcaagtgattctcttgcctcagcctcctgagtagctgggattacaggttcctgctaccacgcccagctaatttttgtatttttagtagagacgaggcttcaccatgttggccaggctggtctcgaactcctgtcctcaggtaatccgcccacctcagcctcccaaagtgctgggattacaggcgtgagccacagtgcctggcctcttccctctccccaccccccccccaacttttttttttttttatggcagggtctcactctgtcgcccaggctggagtgcagtggcgtgatctcggctcactacaacctcgacctcctgggttcaagcgattctcccaccccagcctcccaagtagctgggattacaggtgtgtgccactacggctggctaatttttgtatttttagtagagacaggtttcaccatattggccaggctggtcttgaactcctgacctcaagtgatccaccttccttgtgctcccaaagtgctgagattacaggcgtgagctatcacacccagcctccccctttttttcctaataggagactcctgtacctttcttcgttttacctatgtgtcgtgtctgcttacatttccttctcccctcaggctttttttgggtggtcctccaacctccaatacccaggcctggcctcttcagagtaccccccattccactttccctgcctccttccttaaatagctgacaatcaaattcatgctatggtgtgaaagactacctttgacttggtattataagctggagttatatatgtatttgaaaacagagtaaatacttaagaggccaaatagatgaatggaagaattttaggaactgtgagagggggacaaggtggagctttcctggccctgggaggaagctggctgtggtagcgtagcgctctctctctctgtctgtggcaggaggcaaagagtagggtgtaattgagtgaaggaatcctgggtagagaccattctcaggtggttgggccaggctaaagactgggatttgggtctatctatgcctttctggctgatttttgtagagacggggttttgccatgttacccaggctggtctcaaactcctgggctcaagcgatcctcctggctcagcctcccaaagtgctgggattacaggcgtgagtcactgcgcctggcttcctcttcctcttgagaaatattcttttcatacagcaagtatgggacagcagtgtcccaggtaaaggacataaatgttacaagtgtctggtcctttctgagggaggctggtgccgctctgcagggtatttgaacctgtggaattggaggaggccatttcactccctgaacccagcctgacaaatcacagtgagaatgttcaccttataggcttgctgtggggctcaggttgaaagtgtggggagtgacactgcctaggcatccagctcagtgtcatccagggcctgtgtccctcccgaacccagggtcaacctgcctaccacaggcactagaaggacgaatctgcctactgcccatgaacggggccctcaagcgtcctgggatctccttctccctcctgtcctgtccttgcccctcaggactgctggaaaataaatcctttaaaatagaaaaaaaaaaaaaaaaaaaaaaaa

SEQ ID NO: 1692 - protein, 93 aa, Homo sapien
MDRLQTALLVVLVLLAVALQATEAGPYGANMEDSVCCRDYVRYRLPLRVVKHFYWTSDSCPRPGVVLLTFRDKEICADPRVPWVKMILNKLSQ

SEQ ID NO: 1693 - DNA, 1816 bp, Homo sapien
cttctctgccagaagataccatttcaactttaacacagcatgatcgaaacatacaaccaaacttctccccgatctgcggccactggactgcccatcagcatgaaaatttttatgtatttacttactgtttttcttatcacccagatgattgggtcagcactttttgctgtgtatcttcatagaaggttggacaagatagaagatgaaaggaatcttcatgaagattttgtattcatgaaaacgatacagagatgcaacacaggagaaagatccttatccttactgaactgtgaggagattaaaagccagtttgaaggctttgtgaaggatataatgttaaacaaagaggagacgaagaaagaaaacagctttgaaatgcaaaaaggtgatcagaatcctcaaattgcggcacatgtcataagtgaggccagcagtaaaacaacatctgtgttacagtgggctgaaaaaggatactacaccatgagcaacaacttggtaaccctggaaaatgggaaacagctgaccgttaaaagacaaggactctattatatctatgcccaagtcaccttctgttccaatcgggaagcttcgagtcaagctccatttatagccagcctctgcctaaagtcccccggtagattcgagagaatcttactcagagctgcaaatacccacagttccgccaaaccttgcgggcaacaatccattcacttgggaggagtatttgaattgcaaccaggtgcttcggtgtttgtcaatgtgactgatccaagccaagtgagccatggcactggcttcacgtcctttggcttactcaaactctgaacagtgtcaccttgcaggctgtggtggagctgacgctgggagtcttcataatacagcacagcggttaagcccaccccctgttaactgcctatttataaccctaggatcctccttatggagaactatttattatacactccaaggcatgtagaactgtaataagtgaattacaggtcacatgaaaccaaaacgggccctgctccataagagcttatatatctgaagcagcaaccccactgatgcagacatccagagagtcctatgaaaagacaaggccattatgcacaggttgaattctgagtaaacagcagataacttgccaagttcagttttgtttctttgcgtgcagtgtctttccatggataatgcatttgatttatcagtgaagatgcagaagggaaatggggagcctcagctcacattcagttatggttgactctgggttcctatggccttgttggagggggccaggctctagaacgtctaacacagtggagaaccgaaacccccccccccccccccgccaccctctcggacagttattcattctctttcaatctctctctctccatctctctctttcagtctctctctctcaacctctttcttccaatctctctttctcaatctctctgtttccctttgtcagtctcttccctcccccagtctctcttctcaatccccctttctaacacacacacacacacacacacacacacacacacacacacacacacacacacacacacacacacagagtcaggccgttgctagtcagttctcttctttccaccctgtccctatctctaccactatagatgagggtgaggagtagggagtgcagccctgagcctgcccactcctcattacgaaatgactgtatttaaaggaaatctattgtatctacctgcagtctccattgtttccagagtgaacttgtaattatcttgttatttattttttgaataataaagacctcttaacattaaaa

SEQ ID NO: 1694 - protein, 261 aa, Homo sapien
MIETYNQTSPRSAATGLPISMKIFMYLLTVFLITQMIGSALFAVYLHRRLDKIEDERNLHEDFVFMKTIQRCNTGERSLSLLNCEEIKSQFEGFVKDIMLNKEETKKENSFEMQKGDQNPQIAAHVISEASSKTTSVLQWAEKGYYTMSNNLVTLENGKQLTVKRQGLYYIYAQVTFCSNREASSQAPFIASLCLKSPGRFERILLRAANTHSSAKPCGQQSIHLGGVFELQPGASVFVNVTDPSQVSHGTGFTSFGLLKL

SEQ ID NO: 1695 - DNA, 615 bp, Homo sapien
gctcagagagaagtgactttgagctcacagtgtcaccgcctgctgatgggagagctgaattcaaaaccagggtgtctccctgagcagagggacctgcacacagagactccctcctgggctcctggcaccatggccccactgaagatgctggccctggtcaccctcctcctgggggcttctctgcagcacatccacgcagctcgagggaccaatgtgggccgggagtgctgcctggagtacttcaagggagccattccccttagaaagctgaagacgtggtaccagacatctgaggactgctccagggatgccatcgtttttgtaactgtgcagggcagggccatctgttcggaccccaacaacaagagagtgaagaatgcagttaaatacctgcaaagccttgagaggtcttgaagcctcctcaccccagactcctgactgtctcccgggactacctgggacctccaccgttggtgttcaccgcccccaccctgagcgcctgggtccaggggaggccttccagggacgaagaagagccacagtgagggagatcccatccccttgtctgaactggagccatgggcacaaagggcccagattaaagtctttatcctc

SEQ ID NO: 1696 - protein, 94 aa, Homo sapien
MAPLKMLALVTLLLGASLQHIHAARGTNVGRECCLEYFKGAIPLRKLKTWYQTSEDCSRDAIVFVTVQGRAICSDPNNKRVKNAVKYLQSLERS

SEQ ID NO: 1697 - DNA, 3642 bp, Homo sapien
ctcagctctcggagtaggaagctcgggcgctccggctgtaaggagccgcggcagggggaaaatggagcccttcaccaatgatcggcttcagctccccaggaatatgattgaaaacagcatgtttgaggaagaaccagatgtggtggatttagccaaagagccttgtttacatcctctagagcctgatgaggtggaatatgagccccggggttcccgactgctggtgcggggtcttggtgagcatgagatggaggaggatgaagaggattatgagtcatcagcaaagctgctgggcatgtccttcatgaatagaagctcaggccttcggaacagtgcaactggttacaggcagagcccagatggggcttgttcagtaccctctgcaaggaccatggtggtctgtgcttttgtcatcgtggttgctgtttctgtaatcatggtgatttacttactgcccagatgtacctttaccaaagaaggctgccataaaaaaaaccagtcaattggactaattcagccatttgcaacaaatgggaaattgtttccatgggcacagatcaggcttcccactgccgttgtgccactacgctatgaactcagcctacacccgaacctaacctcgatgacattcaggggttctgtgacaatttcagttcaggctcttcaggtcacatggaatatcattcttcatagcacaggtcataatatttcaagagtgacctttatgtcagcagtttcaagccaagaaaaacaagctgagatcctggaatatgcatatcatggacagatcgccattgttgcccccgaagcccttctagcagggcacaattatacgttgaagatagagtactcggcaaatatatctagttcttattatgggttttatggcttctcctacacagatgaaagtaatgagaaaaagtactttgcagcaactcagtttgaacccctggcagcaagatctgcttttccttgttttgatgaaccagcatttaaagccacttttatcatcaagatcataagggatgagcaatacaccgctttatcaaatatgcctaagaagtcatcagtcgttctagatgatggacttgttcaggatgagttttctgagagtgtgaagatgagcacttacttggttgctttcattgtgggagagatgaagaacctgagtcaggacgtaaatggaaccctggtttctatatatgctgtaccagaaaatattggtcaagttcattatgccttggaaacaactgtgaagcttcttgagttttttcaaaactactttgaaattcagtacccacttaagaaattggatttggtggctattcctgactttgaagcaggagcaatggaaaattggggtttgctcaccttccgagaggagacacttctgtatgacagtaacacttcttcaatggcggatagaaagctggtgactaaaatcattgctcatgagctggcccaccagtggtttggcaatctggtaacaatgaagtggtggaatgacctatggctaaatgaaggttttgccactttcatggagtatttctctttggaaaaaatattcaaagagctttctagttatgaagatttcttagatgctcgatttaaaaccatgaagaaagattccttaaattcatctcatccaatatcatcatctgttcagtcttcagaacaaattgaagaaatgtttgattctctttcctattttaagggatcttctctcttgttgatgttgaaaacttaccttagtgaagatgtgtttcaacatgctgttgtcctttacctgcataatcacagctatgcatctattcaaagtgatgatctgtgggatagttttaatgaggtcacaaaccaaacactagatgtaaagagaatgatgaaaacctggaccctgcagaaaggatttcctttagtgactgttcaaaagaaaggaaaggaactttttatacaacaagagagattctttttaaatatgaagcctgaaattcagccttcagatacaagctacctgtggcatattccactatcctatgtcactgaaggaagaaattattcaaaatatcaatcggtatcattactggataagaaatcaggtgtcatcaatcttacagaagaagtgctgtgggtcaaagtgaatataaacatgaatggttattatattgtacactatgcagatgatgattgggaagcactaatccatcagttgaaaataaatccttatgttctgagtgacaaagaccgagccaaccttatcaacaacatctttgaacttgcaggcctaggcaaggtacctctcaagagggcctttgatttgattaattatcttggaaatgagaaccatactgcacccatcaccgaagccctgtttcagacagacctcatctataacctccttgaaaaactgggatacatggatctggcctcaagactggtgactagggtatttaaattacttcaaaaccaaattcaacaacaaacttggactgatgagggcactccatctatgcgagagcttcggtcagccctgctagagtttgcttgcacccacaacctggggaactgctctactactgccatgaaactgtttgatgactggatggcatccaatggaactcaaagcctacctactgatgtcatgacaactgtgttcaaagttggagcaaaaactgacaaaggctggtcattccttttgggcaaatacatttctataggctctgaagcagagaagaacaaaatactagaagcacttgccagctcagaggatgtgcggaagctttactggttaatgaaaagtagcctgaatggagataacttccgaacacagaagctgtcttttatcattagaacagtgggtcgacattttcctggacacttactggcatgggattttgtcaaagagaactggaataagcttgtacagaagttccctctggggtcctataccatacaaaatattgttgctggatcaacttacctgttttcaacaaagacacatttatctgaggttcaggcattctttgaaaatcagtcagaggcaaccttccggcttcgttgtgtccaggaggctttggaagtcattcagttgaatatccagtggatggagaagaacctcaaaagtctcacatggtggctgtagcatgcacaaccgcacctcattttgttgcccattcagagagcttgtaagcttgggctctgccgcttttgcaaaagccaaggtaaagccaggatcgctgccaagttgtttgcactctttggagttctagttagctcagggcctgactgtatttttcatccatcttttctgaagtgtctttgggcagtatgtagttatttattacaaaattatattcacgtaaatgccaaccatctacaaaaacaatgagtaatttttctactttgaagatacacagatggggacaaaaaccctgttttggaattctgttctattcctcagtatccagaaagttactgacacagtaaaacaaggaaagttctaccctaagagccgccatcacttcaggccgctggtttgtcagccatctgctgcttcttattgatagatggcattggaatgtggtacaaagttagctctgaagaatatggtaacgaagacaataaagcatgcactgtaagaactga

SEQ ID NO: 1698 - protein, 1025 aa, Homo sapien
MEPFTNDRLQLPRNMIENSMFEEEPDVVDLAKEPCLHPLEPDEVEYEPRGSRLLVRGLGEHEMEEDEEDYESSAKLLGMSFMNRSSGLRNSATGYRQSPDGACSVPSARTMVVCAFVIVVAVSVIMVIYLLPRCTFTKEGCHKKNQSIGLIQPFATNGKLFPWAQIRLPTAVVPLRYELSLHPNLTSMTFRGSVTISVQALQVTWNIILHSTGHNISRVTFMSAVSSQEKQAEILEYAYHGQIAIVAPEALLAGHNYTLKIEYSANISSSYYGFYGFSYTDESNEKKYFAATQFEPLAARSAFPCFDEPAFKATFIIKIIRDEQYTALSNMPKKSSVVLDDGLVQDEFSESVKMSTYLVAFIVGEMKNLSQDVNGTLVSIYAVPENIGQVHYALETTVKLLEFFQNYFEIQYPLKKLDLVAIPDFEAGAMENWGLLTFREETLLYDSNTSSMADRKLVTKIIAHELAHQWFGNLVTMKWWNDLWLNEGFATFMEYFSLEKIFKELSSYEDFLDARFKTMKKDSLNSSHPISSSVQSSEQIEEMFDSLSYFKGSSLLLMLKTYLSEDVFQHAVVLYLHNHSYASIQSDDLWDSFNEVTNQTLDVKRMMKTWTLQKGFPLVTVQKKGKELFIQQERFFLNMKPEIQPSDTSYLWHIPLSYVTEGRNYSKYQSVSLLDKKSGVINLTEEVLWVKVNINMNGYYIVHYADDDWEALIHQLKINPYVLSDKDRANLINNIFELAGLGKVPLKRAFDLINYLGNENHTAPITEALFQTDLIYNLLEKLGYMDLASRLVTRVFKLLQNQIQQQTWTDEGTPSMRELRSALLEFACTHNLGNCSTTAMKLFDDWMASNGTQSLPTDVMTTVFKVGAKTDKGWSFLLGKYISIGSEAEKNKILEALASSEDVRKLYWLMKSSLNGDNFRTQKLSFIIRTVGRHFPGHLLAWDFVKENWNKLVQKFPLGSYTIQNIVAGSTYLFSTKTHLSEVQAFFENQSEATFRLRCVQEALEVIQLNIQWMEKNLKSLTWWL

SEQ ID NO: 1699 - DNA, 924 bp, Homo sapien
cagagccccacgaaggaccagaacaagacagagtgcctcctgccgatccaaacatgagccgcctgcccgtcctgctcctgctccaactcctggtccgccccggactccaagctcccatgacccagacaacgcccttgaagacaagctgggttaactgctctaacatgatcgatgaaattataacacacttaaagcagccacctttgcctttgctggacttcaacaacctcaatggggaagaccaagacattctgatggaaaataaccttcgaaggccaaacctggaggcattcaacagggctgtcaagagtttacagaacgcatcagcaattgagagcattcttaaaaatctcctgccatgtctgcccctggccacggccgcacccacgcgacatccaatccatatcaaggacggtgactggaatgaattccggaggaaactgacgttctatctgaaaacccttgagaatgcgcaggctcaacagacgactttgagcctcgcgatcttttgagtccaacgtccagctcgttctctgggccttctcaccacagagcctcgggacatcaaaaacagcagaacttctgaaacctctgggtcatctctcacacattccaggaccagaagcatttcaccttttcctgcggcatcagatgaattgttaattatctaatttctgaaatgtgcagctcccatttggccttgtgcggttgtgttctcatttttatcccattgagactatttatttatgtatgtatgtatttatttatttattgcctggagtgtgaactgtatttattttagcagaggagccatgtcctgctgcttctgcaaaaaactcagagtggggtggggagcatgttcatttgtacctcgagttttaaactggttcctagggatgtgtgagaataaactagactctgaac

SEQ ID NO: 1700 - protein, 152 aa, Homo sapien
MSRLPVLLLLQLLVRPGLQAPMTQTTPLKTSWVNCSNMIDEIITHLKQPPLPLLDFNNLNGEDQDILMENNLRRPNLEAFNRAVKSLQNASAIESILKNLLPCLPLATAAPTRHPIHIKDGDWNEFRRKLTFYLKTLENAQAQQTTLSLAIF

SEQ ID NO: 1701 - DNA, 816 bp, Homo sapien
atgcactttctttgccaaaggcaaacgcagaacgtttcagagccatgaggatgcttctgcatttgagtttgctagctcttggagctgcctacgtgtatgccatccccacagaaattcccacaagtgcattggtgaaagagaccttggcactgctttctactcatcgaactctgctgatagccaatgagactctgaggattcctgttcctgtacataaaaatcaccaactgtgcactgaagaaatctttcagggaataggcacactggagagtcaaactgtgcaagggggtactgtggaaagactattcaaaaacttgtccttaataaagaaatacattgacggccaaaaaaaaaagtgtggagaagaaagacggagagtaaaccaattcctagactacctgcaagagtttcttggtgtaatgaacaccgagtggataatagaaagttgagactaaactggtttgttgcagccaaagattttggaggagaaggacattttactgcagtgagaatgagggccaagaaagagtcaggccttaattttcagtataatttaacttcagagggaaagtaaatatttcaggcatactgacactttgccagaaagcataaaattcttaaaatatatttcagatatcagaatcattgaagtattttcctccaggcaaaattgatatacttttttcttatttaacttaacattctgtaaaatgtctgttaacttaatagtatttatgaaatggttaagaatttggtaaattagtatttatttaatgttatgttgtgttctaataaaacaaaaatagacaactgttc

SEQ ID NO: 1702 - protein, 134 aa, Homo sapien
MRMLLHLSLLALGAAYVYAIPTEIPTSALVKETLALLSTHRTLLIANETLRIPVPVHKNHQLCTEEIFQGIGTLESQTVQGGTVERLFKNLSLIKKYIDGQKKKCGEERRRVNQFLDYLQEFLGVMNTEWIIES

SEQ ID NO: 1703 - DNA, 2574 bp, Homo sapien
cagagccggcgcaggggaagcgcccggggccccgggtgcagcagcgcccgccgcctcccgggcctccccggcccgcagcccggggtcccgggccccggggccggcacctctcgggctccggctccccgcgcgcaagatggctgacccggctgcggggccgccgccgagcgagggcgaggagagcaccgtgcgcttcgcccgcaaaggcgccctccggcagaagaacgtgcatgaggtcaagaaccacaaattcaccgcccgcttcttcaagcagcccaccttctgcagccactgcaccgacttcatctggggcttcgggaagcagggattccagtgccaagtttgctgctttgtggtgcacaagcggtgccatgaatttgtcacattctcctgccctggcgctgacaagggtccagcctccgatgacccccgcagcaaacacaagtttaagatccacacgtactccagccccacgttttgtgaccactgtgggtcactgctgtatggactcatccaccaggggatgaaatgtgacacctgcatgatgaatgtgcacaagcgctgcgtgatgaatgttcccagcctgtgtggcacggaccacacggagcgccgcggccgcatctacatccaggcccacatcgacagggacgtcctcattgtcctcgtaagagatgctaaaaaccttgtacctatggaccccaatggcctgtcagatccctacgtaaaactgaaactgattcccgatcccaaaagtgagagcaaacagaagaccaaaaccatcaaatgctccctcaaccctgagtggaatgagacatttagatttcagctgaaagaatcggacaaagacagaagactgtcagtagagatttgggattgggatttgaccagcaggaatgacttcatgggatctttgtcctttgggatttctgaacttcagaaggccagtgttgatggctggtttaagttactgagccaggaggaaggcgagtacttcaatgtgcctgtgccaccagaaggaagtgaggccaatgaagaactgcggcagaaatttgagagggccaagatcagtcagggaaccaaggtcccggaagaaaagacgaccaacactgtctccaaatttgacaacaatggcaacagagaccggatgaaactgaccgattttaacttcctaatggtgctggggaaaggcagctttggcaaggtcatgctttcagaacgaaaaggcacagatgagctctatgctgtgaagatcctgaagaaggacgttgtgatccaagatgatgacgtggagtgcactatggtggagaagcgggtgttggccctgcctgggaagccgcccttcctgacccagctccactcctgcttccagaccatggaccgcctgtactttgtgatggagtacgtgaatgggggcgacctcatgtatcacatccagcaagtcggccggttcaaggagccccatgctgtattttacgctgcagaaattgccatcggtctgttcttcttacagagtaagggcatcatttaccgtgacctaaaacttgacaacgtgatgctcgattctgagggacacatcaagattgccgattttggcatgtgtaaggaaaacatctgggatggggtgacaaccaagacattctgtggcactccagactacatcgcccccgagataattgcttatcagccctatgggaagtccgtggattggtgggcatttggagtcctgctgtatgaaatgttggctgggcaggcaccctttgaaggggaggatgaagatgaactcttccaatccatcatggaacacaacgtagcctatcccaagtctatgtccaaggaagctgtggccatctgcaaagggctgatgaccaaacacccaggcaaacgtctgggttgtggacctgaaggcgaacgtgatatcaaagagcatgcatttttccggtatattgattgggagaaacttgaacgcaaagagatccagcccccttataagccaaaagctagagacaagagagacacctccaacttcgacaaagagttcaccagacagcctgtggaactgacccccactgataaactcttcatcatgaacttggaccaaaatgaatttgctggcttctcttatactaacccagagtttgtcattaatgtgtaggtgaatgcaaactccatcgttgagcctggggtgtaagacttcaagccaagcgtatgtatcaattctagtcttccaggattcacggtgcacatgctggcattcaacatgtggaaagcttgtcttagaggcctttcttgtatgtgtagcttgctagtttgttttctacatttgaaaatgtttagtttagaataagcgcattatccaattatagaggtacaattttccaaacttccagaaactcatcaaatgaacagacaatgtcaaaactactgtgtctgataccaaaatgcttcagtatttgtaatttttcaagtcagaagctgatgttcctggtaaaagtttttacagttattctataatatcttctttgaatgctaagcatgagcgatatttttaaaaattgtgagtaagcttcggaattc

SEQ ID NO: 1704 - protein, 671 aa, Homo sapien
MADPAAGPPPSEGEESTVRFARKGALRQKNVHEVKNHKFTARFFKQPTFCSHCTDFIWGFGKQGFQCQVCCFVVHKRCHEFVTFSCPGADKGPASDDPRSKHKFKIHTYSSPTFCDHCGSLLYGLIHQGMKCDTCMMNVHKRCVMNVPSLCGTDHTERRGRIYIQAHIDRDVLIVLVRDAKNLVPMDPNGLSDPYVKLKLIPDPKSESKQKTKTIKCSLNPEWNETFRFQLKESDKDRRLSVEIWDWDLTSRNDFMGSLSFGISELQKASVDGWFKLLSQEEGEYFNVPVPPEGSEANEELRQKFERAKISQGTKVPEEKTTNTVSKFDNNGNRDRMKLTDFNFLMVLGKGSFGKVMLSERKGTDELYAVKILKKDVVIQDDDVECTMVEKRVLALPGKPPFLTQLHSCFQTMDRLYFVMEYVNGGDLMYHIQQVGRFKEPHAVFYAAEIAIGLFFLQSKGIIYRDLKLDNVMLDSEGHIKIADFGMCKENIWDGVTTKTFCGTPDYIAPEIIAYQPYGKSVDWWAFGVLLYEMLAGQAPFEGEDEDELFQSIMEHNVAYPKSMSKEAVAICKGLMTKHPGKRLGCGPEGERDIKEHAFFRYIDWEKLERKEIQPPYKPKARDKRDTSNFDKEFTRQPVELTPTDKLFIMNLDQNEFAGFSYTNPEFVINV

SEQ ID NO: 1705 - DNA, 5635 bp, Homo sapien
ataaatgacgtgccgagagagcgagcgaacgcgcagccgggagagcggagtctcctgcctcccgccccccacccctccagctcctgctcctcctccgctccccatacacagacgcgctcacacccgctccctcactcgcacacacagacacaagcgcgcacacaggctccgcacacacacttcgctctcccgcgcgctcacacccctcttgccctgagcccttgccggtgcagcgcggcgccgcagctggacgcccctcccgggctcactttgcaacgctgacggtgccggcagtggccgtggaggtgggaacagcggcggcatcctcccccctggtcacagcccaagccaggacgcccgcggaacctctcggctgtgctctcccatgagtcgggatcgcagcatcccccaccagccgctcaccgcctccgggagccgctgggcttgtacaccgcagcccttccgggacagcagctgtgactcccccccagtgcagatttcgggacagctctctagaaactcgctctaaagacggaaccgccacagcactcaaagcccactgcggaagagggcagcccggcaagcccgggccctgagcctggacccttagcggtgccgggcagcactgccggcgcttcgcctcgccggacgtccgctcctcctacactctcagcctccgctggagagacccccagccccaccattcagcgcgcaagataccctgcagatatgccctgcgtccaagcccaatatagcccttcccctccaggttccagttatgcggcgcagacatacagctcggaatacaccacggagatcatgaaccccgactacaccaagctgaccatggaccttggcagcactgagatcacggctacagccaccacgtccctgcccagcatcagtaccttcgtggagggctactcgagcaactacgaactcaagccttcctgcgtgtaccaaatgcagcggcccttgatcaaagtggaggaggggcgggcgcccagctaccatcaccatcaccaccaccaccaccaccaccaccaccatcaccagcagcagcatcagcagccatccattcctccagcctccagcccggaggacgaggtgctgcccagcacctccatgtacttcaagcagtccccaccgtccacccccaccacgccggccttccccccgcaggcgggggcgttatgggacgaggcactgccctcggcgcccggctgcatcgcacccggcccgctgctggacccgccgatgaaggcggtccccacggtggccggcgcgcgcttcccgctcttccacttcaagccctcgccgccgcatccccccgcgcccagcccggccggcggccaccacctcggctacgacccgacggccgctgccgcgctcagcctgccgctgggagccgcagccgccgcgggcagccaggccgccgcgcttgagagccacccgtacgggctgccgctggccaagagggcggccccgctggccttcccgcctctcggcctcacgccctcccctaccgcgtccagcctgctgggcgagagtcccagcctgccgtcgccgcccagcaggagctcgtcgtctggcgagggcacgtgtgccgtgtgcggggacaacgccgcctgccagcactacggcgtgcgaacctgcgagggctgcaagggctttttcaagagaacagtgcagaaaaatgcaaaatatgtttgcctggcaaataaaaactgcccagtagacaagagacgtcgaaaccgatgtcagtactgtcgatttcagaagtgtctcagtgttggaatggtaaaagaagttgtccgtacagatagtctgaaagggaggagaggtcgtctgccttccaaaccaaagagcccattacaacaggaaccttctcagccctctccaccttctcctccaatctgcatgatgaatgcccttgtccgagctttaacagactcaacacccagagatcttgattattccagatactgtcccactgaccaggctgctgcaggcacagatgctgagcatgtgcaacaattctacaacctcctgacagcctccattgatgtatccagaagctgggcagaaaagattccgggatttactgatctccccaaagaagatcagacattacttattgaatcagcctttttggagctgtttgtcctcagactttccatcaggtcaaacactgctgaagataagtttgtgttctgcaatggacttgtcctgcatcgacttcagtgccttcgtggatttggggagtggctcgactctattaaagacttttccttaaatttgcagagcctgaaccttgatatccaagccttagcctgcctgtcagcactgagcatgatcacagaaagacatgggttaaaagaaccaaagagagtcgaagagctatgcaacaagatcacaagcagtttaaaagaccaccagagtaagggacaggctctggagcccaccgagtccaaggtcctgggtgccctggtagaactgaggaagatctgcaccctgggcctccagcgcatcttctacctgaagctggaagacttggtgtctccaccttccatcattgacaagctcttcctggacaccctacctttctaatcaggagcagtggagcagtgagctgcctcctctcctagcacctgcttgctacgcagcaaagggataggtttggaaacctatcatttcctgtccttccttaagaggaaaagcagctcctgtagaaagcaaagactttcttttttttctggctcttttccttacaacctaaagccagaaaacttgcagagtattgtgttggggttgtgttttatatttaggcattgggggatggggtgggagggggttatagttcatgagggttttctaagaaattgctaacaaagcacttttggacaatgctatcccagcaggaaaaaaaaggataatataactgttttaaaactctttctggggaatccaattatagttgctttgtatttaaaaacaagaacagccaagggttgttcgccagggtaggatgtgtcttaaagattggtcccttgaaaatatgcttcctgtatcaaaggtacgtatgtggtgcaaacaaggcagaaacttccttttaatttccttcttcctttattttaacaaatggtgaaagatggaggattacctacaaatcagacatggcaaaacaataatggctgtttgcttccataaacaagtgcaattttttaaagtgctgtcttactaagtcttgtttattaactctcctttattctatatggaaataaaaaggaggcagtcatgttagcaaatgacacgttaatatccctagcagaggctgtgttcaccttccctgtcgatcccttctgaggtatggcccatccaagacttttaggccattcttgatggaaccagatccctgccctgactgtccagctatcctgaaagtggatcagattataaactggattacatgtaactgttttggttgtgttctatcaaccccaccagagttccctaaacttgcttcagttatagtaactgactggtatattcattcagaagcgccataagtcagttgagtatttgatccctagataagaacatgcaaatcagcaggaactggtcatacagggtaagcaccagggacaataaggatttttatagatataatttaatttttgttattggttaaggagacaattttggagagcaagcaaatctttttaaaaaatagtatgaatgtgaatactagaaaagatttaaaaaatagtatgagtgtgagtactaggaaggattagtgggctgcgtttcaacattccgtgttcgtactcccttttgtatgtttctactgttaatgccatattactatgagataatttgttgcatagtgtccttatttgtataaacatttgtatgcacgttatattgtaatagctttgcctgtatttattgcaagaccaccagctcctggaagctgagttacagagtaattaaatggggtgttcacagtgacttggatacaccaattagaaattaaataagcaaatatatatatatatataaatatagcaggttacatatatatatttataatgtgtctttttattaaccatttgtacaataaatgtcacttcccatgccgttattttatggttcatttgcagtgacttttaaggcagtactgtttagcactttgatattaaaattttgcttatgttttgctaaattcgaataatgtttgaagatttttaggtctaaaagtctttatattatatactctgtatcaagtcaaaatatctttggccattttgctaagaaacaaactttgaatgtcaaactgatgtcacagtagtttttgttagctttaaatcatttttgctttagtctttttaaaggaaaataacaaaactatgctgtttatattgtcattaaattatacaatcaaacaaatgccaaatgaattgcctaattgctgcaaagtataacccagataggaaatcatatgtttttttccaagagtcattctaatatttgattatgttatgtgtgcttttatgaaagattgttatttttatatatcaagatgatagaacctggaatgttaggattttgaaatgttagacttggaaggggcctggtctgtcaactagtccaaccccttaaaattcatagaggagcaaactggggcccattgaagggtgaagagttactcaaggtcaaacagctggtaacagaatcaagactaagacctaatttacctttccatactctttttttttctcaacttcatctatataaaatcaggcttttaaacataaccactaatatttacctgaagataaccatgagtaaagtatacttttgcattaattttttgagcttatatgcaaacataataaatattattaaatatcaggaaagctaacatttcatacaagatagcttcagaccaaattcaaattgaatttgaataaattagaaatactgtgcatacataaccttcttgtgcaccatgagtatttggaaagttaatccttgtttttgtcgtgtctataaaggaagaacaaaacaaaataaaaacagagccctagagaaatgctgttactttttatttttacacccatcagatttaaggaaaagactttttagccattataatctagtggttggaaggaatgaagaagcttttttagtaataggtccagatatgagtgctaaaaataaagatgatagcatgttcttctgtcttccatagttattacaactatgagagcctcccaagtcatcttatcaactcaactcccttttttttgtcttaatgttgcacataagtttatacagagtggatgaccacactagcacagaagagaacaacatgtattaaagcaggtgattcctccccttggcgggagagctctctcagtgtgaacatgccttctgtgggcggaaatcaggaagccaccagctgttaatggagagtgccttgcttttatttcagacagcagagttttccaaagtttctctgctcctctaacagcattgctctttagtgtgtgttaacctgtggtttgaaagaaatgctcttgtacattaacaatgtaaatttaaatgattaaattacattttatcaatggca

SEQ ID NO: 1706 - protein, 626 aa, Homo sapien
MPCVQAQYSPSPPGSSYAAQTYSSEYTTEIMNPDYTKLTMDLGSTEITATATTSLPSISTFVEGYSSNYELKPSCVYQMQRPLIKVEEGRAPSYHHHHHHHHHHHHHHQQQHQQPSIPPASSPEDEVLPSTSMYFKQSPPSTPTTPAFPPQAGALWDEALPSAPGCIAPGPLLDPPMKAVPTVAGARFPLFHFKPSPPHPPAPSPAGGHHLGYDPTAAAALSLPLGAAAAAGSQAAALEGHPYGLPLAKRAAPLAFPPLGLTPSPTASSLLGESPSLPSPPSRSSSSGEGTCAVCGDNAACQHYGVRTCEGCKGFFKRTVQKNAKYVCLANKNCPVDKRRRNRCQYCRFQKCLSVGMVKEVVRTDSLKGRRGRLPSKPKSPLQQEPSQPSPPSPPICMMNALVRALTDSTPRDLDYSRYCPTDQAAAGTDAEHVQQFYNLLTASIDVSRSWAERIPGFTDLPKEDQTLLIESAFLELFVLRLSIRSNTAEDKFVFCNGLVLHRLQCLRGFGEWLDSIKDFSLNLQSLNLDIQALACLSALSMITERHGLKEPKRVEELCNKITSSLKDHQSKGQALEPNESKVLVALVELRKICTLGLQRIFYLKLEDLVSPPSIIDKLFLDTLPF

SEQ ID NO: 1707 - DNA, 8093 bp, Homo sapien
ctcagctccctgtggtgggggatggcagaggcttcccgctccccgcagctggtttgcacagcctcccgactgtgccgtggtgtctccttccctaaagtgggacagtcgtttctgtgtcctgctggcctctgaggaacagacgtgtgtgagaggccttcagggcctgatggctggggtggtgacagtgcctggagaatgggtggggactggaggggccaggtggctaaccactctcctcttccatggcagcggagctggagttcgcccaaatcatcatcatcgtcgtggtggtcacggtgatggtggtggtcatcgtctgcctgctgaaccactacaaagtctccacgcggtccttcatcaaccgcccgaaccagagccggaggcgggaggacgggctgccgcaggaagggtgcctgtggccttcagacagcgccgcaccgcggctgggcgcctcggagatcatgcatgccccgcggtccagggacaggttcacagcgccgtccttcatccagagggatcgcttcagccgcttccagcccacctacccctatgtgcagcacgagattgatcttcctcccaccatctccctgtccgacggtgaagagccacctccttaccaggggccctgcaccctgcagctccgggaccctgaacagcagatggaactcaaccgagagtccgtgagggccccacccaaccgaaccatatttgacagtgatttaatagacattgctatgtatagcgggggtccatgcccacccagcagcaactcgggcatcagtgcaagcacctgcagcagtaacgggaggatggaggggccaccccccacatacagcgaggtgatgggccaccacccaggcgcctctttcctccatcaccagcgcagcaacgcacacaggggcagcagactgcagtttcagcagaacaatgcagagagcacaatagtacccatcaaaggcaaagataggaagcctgggaacctggtctgattccttccaacgtgcacttcagctggagaaagaaaccaagaagggaagcggccgctgggcccctcctgcgcacagtgttgttcagtttcacatggtacaaataagtaaaaccaaatgagcaaacacggtctttgtttctgattccttttaggggaattgcatgcaaactagactgaaatgatacaaacttccatctggtctgaccgcaaacagtgtttatttggggacaggggttgggatgggggtgtgggcaggggaaaacagagaacgggatgctttgaagataccatgaaataaaacccacagaggtatttgatgtatttaattgtgaaaggagactttgcagataaatgaggccagaatggcatgttttataattaactgaataaagaaggaagcattattatatattattgtggggaagaaccagccagttcgctttttctcctaaggtgtggacttttattttgttttaaaaatatgaatcaaaattcctgtgttgtgtgccaaggtataaagtggagaagttagatgagtgcaaggagctcctttgtgttgtgatgatgtgttttaaaagttgcactatcttaatgttgaaaatatttacaagggaactgttttacgtgaagttctgtatgttgtcttttcacctgtggattgtaatcaggcccaaggaatatcctggagtggtccccagaagcatccaagaaaagatatttggggacgtagcctaacattttaccaacttacgtaaatcaaaaaagtcattattgttgcaggagtttgcatcaaatagcagtgcatcgctgaagcttttggagacttttggatggaagataagatagggaagattaagttccagcatttctgacttgttattttgagttactctgctactcttaggctgcatagtttatgagaaaatgaacacatgcatttatggatccagtatcatgcagtgctgccctcatcctccagcagtgcaatttcttcagtaatttagatttttttcactatagcatgaaatatattcaaatacataccttattttatgcaataaattgtttaaaatgcaaggtggttattctgcatactgttgaaatatgtgactcctcagtatattcccattgcctctccccctttcctcgacagcttagttcagttctgcagggctgctcagttcacaggaggctcccagcagccaccccacatccagcctacacagaactttcgtgtgggagtggtgtgggtggtggttttcttatgctttggaagcccctagaaataatgacggaagaatgccatgttgctgatcgtggtaataagccattgtgggttattgtatgtcactagtattagcatagcattcttaaaggaatgcagtgttcaaaacctacccaaattccccgcaggattttaccaaacccttccccaggccagttttgtactgaaggcaagaactggacagtcagagaacagtggagggggcaagtgactgaagagcaccgggtaaaaagcacaacatgcagttaaaatgcaaactagaaaactaattttaaatattgttagttttaatatttcctgatatttacaaatattcattcttatatacaatgaaaaaaataactttcttctgcagatgtaagcactggcttttataagagcagcagccaacacgtttagcagacactgcgcgtggagaagggcttatctgcagtacactctgccatgtggagggtgggcctctgtggcctcttcacataacaagatgagctggaatgatgattccatgactcccacctatgcagccttaaagccaaatccgcgtgtgtgtgtttgtgtctgtctgtgggtctcgaaggtgatccgtcggtgcggtggctctgtgctgtaactggagagactgttccaaaccccaagagttgtctgatcctagtctgttcccttctgcttcttacctctgtagataggtcactggtttttgtttgtttgttttgaggattggaatttccattacattcatcctttgcacacagtaacatccacagaactagtccaactcttaaaaggagagaggaaaaacacaggcaccagttgtcagctcatgcttacaacctgtgtggaagtatatacagttgagagtcacagtggaggttctgagactggattcagtcttgttccagtgacagttggaaggcctctgctggagagacaccagctctcagggcagagattggcttggggccagaaggaccctccccaaccctggagacaccctgaaggttcactggctctccagattagcctctcttcctctgtcaggcaaagatgaggagcccgtgttcccatcgggccctgctggcagggacttgcagtggattcttggtcaggtgtgcccacagatgcggaggcgaggtgagtgattccatcatttcagttctcacctgcagttttggtgaagcaggagatgcaccccacagctctagctctcaaatggcttcacagtccttacttctctacctgcctcaagaaggggctcagagcagagacttgtgaattccttagtaactgtgagtatatgaatgtgttgcacatgtccacagtattggcgagataattacataattcagatacctttaatcatctttcaagaaagaggctcctcccattcaaccaccctagagaactgcctttgttaaatagttatttaaagactcatacatatcaaaccatgactttgaaaggtcttcgaggctggggctctgtaatgaattagtttaaaagccaaggtcataacatgaattgatggtcaatttcccttcagcagaaggaaaaggtgatttagatcagtagctcttttgaaggttgtggctgacctgttcataccgtgtcgcctcatggctagtgtggcgttgaaagagtagcgactgggaagatacaacttacacagtggggcctattgttctttcaagaaccctttttttagcttatagaacccatgggtccagtttagtaacgagtgatttaggcaatcaatgataggtttataatcttagattattccagcaaagtgtggattgcattgttaggaagaacatttggtgggaatgaacactcctgggcataccgctgacttttgtcccttgttcccggtgtaggagacccaaggcatcttgaatcccatctataagaacacaatcttccagcatacgtttgctttttcagaaactctagcattctctttaaatactgacgcaatccttaatggaaaagagatttcatgaagcaaattatgtatttcaatagttcttctatttttagtgtccaaaatttactaatacagaagcttgacaagcatgtcctcaccctccccaccacataaacacatggacacacacccaagccacaagaaatcccaagagagcagaagcgaatttttaaaagatttatcgtgaggactgcatttccattcactaattttggctcaaacttatgaggcaggaaataggggccaacagtaaatgggggaggcctcctgacaccagcagaggaattttgtacccaggcgaggacttcttgaacttctgcgtatctccgtttgatctctttcacctttatttcatcttcataagaatgagaaaggctcaaaaggaagcacttttagaaatcttctctgacctagaagaatccatccaaatccctgccttcctctctgaaccaacagttcccttctctgacagggggccatcctctatcttccatccagcggctcttccttttaggaaggctctggtgcagagcacttcaaatatgtcctcaggccagatactgattgctagtagagagacacccggcacccagtccgaagccctccctcaaaggaccggcttatggcgttggtcactggcaggctcagagacattctactgtgggcgcagggagcccggccccccatgcagccatgactggatgcgcccccatctcgggggcttgctgcactgcttgtttattgaattttgctacttagaatggcaacattaactttgtgtaccattcattttttaaaaattttccaaagctcggcagtgtatgaaagaaaaaactgggaaagatacttggtttctgttaacttttgtgttgcttgcttaagtgattaaagccagtgcttggagccaagccttcatgccacgaacatgctccacagcctgccctttgctctcctgctcacactgaccaagaatgccgcgtgcttggcctactgaggtgaaaggacaattgaatgacaggtgggcaaagggagaacttccccttcttggtgcgaggaaagtcacaaatttaaaaatgttgcttccagcccagatcctaaatgctagttctcagcagctgcgtggcttaccgttcgccatttccaccaccgccagctgccagcaccgctacagatcacagagatgtgaacagacaatggaaagcactcttagccttgcagtggtctacattttttaggaaccaatatttcagcattctttattacccggcacgctgtgtcctttgcagagttcaagtttatgttactgccagggtcagacagtcatttgctgctgctgctgctgctgctgctgcttctcgaactggatgcattaggaagctgctgtctgagtgtaggaatgtcttgctaagaaagcaatgtcttccttcatccttttctttcttccctctgcgtgtccttgtttttgtgtaatgcgggagagggttagagctatagagattatatatacactatccgtgcacattatatatatgtagatatacccctatcatgtcagagatctgcatgtcagtttttcagcaactaaggtgcctcatgttctgagttcagcagatataggaaccaagccgccccctcctgcacttgatgctcccacctttgttgtgcctcacttaaaatggtgcttttttcagttgtctgtcttttcttatgtttttatttgtaaggtgctgtatataagttgaatatattatgcacatatcctacccaatgggtagaacaaaaagttgttaatactgtaatataatgtatagatgataccaattttaacagaaatggcatagaatttgtgaatgcctatgtgctttgtcctcttttgtaaggaaatttgcaaatggatgcatacagattaaagtctatgtagtttattttcctattaaatatcaatattataacacaagagaaagaagtgtgaacaaacaagcaacagtttatgaccagcgtatatatagcaatggaaagttgcatctttgctgtgaaaacactttaaagaaaatactttttaaaaaatcccacagctttttggttgccactagacgcttcttattttaatcattttagtaatgctcagctggaccagtgttagttatatttgagtcagaaaaatgttgtttttcaacttgctttataatctcctgcatctatctcctgctgtagcatcaygaaggtgtcaggcaacagtgaaaagtgcacatttttgttgttgcagaaactgtgtcagaggaataagtaaatcagcctgcagcagaagactttgttcagctccagaggcatctgtgaccgtctgtgtccaagtctctctgtgcctttttcttttacaaactgaagctgtggagccaatgaagtaacagtagagattgtagggaaagaatacctcaggaaaaacaaatacacttacaagaagaccctgttcttagaaaatgtgtttagttatgggttagcactagaagagacttggctgtcagccagccaagtgaaggacctctcatccattcccattcatgtcccatcataatacggacmcaaaaagcaaactcggttttgccatcagttagaaattacgttttggattgtatattgttacatctctcttccagcttagtttttagtgtctgattgtgacctctgcatttatcttcaaataccctaattttaaaacaaaagaacaagaaaagtttataacaccatgttcactaaaaccacggttgaatcttgggtgtgggcatcctttcgagtgttgtccataagagcagttcgtggaattttgcccatctgacccatattatcagcttattctgccaccagagtagagtctaataaattccaaagtttttatttgctccatggtgtatgttctgactttgaaaatgtcagattctataatcatacccctaacatccaggagacaaatgacagattatctttaaactgaaattgactctacaatgcaacccttaatgctgaatggattaaaaaagtcagcccttttagtatctgtttgaaagggccgtaaaaagttgacacttttgttgttgtggatcctgcgtgtctagacccacgtgttgtttccatcgtatactgtagggtgcaccccttgggattcatcattaagaactgaggctcactgttgtcagaaacaaagctcccaccccccaggttcaaccttgtgggagaactgttgagcatgagaatgttctagactcagaggtactaaaatttgttaccacatcattgcttcctttctacaggacgaattgaggcttaaactttactgttaatgatactggttcattttaatgtgcttgttggtatgttgctatttttcatttcatagctttcaaaaatcatgctaattgtatacttgtctagtttaaggctattttaaaatatgtacaatactattcacagcatttagttcgtttaatttttattataaagcaatctactaaaaaagtacaactgtatttgaacttttcaatagttgtttgtgagctatgataatcaaaagtcattaaagtcttttttaacaaacattcgtgcttacttttcaacataattcccagttatatacagaaaaagatttccacctgtcacgtatctgcctcttttacctgagcaatggtgtagttcttagacctaaggtctgtaattgcaatacttttaaagaaagatgttgctctaagtgctgtttgttagttatgaaatcagatttttctgcttgttcttaatgctgtggtcaaaccatagcacaaaatcattaaaaataatcagcggcatac

SEQ ID NO: 1708 - protein, 248 aa, Homo sapien
MAAELEFAQIIIIVVVVTVMVVVIVCLLNHYKVSTRSFINRPNQSRRREDGLPQEGCLWPSDSAAPRLGASEIMHAPRSRDRFTAPSFIQRDRFSRFQPTYPYVQHEIDLPPTISLSDGEEPPPYQGPCTLQLRDPEQQMELNRESVRAPPNRTIFDSDLIDIAMYSGGPCPPSSNSGISASTCSSNGRMEGPPPTYSEVMGHHPGASFLHHQRSNAHRGSRLQFQQNNAESTIVPIKGKDRKPGNLV

SEQ ID NO: 1709 - DNA, 7193 bp, Homo sapien
agaataagggcagggaccgcggctcctatctcttggtgatccccttccccattccgcccccgcctcaacgcccagcacagtgccctgcacacagtagtcgctcaataaatgttcgtggatgatgatgatgatgatgatgaaaaaaatgcagcatcaacggcagcagcaagcggaccacgcgaacgaggcaaactatgcaagaggcaccagacttcctctttctggtgaaggaccaacttctcagccgaatagctccaagcaaactgtcctgtcttggcaagctgcaatcgatgctgctagacaggccaaggctgcccaaactatgagcacctctgcacccccacctgtaggatctctctcccaaagaaaacgtcagcaatacgccaagagcaaaaaacagggtaactcgtccaacagccgacctgcccgcgcccttttctgtttatcactcaataaccccatccgaagagcctgcattagtatagtggaatggaaaccatttgacatatttatattattggctatttttgccaattgtgtggccttagctatttacatcccattccctgaagatgattctaattcaacaaatcataacttggaaaaagtagaatatgccttcctgattatttttacagtcgagacatttttgaagattatagcgtatggattattgctacatcctaatgcttatgttaggaatggatggaatttactggattttgttatagtaatagtaggattgtttagtgtaattttggaacaattaaccaaagaaacagaaggcgggaaccactcaagcggcaaatctggaggctttgatgtcaaagccctccgtgcctttcgagtgttgcgaccacttcgactagtgtcaggggtgcccagtttacaagttgtcctgaactccattataaaagccatggttcccctccttcacatagcccttttggtattatttgtaatcataatctatgctattataggattggaactttttattggaaaaatgcacaaaacatgtttttttgctgactcagatatcgtagctgaagaggacccagctccatgtgcgttctcagggaatggacgccagtgtactgccaatggcacggaatgtaggagtggctgggttggcccgaacggaggcatcaccaactttgataactttgcctttgccatgcttactgtgtttcagtgcatcaccatggagggctggacagacgtgctctactgggtaaatgatgcgataggatgggaatggccatgggtgtattttgttagtctgatcatccttggctcatttttcgtccttaacctggttcttggtgtccttagtggagaattctcaaaggaaagagagaaggcaaaagcacggggagatttccagaagctccgggagaagcagcagctggaggaggatctaaagggctacttggattggatcacccaagctgaggacatcgatccggagaatgaggaagaaggaggagaggaaggcaaacgaaatactagcatgcccaccagcgagactgagtctgtgaacacagagaacgtcagcggtgaaggcgagaaccgaggctgctgtggaagtctctggtgctggtggagacggagaggcgcggccaaggcggggccctctgggtgtcggcggtggggtcaagccatctcaaaatccaaactcagccgacgctggcgtcgctggaaccgattcaatcgcagaagatgtagggccgccgtgaagtctgtcacgttttactggctggttatcgtcctggtgtttctgaacaccttaaccatttcctctgagcactacaatcagccagattggttgacacagattcaagatattgccaacaaagtcctcttggctctgttcacctgcgagatgctggtaaaaatgtacagcttgggcctccaagcatatttcgtctctcttttcaaccggtttgattgcttcgtggtgtgtggtggaatcactgagacgatcctggtggaactggaaatcatgtctcccctggggatctctgtgtttcggtgtgtgcgcctcttaagaatcttcaaagtgaccaggcactggacttccctgagcaacttagtggcatccttattaaactccatgaagtccatcgcttcgctgttgcttctgctttttctcttcattatcatcttttccttgcttgggatgcagctgtttggcggcaagtttaattttgatgaaacgcaaaccaagcggagcacctttgacaatttccctcaagcacttctcacagtgttccagatcctgacaggcgaagactggaatgctgtgatgtacgatggcatcatggcttacgggggcccatcctcttcaggaatgatcgtctgcatctacttcatcatcctcttcatttgtggtaactatattctactgaatgtcttcttggccatcgctgtagacaatttggctgatgctgaaagtctgaacactgctcagaaagaagaagcggaagaaaaggagaggaaaaagattgccagaaaagagagcctagaaaataaaaagaacaacaaaccagaagtcaaccagatagccaacagtgacaacaaggttacaattgatgactatagagaagaggatgaagacaaggacccctatccgccttgcgatgtgccagtaggggaagaggaagaggaagaggaggaggatgaacctgaggttcctgccggaccccgtcctcgaaggatctcggagttgaacatgaaggaaaaaattgcccccatccctgaagggagcgctttcttcattcttagcaagaccaacccgatccgcgtaggctgccacaagctcatcaaccaccacatcttcaccaacctcatccttgtcttcatcatgctgagcagcgctgccctggccgcagaggaccccatccgcagccactccttccggaacacgatactgggttactttgactatgccttcacagccatctttactgttgagatcctgttgaagatgacaacttttggagctttcctccacaaaggggccttctgcaggaactacttcaatttgctggatatgctggtggttggggtgtctctggtgtcatttgggattcaatccagtgccatctccgttgtgaagattctgagggtcttaagggtcctgcgtcccctcagggccatcaacagagcaaaaggacttaagcacgtggtccagtgcgtcttcgtggccatccggaccatcggcaacatcatgatcgtcactaccctcctgcagttcatgtttgcctgtatcggggtccagttgttcaaggggaagttctatcgctgtacggatgaagccaaaagtaaccctgaagaatgcaggggacttttcatcctctacaaggatggggatgttgacagtcctgtggtccgtgaacggatctggcaaaacagtgatttcaacttcgacaacgtcctctctgctatgatggcgctcttcacagtctccacgtttgagggctggcctgcgttgctgtataaagccatcgactcgaatggagagaacatcggcccaatctacaaccaccgcgtggagatctccatcttcttcatcatctacatcatcattgtagctttcttcatgatgaacatctttgtgggctttgtcatcgttacatttcaggaacaaggagaaaaagagtataagaactgtgagctggacaaaaatcagcgtcagtgtgttgaatacgccttgaaagcacgtcccttgcggagatacatccccaaaaacccctaccagtacaagttctggtacgtggtgaactcttcgcctttcgaatacatgatgtttgtcctcatcatgctcaacacactctgcttggccatgcagcactacgagcagtccaagatgttcaatgatgccatggacattctgaacatggtcttcaccggggtgttcaccgtcgagatggttttgaaagtcatcgcatttaagcctaaggggtattttagtgacgcctggaacacgtttgactccctcatcgtaatcggcagcattatagacgtggccctcagcgaagcggacccaactgaaagtgaaaatgtccctgtcccaactgctacacctgggaactctgaagagagcaatagaatctccatcacctttttccgtcttttccgagtgatgcgattggtgaagcttctcagcaggggggaaggcatccggacattgctgtggacttttattaagtcctttcaggcgctcccgtatgtggccctcctcatagccatgctgttcttcatctatgcggtcattggcatgcagatgtttgggaaagttgccatgagagataacaaccagatcaataggaacaataacttccagacgtttccccaggcggtgctgctgctcttcaggtgtgcaacaggtgaggcctggcaggagatcatgctggcctgtctcccagggaagctctgtgaccctgagtcagattacaaccccggggaggagtatacatgtgggagcaactttgccattgtctatttcatcagtttttacatgctctgtgcatttctgatcatcaatctgtttgtggctgtcatcatggataatttcgactatctgacccgggactggtctattttggggcctcaccatttagatgaattcaaaagaatatggtcagaatatgaccctgaggcaaagggaaggataaaacaccttgatgtggtcactctgcttcgacgcatccagcctcccctggggtttgggaagttatgtccacacagggtagcgtgcaagagattagttgccatgaacatgcctctcaacagtgacgggacagtcatgtttaatgcaaccctgtttgctttggttcgaacggctcttaagatcaagaccgaagggaacctggagcaagctaatgaagaacttcgggctgtgataaagaaaatttggaagaaaaccagcatgaaattacttgaccaagttgtccctccagctggtgatgatgaggtaaccgtggggaagttctatgccactttcctgatacaggactactttaggaaattcaagaaacggaaagaacaaggactggtgggaaagtaccctgcgaagaacaccacaattgccctacaggcgggattaaggacactgcatgacattgggccagaaatccggcgtgctatatcgtgtgatttgcaagatgacgagcctgaggaaacaaaacgagaagaagaagatgatgtgttcaaaagaaatggtgccctgcttggaaaccatgtcaatcatgttaatagtgataggagagattcccttcagcagaccaataccacccaccgtcccctgcatgtccaaaggccttcaattccacctgcaagtgatactgagaaaccgctgtttcctccagcaggaaattcggtgtgtcataaccatcataaccataattccataggaaagcaagttcccacctcaacaaatgccaatctcaataatgccaatatgtccaaagctgcccatggaaagcggcccagcattgggaaccttgagcatgtgtctgaaaatgggcatcattcttcccacaagcatgaccgggagcctcagagaaggtccagtgtgaaaagaacccgctattatgaaacttacattaggtccgactcaggagatgaacagctcccaactatttgccgggaagacccagagatacatggctatttcagggacccccactgcttgggggagcaggagtatttcagtagtgaggaatgctacgaggatgacagctcgcccacctggagcaggcaaaactatggctactacagcagatacccaggcagaaacatcgactctgagaggccccgaggctaccatcatccccaaggattcttggaggacgatgactcgcccgtttgctatgattcacggagatctccaaggagacgcctactacctcccaccccagcatcccaccggagatcctccttcaactttgagtgcctgcgccggcagagcagccaggaagaggtcccgtcgtctcccatcttcccccatcgcacggccctgcctctgcatctaatgcagcaacagatcatggcagttgccggcctagattcaagtaaagcccagaagtactcaccgagtcactcgacccggtcgtgggccacccctccagcaacccctccctaccgggactggacaccgtgctacacccccctgatccaagtggagcagtcagaggccctggaccaggtgaacggcagcctgccgtccctgcaccgcagctcctggtacacagacgagcccgacatctcctaccggactttcacaccagccagcctgactgtccccagcagcttccggaacaaaaacagcgacaagcagaggagtgcggacagcttggtggaggcagtcctgatatccgaaggcttgggacgctatgcaagggacccaaaatttgtgtcagcaacaaaacacgaaatcgctgatgcctgtgacctcaccatcgacgagatggagagtgcagccagcaccctgcttaatgggaacgtgcgtccccgagccaacggggatgtgggccccctctcacaccggcaggactatgagctacaggactttggtcctggctacagcgacgaagagccagaccctgggagggatgaggaggacctggcggatgaaatgatatgcatcaccaccttgtagcccccagcgaggggcagactggctctggcctcaggtggggcgcaggagagccaggggaaaagtgcctcatagttaggaaagtttaggcactagttgggagtaatattcaattaattagacttttgtataagagatgtcatgcctcaagaaagccataaacctggtaggaacaggtcccaagcggttgagcctggcagagtaccatgcgctcggccccagctgcaggaaacagcaggccccgccctctcacagaggatgggtgaggaggccagacctgccctgccccattgtccagatgggcactgctgtggagtctgcttctcccatgtaccagggcaccaggcccacccaactgaaggcatggcggcggggtgcaggggaaagttaaaggtgatgacgatcatcacacctcgtgtcgttacctcagccatcggtctagcatatcagtcactgggcccaacatatccatttttaaaccctttcccccaaatacactgcgtcctggttcctgtttagctgttctgaaata

SEQ ID NO: 1710 - protein, 2000 aa, Homo sapien
MMMMMMMKKMQHQRQQQADHANEANYARGTRLPLSGEGPTSQPNSSKQTVLSWQAAIDAARQAKAAQTMSTSAPPPVGSLSQRKRQQYAKSKKQGNSSNSRPARALFCLSLNNPIRRACISIVEWKPFDIFILLAIFANCVALAIYIPFPEDDSNSTNHNLEKVEYAFLIIFTVETFLKIIAYGLLLHPNAYVRNGWNLLDFVIVIVGLFSVILEQLTKETEGGNHSSGKSGGFDVKALRAFRVLRPLRLVSGVPSLQVVLNSIIKAMVPLLHIALLVLFVIIIYAIIGLELFIGKMHKTCFFADSDIVAEEDPAPCAFSGNGRQCTANGTECRSGWVGPNGGITNFDNFAFAMLTVFQCITMEGWTDVLYWVNDAIGWEWPWVYFVSLIILGSFFVLNLVLGVLSGEFSKEREKAKARGDFQKLREKQQLEEDLKGYLDWITQAEDIDPENEEEGGEEGKRNTSMPTSETESVNTENVSGEGENRGCCGSLWCWWRRRGAAKAGPSGCRRWGQAISKSKLSRRWRRWNRFNRRRCRAAVKSVTFYWLVIVLVFLNTLTISSEHYNQPDWLTQIQDIANKVLLALFTCEMLVKMYSLGLQAYFVSLFNRFDCFVVCGGITETILVELEIMSPLGISVFRCVRLLRIFKVTRHWTSLSNLVASLLNSMKSIASLLLLLFLFIIIFSLLGMQLFGGKFNFDETQTKRSTFDNFPQALLTVFQILTGEDWNAVMYDGIMAYGGPSSSGMIVCIYFIILFICGNYILLNVFLAIAVDNLADAESLNTAQKEEAEEKERKKIARKESLENKKNNKPEVNQIANSDNKVTIDDYREEDEDKDPYPPCDVPVGEEEEEEEEDEPEVPAGPRPRRISELNMKEKIAPIPEGSAFFILSKTNPIRVGCHKLINHHIFTNLILVFIMLSSAALAAEDPIRSHSFRNTILGYFDYAFTAIFTVEILLKMTTFGAFLHKGAFCRNYFNLLDMLVVGVSLVSFGIQSSAISVVKILRVLRVLRPLRAINRAKGLKHVVQCVFVAIRTIGNIMIVTTLLQFMFACIGVQLFKGKFYRCTDEAKSNPEECRGLFILYKDGDVDSPVVRERIWQNSDFNFDNVLSAMMALFTVSTFEGWPALLYKAIDSNGENIGPIYNHRVEISIFFIIYIIIVAFFMMNIFVGFVIVTFQEQGEKEYKNCELDKNQRQCVEYALKARPLRRYIPKNPYQYKFWYVVNSSPFEYMMFVLIMLNTLCLAMQHYEQSKMFNDAMDILNMVFTGVFTVEMVLKVIAFKPKGYFSDAWNTFDSLIVIGSIIDVALSEADPTESENVPVPTATPGNSEESNRISITFFRLFRVMRLVKLLSRGEGIRTLLWTFIKSFQALPYVALLIAMLFFIYAVIGMQMFGKVAMRDNNQINRNNNFQTFPQAVLLLFRCATGEAWQEIMLACLPGKLCDPESDYNPGEEYTCGSNFAIVYFISFYMLCAFLIINLFVAVIMDNFDYLTRDWSILGPHHLDEFKRIWSEYDPEAKGRIKHLDVVTLLRRIQPPLGFGKLCPHRVACKRLVAMNMPLNSDGTVMFNATLFALVRTALKIKTEGNLEQANEELRAVIKKIWKKTSMKLLDQVVPPAGDDEVTVGKFYATFLIQDYFRKFKKRKEQGLVGKYPAKNTTIALQAGLRTLHDIGPEIRRAISCDLQDDEPEETKREEEDDVFKRNGALLGNHVNHVNSDRRDSLQQTNTTHRPLHVQRPSIPPASDTEKPLFPPAGNSVCHNHHNHNSIGKQVPTSTNANLNNANMSKAAHGKRPSIGNLEHVSENGHHSSHKHDREPQRRSSVKRTRYYETYIRSDSGDEQLPTICREDPEIHGYFRDPHCLGEQEYFSSEECYEDDSSPTWSRQNYGYYSRYPGRNIDSERPRGYHHPQGFLEDDDSPVCYDSRRSPRRRLLPPTPASHRRSSFNFECLRRQSSQEEVPSSPIFPHRTALPLHLMQQQIMAVAGLDSSKAQKYSPSHSTRS

SEQ ID NO: 1711 - DNA, 2289 bp, Homo sapien
gtctcggccatgacacacatttgacatgccctccctcaacctacttatagactatttttcttgctctgcagcatggaccaaagagaaattctgcagaagttcctggatgaggcccaaagcaagaaaattactaaagaggagtttgccaatgaatttctgaagctgaaaaggcaatctaccaagtacaaggcagacaaaacctatcctacaactgtggctgagaatgccaagaatatcaagaaaaacagatataaggatattttgccctatgattatagccgggtagaactatccctgataacctctgatgaggattccagctacatcaatgccaacttcattaagggagtttatggacccaaggcttatattgccacccagggtcctttatctacaaccctcctggacttctggaggatgatttgggaatatagtgtccttatcattgttatggcatgcatggagtatgaaatgggaaagaaaaagtgtgagcgctactgggctgagccaggagagatgcagctggaatttggccctttctctgtatcctgtgaagctgaaaaaaggaaatctgattatataatcaggactctaaaagttaagttcaatagtgaaactcgaactatctaccagtttcattacaagaattggccagaccatgatgtaccttcatctatagaccctattcttgagctcatctgggatgtacgttgttaccaagaggatgacagtgttcccatatgcattcactgcagtgctggctgtggaaggactggtgttatttgtgctattgattatacatggatgttgctaaaagatgggataattcctgagaacttcagtgttttcagtttgatccgggaaatgcggacacagaggccttcattagttcaaacgcaggaacaatatgaactggtctacaatgctgtattagaactatttaagagacagatggatgttatcagagataaacattctggaacagagagtcaagcaaagcattgtattcctgagaaaaatcacactctccaagcagactcttattctcctaatttaccaaaaagtaccacaaaagcagcaaaaatgatgaaccaacaaaggacaaaaatggaaatcaaagaatcttcttcctttgactttaggacttctgaaataagtgcaaaagaagagctagttttgcaccctgctaaatcaagcacttcttttgactttctggagctaaattacagttttgacaaaaatgctgacacaaccatgaaatggcagacaaaggcatttccaatagttggggagcctcttcagaagcatcaaagtttggatttgggctctcttttgtttgagggatgttctaattctaaacctgtaaatgcagcaggaagatattttaattcaaaggtgccaataacacggaccaaatcaactccttttgaattgatacagcagagagaaaccaaggaggtggacagcaaggaaaacttttcttatttggaatctcaaccacatgattcttgttttgtagagatgcaggctcaaaaagtaatgcatgtttcttcagcagaactgaattattcactgccatatgactctaaacaccaaatacgtaatgcctctaatgtaaagcaccatgactctagtgctcttggtgtatattcttacatacctttagtggaaaatccttatttttcatcatggcctccaagtggtaccagttctaagatgtctcttgatttacctgagaagcaagatggaactgtttttccttcttctctgttgccaacatcctctacatccctcttctcttattacaattcacatgattctttatcactgaattctccaaccaatatttcctcactattgaaccaggagtcagctgtactagcaactgctccaaggatagatgatgaaatcccccctccacttcctgtacggacacctgaatcatttattgtggttgaggaagctggagaattctcaccaaatgttcccaaatccttatcctcagctgtgaaggtaaaaattggaacatcactggaatggggtggaacatctgaaccaaagaaatttgatgactctgtgatacttagaccaagcaagagtgtaaaactccgaagtcctaaatcaggtaaaaatttctcttggctttagatgacatttagccctaagattggaagaatggttcgttaagtttagagtaattcacttcaggaagttacttggttcccataatagcttccagtattcattgatttatttctggctttcccagactagaaattttgtaaagag

SEQ ID NO: 1712 - protein, 691 aa, Homo sapien
MDQREILQKFLDEAQSKKITKEEFANEFLKLKRQSTKYKADKTYPTTVAENAKNIKKNRYKDILPYDYSRVELSLITSDEDSSYINANFIKGVYGPKAYIATQGPLSTTLLDFWRMIWEYSVLIIVMACMEYEMGKKKCERYWAEPGEMQLEFGPFSVSCEAEKRKSDYIIRTLKVKFNSETRTIYQFHYKNWPDHDVPSSIDPILELIWDVRCYQEDDSVPICIHCSAGCGRTGVICAIDYTWMLLKDGIIPENFSVFSLIREMRTQRPSLVQTQEQYELVYNAVLELFKRQMDVIRDKHSGTESQAKHCIPEKNHTLQADSYSPNLPKSTTKAAKMMNQQRTKMEIKESSSFDFRTSEISAKEELVLHPAKSSTSFDFLELNYSFDKNADTTMKWQTKAFPIVGEPLQKHQSLDLGSLLFEGCSNSKPVNAAGRYFNSKVPITRTKSTPFELIQQRETKEVDSKENFSYLESQPHDSCFVEMQAQKVMHVSSAELNYSLPYDSKHQIRNASNVKHHDSSALGVYSYIPLVENPYFSSWPPSGTSSKMSLDLPEKQDGTVFPSSLLPTSSTSLFSYYNSHDSLSLNSPTNISSLLNQESAVLATAPRIDDEIPPPLPVRTPESFIVVEEAGEFSPNVPKSLSSAVKVKIGTSLEWGGTSEPKKFDDSVILRPSKSVKLRSPKSGKNFSWL

SEQ ID NO: 1713 - DNA, 1962 bp, Homo sapien
gttttgcctgctagcatctccctgtaactctcccaatcttgaggagtgatccctgtcccagcccctggaaaggggcaggaacgacaaactcaaagtccaggatgttcaccatgacaagagccatggaagaggctctttttcagcacttcatgcaccagaagctggggatcgcctatgccatacacaagccatttcccttctttgaaggcctcctagacaactccatcatcactaagagaatgtacatggaatctctggaagcctgtagaaatttgatccctgtatccagagtggtgcacaacattctcacccaactggagaggacttttaacctgtctcttctggtgacattgttcagtcaaattaacctgcgtgaatatcccaatctggtgacgatttacagaagcttcaaacgtgttggtgcttcctatgaacggcagagcagagacacaccaatcctacttgaagccccaactggcctagcagaaggaagctccctccataccccactggcgctgcccccaccacaaccccctcaaccaagctgttcaccctgtgcgccaagagtcagtgagcctggaacatcctcccagcaaagcgatgagatcctgagtgagtcgcccagcccatctgaccctgtcctgcctctccctgcactcatccaggaaggaagaagcacttcagtgaccaatgacaagttaacatccaaaatgaatgcggaagaagactcagaagagatgcccagcctcctcactagcactgtgcaagtggccagtgacaacctgatcccccaaataagagataaagaagaccctcaagagatgccccactctcccttgggctctatgccagagataagagataattctccagaaccaaatgacccagaagagccccaggaggtgtccagcacaccttcagacaagaaaggaaagaaaagaaaaagatgtatctggtcaactccaaaaaggagacataagaaaaaaagcctcccaagagggacagcctcatctagacacggaatccaaaagaagctcaaaagggtggatcaggttcctcaaaagaaagatgactcaacttgtaactccacggtagagacaagggcccaaaaggcgagaactgaatgtgcccgaaagtcgagatcagaggagatcattgatggcacttcagaaatgaatgaaggaaagaggtcccagaagacgcctagtacaccacgaagggtcacacaaggggcagcctcacctgggcatggcatccaagagaagctccaagtggtggataaggtgactcaaaggaaagacgactcaacctggaactcagaggtcatgatgagggtccaaaaggcaagaactaaatgtgcccgaaagtccagatcgaaagaaaagaaaaaggagaaagatatctgttcaagctcaaaaaggagatttcagaaaaatattcaccgaagaggaaaacccaaaagtgacactgtggattttcactgttctaagctccccgtgacctgtggtgaggcgaaagggattttatataagaagaaaatgaaacacggatcctcagtgaagtgcattcggaatgaggatggaacttggttaacaccaaatgaatttgaagtcgaaggaaaaggaaggaacgcaaagaactggaaacggaatatacgttgtgaaggaatgaccctaggagagctgctgaagagtggacttttgctctgtcctccaagaataaatctcaagagagagttaaatagcaagtgaatttctactaccctctcagtcaccatgttgcagactttccctgtctggaggctcaccttagagcttctgagtttccaagctctgagtcacctccacatttgggcatggcatcttcaaaacaattaatttgcatagttaatttgggatggggaagcaaatgactctaaaataaaaattaaatgaaaaagctcaaaaaaaaaaaaaaaaaaaa

SEQ ID NO: 1714 - protein, 549 aa, Homo sapien
MFTMTRAMEEALFQHFMHQKLGIAYAIHKPFPFFEGLLDNSIITKRMYMESLEACRNLIPVSRVVHNILTQLERTFNLSLLVTLFSQINLREYPNLVTIYRSFKRVGASYERQSRDTPILLEAPTGLAEGSSLHTPLALPPPQPPQPSCSPCAPRVSEPGTSSQQSDEILSESPSPSDPVLPLPALIQEGRSTSVTNDKLTSKMNAEEDSEEMPSLLTSTVQVASDNLIPQIRDKEDPQEMPHSPLGSMPEIRDNSPEPNDPEEPQEVSSTPSDKKGKKRKRCIWSTPKRRHKKKSLPRGTASSRHGIQKKLKRVDQVPQKKDDSTCNSTVETRAQKARTECARKSRSEEIIDGTSEMNEGKRSQKTPSTPRRVTQGAASPGHGIQEKLQVVDKVTQRKDDSTWNSEVMMRVQKARTKCARKSRSKEKKKEKDICSSSKRRFQKNIHRRGKPKSDTVDFHCSKLPVTCGEAKGILYKKKMKHGSSVKCIRNEDGTWLTPNEFEVEGKGRNAKNWKRNIRCEGMTLGELLKSGLLLCPPRINLKRELNSK

SEQ ID NO: 1715 - DNA, 1010 bp, Homo sapien
agttctgtccttgcattggtgcgcctcaggccaggctgcactgctgggacctgggccatgtctccccaccccaccgccctcctgggcctagtgctctgcctggcccagaccatccacacgcaggaggaagatctgcccagaccctccatctcggctgagccaggcaccgtgatccccctggggagccatgtgactttcgtgtgccggggcccggttggggttcaaacattccgcctggagagggagagtagatccacatacaatgatactgaagatgtgtctcaagctagtccatctgagtcagaggccagattccgcattgactcagtaagtgaaggaaatgccgggccttatcgctgcatctattataagccccctaaatggtctgagcagagtgactacctggagctgctggtgaaagaaacctctggaggcccggactccccggacacagagcccggctcctcagctggacccacgcagaggccgtcggacaacagtcacaatgagcatgcacctgcttcccaaggcctgaaagctgagcatctgtatattctcatcggggtctcagtggtcttcctcttctgtctcctcctcctggtcctcttctgcctccatcgccagaatcagataaagcaggggccccccagaagcaaggacgaggagcagaagccacagcagaggtgaggcccctgggaatgactcctggacctccacccagtcctcggccgccaggctgcccctgaggttcacttttatttttcctcttaggcctgacctggctgttgatgttctagagaggacagcagacaaggccacagtcaatggacttcctgagaaggacagagagacggacacctcggccctggctgcagggagttcccaggaggtgacgtatgctcagctggaccactgggccctcacacagaggacagcccgggctgtgtccccacagtccacaaagcccatggccgagtccatcacgtatgcagccgttgccagacactgac

SEQ ID NO: 1716 - protein, 209 aa, Homo sapien
MSPHPTALLGLVLCLAQTIHTQEEDLPRPSISAEPGTVIPLGSHVTFVCRGPVGVQTFRLERESRSTYNDTEDVSQASPSESEARFRIDSVSEGNAGPYRCIYYKPPKWSEQSDYLELLVKETSGGPDSPDTEPGSSAGPTQRPSDNSHNEHAPASQGLKAEHLYILIGVSVVFLFCLLLLVLFCLHRQNQIKQGPPRSKDEEQKPQQR

SEQ ID NO: 1717 - DNA, 9078 bp, Homo sapien
ctgaactagttgccagtgatcttgaaacgtgacagtaaccaagagataaataggtgacaatgacaggaaaattagatgtagtaaaagagagtgtttgagagcagaagctatggcaactaaagactggatttgaatccttcctagcttggtgacatgagcaaattacttgatttaagtgagcattttcccatctgtacagtggagataacgataattgtgcctgctaagaagaattgctgtgaagattagtgaaataatgcatgtaaaacatttggtacagtatgtgacacatagtacaaatagtttgctaggaagattgttattattcttcacttgtgatattgtgaagttttcatacagcaaattggacatcatgagatggattgattaaataaatagatttgaacttcaaggactggtagtgttcttgctttggaaagaagaaacttggtttatcctaataatagtaggataataatggtgaagtgataggtacaagtaatagtgtttatgatgcgctggtgatgataggaaaagaaagccattatatgggcaagagctagaagtaataaaatggtgcatttttcagtgatgtttggcctatgtagctattctctgataactataaaaatccttattattgaagattcttcaggaaaaaaaaacccttagtctgaaactttagcaccaatcccccttgccccccattgaaatacgtatttttaaaacatggcttttgataatgtgagggttttttcctttttgcgatttagcagtgctgattgtgtattgcagtagttgtgagagcattagaagcagcagtcgataggaggatggaaggtctggatgccgccttggggagttaggagattggcagacttaccctgtaccactctagccctactcctttgcccaagacagaaacacactgagatggataggagaatatgagcagttgataggaaagttctcagtggagtcaggatttaggttaggccaggagattgagaatataacagtttgtgtatgatgaaatggcatatttcacagaatgcagtaaaagcaggtagggtacaagtgcagcaacaggaagatgtcttttcttcattcagcaaacacttatttgagagcttaccatgtgctaggcacatacaaagataaataagatgcccttgatgatcctctatttaaaggagacatgtaaacaggttaacttagagtagagatggtgaatatgtgaacctgaggaaaggaagaaatagattaaattatctggagagagaggaaaagtcagcagaatggggacgagaatctttcggagctcagtgttctgataggagttatttccttgggcataggttccaagtatttttctaatataccatagaagccaggaaaactttcttctgttatctcaaatgatttaattactgacttgagtttgtgttgtctccttagacttgtgcaccatggacaattttgctgagggagatttcactgtggcggattatgccttgttagaagattgccctcacgtggatgattgtgtctttgctgctgaatttatgagcaatgattatgttcgtgtgactcagctttactgtgatggggtgggtgtgcaatataaagattatatccaaagtgagaggaatttggaatttgacatctgcagtatatggtgtagtaaaccaatttctgtcctgcaagattattgcgatgccattaaaataaacatcttctggccacttctgtttcaacatcaaaacagttccgtaatatcacgattgcatccctgtgtggacgccaacaattcacgtgcttctgagataaatttgaagaaactacaacatcttgagttgatggaagatattgtggatttggcaaagaaagttgctaatgattcattccttattggaggcttattgagaattggttgtaaaatagaaaataaaatcttggcaatggaagaagctctgaattggataaaatatgcaggcgatgtaacaattctaactaaattaggatcaattgacaattgttggcctatgttaagtattttctttactgaatacaagtaccacataactaaaattgtaatggaagactgcaatttgcttgaagaacttaaaactcaaagttgtatggattgtatagaggaaggagaactaatgaaaatgaaaggaaatgaagagttttccaaagaaagatttgatatagctattatctattacaccagagccattgaatatagacctgaaaactaccttctttatggtaaccgagctctttgttttcttcgtactggacagtttagaaatgcactcggtgatggaaagagagccactattctgaagaacacttggccaaagggtcattatcgttattgtgatgctctttctatgctgggggaatatgactgggccctgcaagcaaacataaaagctcaaaaactctgtaaaaatgaccctgagggaatcaaggatctaattcagcagcatgtaaagttacaaaaacaaatagaagacctacaaggtcgaacagcaaataaggatccaattaaagccttttatgaaaacagggcctacacacctaggagtttatcagcacctatatttactacttcacttaactttgtggagaaggaaagagatttcagaaaaattaatcacgaaatggccaacggtggtaatcagaatctaaaggtggcggatgaggcgttgaaggtagatgattgtgactgtcatcctgaattttcaccaccatcaagtcagcctccaaaacataaaggaaaacaaaaatctcgaaacaatgaatcagaaaagttcagttctagttcaccattgactttaccagcagatttgaagaacatcttggagaaacagttttctaaatcttccagagctgcacaccaggattttgctaatataatgaaaatgctgagaagcttaattcaagatggctatatggccttattggagcagcgttgccgcagcgctgcacaggcctttacagagttgctgaacggtttagatcctcaaaaaataaagcaattgaacctggccatgattaactatgttttggtcgtctatggacttgccatttctctccttggaataggacagcctgaggaattatctgaagccgaaaaccagtttaagaggattattgaacactaccccagtgagggccttgattgcttggcctactgtggaattggaaaagtgtatttgaaaaaaaacagatttctagaagctctcaatcactttgagaaagcaagaaccttgatttatcgtcttcctggagtgttaacttggcccacgagtaatgtgattattgaagagtctcagccacaaaaaataaagatgctgttagagaaatttgttgaagaatgcaagttccctccagtgccagatgccatttgttgctatcagaagtgccatggatattctaagatccagatatacataactgatccagactttaagggttttatacgcatcagctgttgccagtactgtaaaatagaatttcacatgaattgctggaagaagttaaaaactacaacctttaatgataaaattgacaaggattttctacaaggaatatgtcttacccctgactgtgaaggtgtcatttctaagattatcatcttcagcagtggtggtgaagttaaatgtgaatttgaacacaaggtcataaaagaaaaggttcctccaagacctattctgaaacagaaatgttctagcctagagaaactaagactgaaagaagacaaaaaattgaagagaaagatccaaaaaaaagaagcaaaaaagttagcacaagaaagaatggaggaggacttaagagaaagtaatccacccaaaaatgaagagcagaaagaaactgtagacaatgttcagcgttgtcagttccttgatgacagaattctacagtgtataaagcagtatgctgacaagattaaatccggcatacagaatacagccatgcttctcaaagaattgctttcttggaaagttttgagcacagaagactatacaacctgtttttctagcagaaattttctaaatgaagcagtggactatgttattcgccacttgattcaagaaaataacagagtaaagacaagaatatttctgcatgttttgagtgagcttaaagaagtggagcccaaattagccgcctggatccaaaaacttaatagctttggcttagatgccacaggaactttcttttctcgttatggagcatctcttaaactgcttgattttagtatcatgactttcctctggaatgagaaatatggtcacaaactagactctatagaaggaaagcaacttgattatttctctgagccagcatcattgaaggaagcccgttgtttaatatggctgctagaagaacacagagacaagttcccagcattgcatagtgctttagatgaattctttgatataatggacagccgctgtactgtgttaaggaaacaagatagtggtgaagcaccgtttagttcaaccaaggtgaaaaacaaaagcaagaaaaagaagccaaaggattcaaagcctatgttagttgggtctggaacaacttcagtaacttcaaataatgagatcatcacttcaagtgaagaccatagcaatcgaaattcagattctgcaggcccatttgcagtgcctgaccatcttcggcaagatgtagaagaattcgaagctctctatgaccaacacagtaacgaatatgttgtccgcaataagaagctatgggacatgaacccaaaacaaaaatgttcaactctatatgattacttctctcagtttttggaggaacatggtcccttggacatgagtaacaagatgttctctgcagaatatgagtttttcccagaagaaactcgacagatactagaaaaagcaggaggtttaaaaccttttctcttgggatgccctcgttttgttgtgattgacaactgtattgcactgaagaaggttgcatcacggctcaagaaaaaaaggaagaagaaaaacattaaaacaaaagtagaagaaatttcaaaagcaggggagtatgtacgagttaaactacaactgaatccagctgctagggaatttaaaccagatgtaaagtctaaaccagtgtcagattcatcttcagcaccagcttttgaaaatgtgaaacccaaacctgtgtctgcaaattctcccaagccagcttgtgaagatgtgaaggccaaaccagtatccgacaattcttctagacaagtttctgaggatgggcaacccaaaggggtctcttctaattctcctaaaccaggctctgaggatgcaaattacaagcgagtctcctgtaattcccccaaaccggttcttgaggatgtgaaaccaacttattgggctcaatcccatttggtcacaggatactgtacgtatcttcctttccagagatttgatatcacccagacaccgccagcatacataaacgtgttaccaggtttgccccagtacaccagcatatatacacccttggccagcctttctcctgaatatcagctaccaagatcagtaccagtggtgccgtcttttgtagccaatgacagagcagataaaaatgctgctgcctattttgagggtcatcatttgaatgctgagaatgttgctggtcaccagattgcctctgaaacacagatccttgagggctctttgggaatatctgtaaagtcacactgcagcacaggtgatgctcatacagtcctgagtgagtctaacagaaatgatgagcactgtggaaattctaacaacaaatgtgaagtaattccagaaagcaccagtgcagtaacaaacattccacacgtgcagatggttgccatacaggtatcttggaacataatacaccaagaagtcaatactgagccatataatccttttgaggaacgacaaggggaaatttcacggattgaaaaggagcaccaagtattacaagaccaacttcaagaagtgtatgaaaattatgagcagataaaacttaagggcttagaagagaccagggacctggaagagaagttgaaaaggcacttagaagaaaacaagatctcaaagacggaattagattggttccttcaagatttggaaagagaaattaaaaaatggcaacaggaaaaaaaagaaatccaagaaagactaaaatcactgaagaagaaaattaaaaaggtttcaaatgccagtgaaatgtatacccagaaaaatgatggaaaggaaaaggaacatgaattacatctggatcagtcccttgaaatcagcaacacacttacaaatgagaaaatgaaaatagaagagtatataaagaaagggaaagaggattatgaagagagtcatcagagagctgtggctgcagaggtatccgtacttgaaaactggaaggagagtgaagtgtataagctacagatcatggagtcacaagcagaagcctttctgaagaagctggggctgattagccgtgatcctgcagcatatcctgacatggagtctgatatacgttcatgggaattgtttctttctaatgttacaaaagaaattgagaaagcaaagtctcagtttgaagaacaaattaaggcaattaaaaatggttctcggctcagtgaactttctaaagtgcagatttctgagctttcatttcctgcctgtaacacggttcatcccgagttactccctgagtcttcaggccacgatggccaagggcttgtgacttctgcaagcgacgtgactggaaaccacgcagcacttcacagggatcctagtgtgttctctgctggtgattccccaggggaggctccttctgcgctgttgccagggccaccccctggtcagcctgaagccactcagctgacagggccaaaacgggctggccaggcagctctgtcagaacgaagccctgtggctgatcggaagcagcctgttcctccaggacgtgctgcgcgttcaagccagtctccaaaaaagccgttcaatagtattattgagcacctgtcagtggtattcccatgttacaacagcactgagcttgctggttttattaaaaaagtgcgaagcaaaaacaagaactcactctcaggattgagtattgatgaaattgtccaaagagtgacagaacacattctagatgaacagaaaaagaaaaagccaaacccaggaaaggacaagaggacttatgagcccagctctgccacccccgtgaccaggtcctcccagggctcaccctcggtggttgttgcaccatcacccaaaaccaaggggcagaaagcagaagatgtccctgtgaggattgcactgggtgcaagttcctgtgaaatatgccacgaggtgttcaaatcaaaaaacgtgcgtgtgctcaaatgtgggcacaagtatcacaaagggtgctttaagcagtggcttaaagggcagagcgcttgcccggcctgccagggtcgtgatctcctgacagaagagtcaccttctggaagaggctggcccagtcagaatcaggagctgccttcctgctcttctaggtagtcacacttcactaaagtgtcatccaccagtgtgttgaatccgaagaatgacaattttctaccactggtgtaaaaaacaaacatttgaagacccttgtgcattgtgtgtcacaaagctaaatacatggaaatcgttaatatcgctgatattaagtaatttccccactctgagtgaatactttgatgattgccaacagtggctaataaaatgacggctaccacactcatgggtcactggggctgcgcagggctctttgaggtgggtggcttcttttggaaagtactatgaacgtctcgaagcagtattctagtgataagaattcttaacatagccaagcgccccacgtttgttccccacgtttgttccccttttctgtttgaaaaacctgttctggtagctccacaagagagatgatactgactttttaaattttttacaagagtctgtattcctgatatgcctatatttttcctcaaagattctgcattttaaggatgggcataagcaaactatattttaataatttatagttaatgttaaaatattggctgatttagaccaaaagattcaaatctcctctttgtgaaatcccatctgcatttgattttttattattttatgttcccccgttagattgttttaagtgtttgcttttcatcttttatagatgtaatctgattttcaaaaatcattaacactttttaattagtatcgactaagactttttccccctggaatcgaggctgtgtgtccgtcatcccagcccccggttggagcctgctctttgaactccgctgccttccttagcagcttctgtcctcttctgtgagtcagtcagcgagtgcttgggatccgcatccagccgtgctgagcacacaacaggctgtgtgtggaaatggccaccaccattctccttccccaccccaccacaaaaagagaagctgtgtctttagacaaccctgaggtatctgtgttacaatcgttctgtgtttgatatttgtgtaaagtatgcatgcagtcttgtactgtgacctaagaacaaaactgtaactgcattagaaaccatgaaaaaattagatattgttttgtgacttttagacagtggtaaatatagaaccatgaattctggtcacattccatttctctccaacatgaaggatcaaaaaatgtttttcaatgtgttctttgttccactggaaacttagagtcatgagtttatgagctgatttggtcaccttcctctgcctttgttcactgtgagttctgatgtcttagtgacttagttcttagaagctcacgccttagtttgaaacagattctccacggtggtccccaaaacactgtctgcatatccataagaattgagcgctatgggtgttaacgtgcatgaggatcagtttgcagcagcaagtacaaaaggagaagaggaacatccgttgaatgagtgtgttttgtacataacttcagatacttgtgaacatgccttatatttgtccaacaactgtcagaataaagaacattctaaaatgag

SEQ ID NO: 1718 - protein, 2000 aa, Homo sapien
MDNFAEGDFTVADYALLEDCPHVDDCVFAAEFMSNDYVRVTQLYCDGVGVQYKDYIQSERNLEFDICSIWCSKPISVLQDYCDAIKINIFWPLLFQHQNSSVISRLHPCVDANNSRASEINLKKLQHLELMEDIVDLAKKVANDSFLIGGLLRIGCKIENKILAMEEALNWIKYAGDVTILTKLGSIDNCWPMLSIFFTEYKYHITKIVMEDCNLLEELKTQSCMDCIEEGELMKMKGNEEFSKERFDIAIIYYTRAIEYRPENYLLYGNRALCFLRTGQFRNALGDGKRATILKNTWPKGHYRYCDALSMLGEYDWALQANIKAQKLCKNDPEGIKDLIQQHVKLQKQIEDLQGRTANKDPIKAFYENRAYTPRSLSAPIFTTSLNFVEKERDFRKINHEMANGGNQNLKVADEALKVDDCDCHPEFSPPSSQPPKHKGKQKSRNNESEKFSSSSPLTLPADLKNILEKQFSKSSRAAHQDFANIMKMLRSLIQDGYMALLEQRCRSAAQAFTELLNGLDPQKIKQLNLAMINYVLVVYGLAISLLGIGQPEELSEAENQFKRIIEHYPSEGLDCLAYCGIGKVYLKKNRFLEALNHFEKARTLIYRLPGVLTWPTSNVIIEESQPQKIKMLLEKFVEECKFPPVPDAICCYQKCHGYSKIQIYITDPDFKGFIRISCCQYCKIEFHMNCWKKLKTTTFNDKIDKDFLQGICLTPDCEGVISKIIIFSSGGEVKCEFEHKVIKEKVPPRPILKQKCSSLEKLRLKEDKKLKRKIQKKEAKKLAQERMEEDLRESNPPKNEEQKETVDNVQRCQFLDDRILQCIKQYADKIKSGIQNTAMLLKELLSWKVLSTEDYTTCFSSRNFLNEAVDYVIRHLIQENNRVKTRIFLHVLSELKEVEPKLAAWIQKLNSFGLDATGTFFSRYGASLKLLDFSIMTFLWNEKYGHKLDSIEGKQLDYFSEPASLKEARCLIWLLEEHRDKFPALHSALDEFFDIMDSRCTVLRKQDSGEAPFSSTKVKNKSKKKKPKDSKPMLVGSGTTSVTSNNEIITSSEDHSNRNSDSAGPFAVPDHLRQDVEEFEALYDQHSNEYVVRNKKLWDMNPKQKCSTLYDYFSQFLEEHGPLDMSNKMFSAEYEFFPEETRQILEKAGGLKPFLLGCPRFVVIDNCIALKKVASRLKKKRKKKNIKTKVEEISKAGEYVRVKLQLNPAAREFKPDVKSKPVSDSSSAPAFENVKPKPVSANSPKPACEDVKAKPVSDNSSRQVSEDGQPKGVSSNSPKPGSEDANYKRVSCNSPKPVLEDVKPTYWAQSHLVTGYCTYLPFQRFDITQTPPAYINVLPGLPQYTSIYTPLASLSPEYQLPRSVPVVPSFVANDRADKNAAAYFEGHHLNAENVAGHQIASETQILEGSLGISVKSHCSTGDAHTVLSESNRNDEHCGNSNNKCEVIPESTSAVTNIPHVQMVAIQVSWNIIHQEVNTEPYNPFEERQGEISRIEKEHQVLQDQLQEVYENYEQIKLKGLEETRDLEEKLKRHLEENKISKTELDWFLQDLEREIKKWQQEKKEIQERLKSLKKKIKKVSNASEMYTQKNDGKEKEHELHLDQSLEISNTLTNEKMKIEEYIKKGKEDYEESHQRAVAAEVSVLENWKESEVYKLQIMESQAEAFLKKLGLISRDPAAYPDMESDIRSWELFLSNVTKEIEKAKSQFEEQIKAIKNGSRLSELSKVQISELSFPACNTVHPELLPESSGHDGQGLVTSASDVTGNHAALHRDPSVFSAGDSPGEAPSALLPGPPPGQPEATQLTGPKRAGQAALSERSPVADRKQPVPPGRAARSSQSPKKPFNSIIEHLSVVFPCYNSTELAGFIKKVRSKNKNSLSGLSIDEIVQRVTEHILDEQKKKKPNPGKDKRTYEPSSATPVTRSSQGSPSVVVAPSPKTKGQKAEDVPVRIALGASSCEICHEVFKSKNVRVLKCGHKYHKGCFKQWLKGQSACPACQGRD

SEQ ID NO: 1719 - DNA, 2033 bp, Homo sapien
gaattccgggactgagctcttgaagacttgggtccttggtcgcaggtggagcgacgggtctcactccattgcccaggccagagtgcgggatatttgataagaaacttcagtgaaggccgggcgcggtgctcatgcccgtaatcccagcattttcggaggccgaggcatcatggaccgatctaaagaaaactgcatttcaggacctgttaaggctacagctccagttggaggtccaaaacgtgttctcgtgactcagcaatttccttgtcagaatccattacctgtaaatagtggccaggctcagcgggtcttgtgtccttcaaattcttcccagcgcgttcctttgcaagcacaaaagcttgtctccagtcacaagccggttcagaatcagaagcagaagcaattgcaggcaaccagtgtacctcatcctgtctccaggccactgaataacacccaaaagagcaagcagcccctgccatcgcacctgaaaataatcctgaggaggaactggcatcaaaacagaaaaatgaagaatcaaaaagaggcagtggctttggaagactttgaaattggtcgccctctgggtaaaggaaagtttggtaatgtttatttggcaagagaaaagcaaagcaagtttattctggctcttaaagtgttatttaaagctcagctggagaaagccggagtggagcatcagctcagaagagaagtagaaatacagtcccaccttcggcatcctaatattcttagactgtatggttatttccatgatgctaccagagtctacctaattctggaatatgcaccacttggaacagtttatagagaacttcagaaactttcaaagtttgatgagcagagaactgctaacttatataacagaattgcaaatgccctgtcttactgtcattcgaagagagttattcatagagacattaagccagagaacttacttcttggatcagctggagagcttaaaattgcagattttgggtggtcagtacatgctccatcttccaggaggaccactctctgtggcaccctggactacctgccccctgaaatgattgaaggtcggatgcatgatgagaaggtggatctctggagccttggagttctttgctatgaatttttagttgggaagcctccttttgaggcaaacacataccaagagacctacaaaagaatatcacgggttgaattcacattccctgactttgtaacagagggagccagggacctcatttcaagactgttgaagcataatcccagccagaggccaatgctcagagaagtacttgaacacccctggatcacagcaaattcatcaaaaccatcaaattgccaaaacaaagaatcagctagcaaacagtcttaggaatcgtgcagggggagaaatccttgagccagggctgccatataacctgacaggaacatgctactgaagtttattttaccattgactgctgccctcaatctagaacgctacacaagaaatattttgtttttactcagcaggtgtgccttaacctccctattcagaaagctccacatcaataaacatgacactctgaagtgaaagtagccacgagaattgtgctacttatactggaacataatctggaggcaaggttcgactgcagtcgaaccttgcctccagattatgaaccagtataagtagcacaattctcgtggctactttcacttcagagtgtcatgtttattgatgtggagctttctgaatagggaggttaaggcacacctgctgagtaaaacaaatatttcttgtgtagcgttcttaggaatctggtgtctgtccggccccggtaggcctgttgggtttctagtcctccttaccatcatctccatatgagagtgtgaaaataggaacacgtgctctacctccatttagggatttgcttgggatacagaagaggccatgtgtctcagagctgttaagggcttatttttttaaaacattggagtcatagcatgtgtgtaaactttaaatatgcaggccttcgtggctcgag

SEQ ID NO: 1720 - protein, 402 aa, Homo sapien
MDRSKENCISGPVKATAPVGGPKRVLVTQQFPCQNPLPVNSGQAQRVLCPSNSSQRVPLQAQKLVSSHKPVQNQKQKQLQATSVPHPVSRPLNNTQKSKQPLPSHLKIILRRNWHQNRKMKNQKEAVALEDFEIGRPLGKGKFGNVYLAREKQSKFILALKVLFKAQLEKAGVEHQLRREVEIQSHLRHPNILRLYGYFHDATRVYLILEYAPLGTVYRELQKLSKFDEQRTANLYNRIANALSYCHSKRVIHRDIKPENLLLGSAGELKIADFGWSVHAPSSRRTTLCGTLDYLPPEMIEGRMHDEKVDLWSLGVLCYEFLVGKPPFEANTYQETYKRISRVEFTFPDFVTEGARDLISRLLKHNPSQRPMLREVLEHPWITANSSKPSNCQNKESASKQS

SEQ ID NO: 1721 - DNA, 3686 bp, Homo sapien
aggacagtacagtgccttacttgcaagatgtgcaagcacacaagacctatgaagaactgtctcccaacaaaggatacatgcagaaggagaaaaaactctcttaaacaaaaagaggcagagccggcagggaccgagcgggtgcctcagtctccttcccctcccctcgcctgtcctcgccatcttcttctcacagccggaccggaactatgtgatcccggaagttccgggtcctttggccctatatgatcccggaagttccggggcttttggacctctgtgattccggaagttccggggcgttccggggcgttctggggcctttggagcgtgggataagcagtaatggcggaggctgcagctcccggaacaacagtcacaacatcgggagcaggagcagcagcggcggaggcggcggagacggcggaagcagtctccccgactccgatccccacagtcaccgccccgtccccgagggcgggcggaggggtcggcggcagcgacggcagcgacggtagtggcggcaggggcgacagtggcgcgtatgacggcagcggtgcgtgcggcggcagcgacgcgtgcgatggcagcggcgacagcagcggcgacagctggactaaacaggtcacttgtagatattttaagtatgggatttgtaaggaaggagataactgtcgctactcgcatgacctctctgaccgtctgtgtggtgtagtgtgcaagtattttcagcgagggtgctgtgtttatggagaccgctgcagatgtgaacatagcaagccattgaaacaggaagaagcaactgctacagagctaactacaaagtcatcccttgctgcttcctcaagtctctcatcaatagttggaccacttgttgaaatgaatacaaacgaagctgagtcaagaaattcaaattttgcaactgtagtagcaggttcagaggactgggcgaatgccattgagtttgttcctgggcaaccctactgtggccgtactgtgccttcctgcactgaagcacccctgcagggctcagtgaccaaggaagaatcagaggaagagcaaaccgccgtggaaacaaagaagcagctgtgcccctatgctgcagtgggacagtgccgatatggggagaactgtgtgtatctccacggagatttatgtgacatgtgtgggctgcaggtcctgcatccgatggatgctgcccagagatcacagcatatacaagcgtgcattgaagcccatgagaaagacatggagttctcatttgctgtgcagcgcagcaaggacaaggtgtgtgggatctgcatggaggtggtctatgagaaagccaaccccaacgagcaccgcttcgggatcctctccaactgcaaccacaccttctgtctcaagtgcattcgcaagtggaggagtgctaaggaatttgagagcaggatcgtcaagtcctgcccacaatgccgaatcacatctaactttgtcattccaagtgagtactgggtggaggagaaagaagagaagcagaaactcattcagaaatacaaggaggcaatgagcaacaaggcatgcaagtattttgatgaaggacgtgggagctgcccatttggagagaactgtttttacaagcatatgtaccctgatggccgcagagaggagccacagagacagcaagtgggaacatcaagcagaaacccaggccaacaaaggaaccacttctgggaattctttgaggaaggagcgaacagcaacccctttgacgatgaagaagaggctgtcacctttgagctgggtgagatgttgcttatgctttaggctgcaggtggggacgacaaactgacagactctgaaaatgagtgggacttgttttgtgatgaagaattttatgtcttagatctatagaaaccttgcgtagtgtgtgagctggtctgctgaccccagatagcagctgtcccctgtggtggtgtggcagtgcctatgttctctcctaggcagacctatcaactccaggtgctgcggttaagaatatgtacccagggcctgtcttgtcaacccctcacctttccccaaggagtgtgttgttttccctgttggaaaaagttacaaaaataaatgttaaaggttttttttgttttttgttttattgagacagagtcccactctgtcacccaggctggagtgcagtggtgcaatcttggctcactgcaacctccgtcttccgggttcaagccattctcctgtctcagcctcccaagttgctgggactacaggtgcatgctacaatgcccagctaatttttctcatttttagtagaaacggggtttcaccatattggtcaggctggtctcgaactcctgacctcaggtgatccacctgccactaccttccaaagtgctgggattacaggcgtcagccaccatgcccagccttaaagttagttttttgtaacaggcatgagccaccgcgcctggctttaaagttcgttttttgtaacaggcataagccactgtgcctggccttaaagttagtttttttgtaacacgaatttaactgttggacagttagtttagatgtgttgcatcatctgttttcaaccagattgtgtttatggacttttcacacactaattttgaggaccccaggttcaaaagtaaaagcagtggccctgctttggggtccaataataggagtgatgggtgaagggacctaagctggccagtagccttctgctccagacatgggacgcggatccttgaggtttctggttaaatctgcacatctgtgtttttatatctgttccctacccctgtaatccctaccgcatgcactagttctgtagttttggtctctcgtttaattgtatgcaagtagtactactgggtaaccagagccaagcgtgaatgtgttcagatttctactgttttgcatgataggaaaattgagaaagaatacatataaaagatatagaggcataacatcaatgcagagttggaagttgacctccacggggtgacatggtgtgtgtgagtgtgggtgtgtgagtgtgggtgtgtgataagcttctcaaacctgcatagatgcagtattcttggctttggtagaaagccttggtttaaggctgggcgcggtggctcacgcctgtaatcccagcactttgggaggctgaggcggccggatcacaaggccaggagatcgagaccatcctgtgaatggcgaaaccctgtctctactaaaaatacaaaaaattagccgggcgtagtggcgggcgcctgtagtcccagctactctggaggctgaggcgggagaatggtgtgaacctgggaggcggagcttgcaatgaactgagaatgtgccactggactcccagcctgggtgacagagcgagactctgtctcaaacaaaaaaaaacaaaaacggaaacccttggtttaggggtttaagtcttatgtggtggttaagatcttaaaggacaaagcagtatattggtagttatcaatatagcagtactagctctgtttatataaatagagaaatggagttagccatagaggttaaaactacctggttatcccatatattaacccaaactgggtcttggatacacagttgtatttaatgttttacgatctagcctttccagtataggcacttcctgaaaaacctttgtcctcatttggggcattttgttgttgggtttcgcc

SEQ ID NO: 1722 - protein, 485 aa, Homo sapien
MAEAAAPGTTVTTSGAGAAAAEAAETAEAVSPTPIPTVTAPSPRAGGGVGGSDGSDGSGGRGDSGAYDGSGACGGSDACDGSGDSSGDSWTKQVTCRYFKYGICKEGDNCRYSHDLSDRLCGVVCKYFQRGCCVYGDRCRCEHSKPLKQEEATATELTTKSSLAASSSLSSIVGPLVEMNTNEAESRNSNFATVVAGSEDWANAIEFVPGQPYCGRTVPSCTEAPLQGSVTKEESEEEQTAVETKKQLCPYAAVGQCRYGENCVYLHGDLCDMCGLQVLHPMDAAQRSQHIQACIEAHEKDMEFSFAVQRSKDKVCGICMEVVYEKANPNEHRFGILSNCNHTFCLKCIRKWRSAKEFESRIVKSCPQCRITSNFVIPSEYWVEEKEEKQKLIQKYKEAMSNKACKYFDEGRGSCPFGENCFYKHMYPDGRREEPQRQQVGTSSRNPGQQRNHFWEFFEEGANSNPFDDEEEAVTFELGEMLLML

SEQ ID NO: 1723 - DNA, 3273 bp, Homo sapien
actggagtctctgagcagccattgaaggggaaggaactgcgggtgtgtgtgtgtatgtgtgtgtgtatgtgtgtgcgcgcgtgcgtgcgtgtgtgtgcgcgcgctagtgtgtggacaaggaggtgggggcagctgagttagagtcccaactcttggactccatttgctattctcttctttctcccccacacctatctggtggtggtagtgggcgtttatatttgcgttccttttcattcatttctaaatctcttaaaaattttgggttgggggtattggggaaggcaggaaagggaaaaggagagtagtagctgaagagcaagaggaggacatggagatgaagaagaagattaacctggagttaaggaacagatccccggaggaggtgacagagttagtccttgataattgcctgtgtgtcaatggggaaattgaaggcctgaatgatactttcaaagaactagaatttctgagtatggctaatgtggaactaagttcgctggcccggcttcccagcttaaataaacttcgaaaattggagcttagtgataatataatttctggaggcttggaagtcctggcagagaaatgtccaaatcttacctacctcaatctgagtggaaacaaaataaaagatctcagtacagtagaagctctgcaaaatcttaaaaatttgaaaagtcttgacctgtttaactgtgagatcacaaacctggaagattatagagaaagtatttttgaactactgcagcaaatcacatacttagatggatttgatcaggaggataatgaagcgccggactctgaagaggaggatgatgaggatggcgatgaagatgatgaagaggaagaggaaaatgaagctggtccaccggaaggatatgaggaagaggaggaggaagaggaagaggaggatgaggatgaggatgaagatgaagatgaagcaggttcagagttgggagagggagaagaggaagtgggcctctcatacttaatgaaagaagaaattcaggatgaagaagatgatgatgactatgttgaagaaggggaagaagaggaagaagaggaagaaggaggtcttcgaggggagaagaggaaacgagatgctgaagacgatggagaggaagaagatgactagatcattctaagaccagattctctaatgtttctgggtgtgcaatagagtgatcacatctttgtttcttcatgtacgatagctatccctacagaagataatgtgtaactttttataggaaaagtgtggttttactatttttgccttatcattccaaataagaactagtctgttaatgatcatattgtatgtagagaaaaattttcattgactcccattgtggaattccctagcaatttatttagacttaattttttaaattcaagcttactgtattagtcatttttagcccataattaaaacatgatcacttttacacaggtgtagtatggtgcatttcattccttatttataaattaactgaaattacagtttgctataatataaaatgacaatagtctcttgagtggtaagttggttatttttttagaggtgatccaggaatctttagtttgaaggcagttaccttttttttttttttttttttgactaagagtgtttggttgcttttttgtcacaagtaacttggaaaatagaagcagaatagtaaaggttctattcagcaacatagttcatggattttgtggaggttctattcagtaatatggttcatggatttagtggtgactgataagattttatttttgaaggaaaaattgcttatactaagtccagagacatgcaggtgagcccttttgtcaggctgcaaatcatgacatgccgatggttgtttattttgtttttaggtgtgcattctttttcttcttagcaattcctttatgatcaccttcccttcttgtttcactccctcccgctctctcaaaaggaacttgggaaacttgtgaaacccaggaaaacctttagtcttatacctcaactacctttcagtcctgtctgggttttaaataagtgaagtagaagaaattgagtattttctgacataagaatatattatcaatacagttttatgcagtaagctctccttaccataaatgtttcttggttgacaacatctaagacaatattagtgggatgaagaaagaaaagcaggggtgcttttggaagcagtgttagtgttcctcaaaagtcggaacaattgcctgttgatatattaataagacattaaagtcaaattttaatgttggcctctcaaatgatttggataccactctgcaaagtatttctaacctttaattcccagttttaaaacagatataataatagcatttaattggaatatactaggcagctggaaaagtatttgaaactaaattgacattaaaattaagatttgttttcaagtggatgtccattaaaagtagaaaaatatttgggataagtgagtgtgtatttccttacatggctactaaataaaatataatgagtatacaagtatatctcctcttttgctatggaggctccatgttcaaggcaatggctttttaaatcttggctatctaaaattttttccctttgttttgaatatttgtaagtttttaagaagttagtgtcagcaaattaattgaagttatgcttctatactgggacatatttaaatactgagtatagtactgctgctactgcttctacaatgtaaaatgtatgacttggtgttttaaagtaaaaattatgatgttacttgtggagaaactaaaaatgttgtacaactgaccgaaagaaaacccttggggataagtttagtgaggggattggaatccccaaaaagataacatttttcttctgcttttaaaaactgaaattccctgttctagttcctaacaattctcattacatactatgccagattacaaaatacttatttttaaaatgaaatctatatattgactttcttatcaatcatcttactgtgcaatcaaaattagagtactttggtttgaaaacaacacttagagcctccagataacttttaagacttatttagctttgtgggtggtattttcatgcaaataagtaagggtgggttttatattttgtagaagttttcggtcctattttaatgcttttgtatggcagtatgtatatattgtgttaagttcctcaagaatctccttaaaaactttgaagttaatacttttgtgcaactgtgttttgaataaagccatgacagtgttaaaaac

SEQ ID NO: 1724 - protein, 268 aa, Homo sapien
MEMKKKINLELRNRSPEEVTELVLDNCLCVNGEIEGLNDTFKELEFLSMANVELSSLARLPSLNKLRKLELSDNIISGGLEVLAEKCPNLTYLNLSGNKIKDLSTVEALQNLKNLKSLDLFNCEITNLEDYRESIFELLQQITYLDGFDQEDNEAPDSEEEDDEDGDEDDEEEEENEAGPPEGYEEEEEEEEEEDEDEDEDEDEAGSELGEGEEEVGLSYLMKEEIQDEEDDDDYVEEGEEEEEEEEGGLRGEKRKRDAEDDGEEEDD

SEQ ID NO: 1725 - DNA, 5600 bp, Homo sapien
ggagtgggccaggccgccagccccgccagccccgccagccccgccagccccgcgatggcttgggccgcgctcctcggcctcctggccgcactgttgctgctgctgctactgagccgccgccgcacgcggcgacctggtgagcctcccctggacctgggcagcatcccctggttggggtatgccttggactttggaaaagatgctgccagcttcctcacgaggatgaaggagaagcacggtgacatctttactatactggttgggggcaggtatgtcaccgttctcctggacccacactcctacgacgcggtggtgtgggagcctcgcaccaggctcgacttccatgcctatgccatcttcctcatggagaggatttttgatgtgcagcttccacattacagccccagtgatgaaaaggccaggatgaaactgactcttctccacagagagctccaggcactcacagaagccatgtataccaacctccatgcagtgctgttgggcgatgctacagaagcaggcagtggctggcacgagatgggtctcctcgacttctcctacagcttcctgctcagagccggctacctgactctttacggaattgaggcgctgccacgcacccatgaaagccaggcccaggaccgcgtccactcagctgatgtcttccacacctttcgccagctcgaccggctgctccccaaactggcccgtggctccctgtcagtgggggacaaggaccacatgtgcagtgtcaaaagtcgcctgtggaagctgctatccccagccaggctggccaggcgggcccaccggagcaaatggctggagagttacctgctgcacctggaggagatgggtgtgtcagaggagatgcaggcacgggccctggtgctgcagctgtgggccacacaggggaatatgggtcccgctgccttctggctcctgctcttccttctcaagaatcctgaagccctggctgctgtccgcggagagctcgagagtatcctttggcaagcggagcagcctgtctcgcagacgaccactctcccacagaaggttctagacagcacacctgtgcttgatagcgtgctgagtgagagcctcaggcttacagctgcccccttcatcacccgcgaggttgtggtggacctggccatgcccatggcagacgggcgagaattcaacctgcgacgtggtgaccgcctcctcctcttccccttcctgagcccccagagagacccagaaatctacacagacccagaggtatttaaatacaaccgattcctgaaccctgacggatcagagaagaaagacttttacaaggatgggaaacggctgaagaattacaacatgccctggggggcggggcacaatcactgcctggggaggagttatgcggtcaacagcatcaaacaatttgtgttccttgtgctggtgcacttggacttggagctgatcaacgcagatgtggagatccctgagtttgacctcagcaggtacggcttcggtctgatgcagccggaacacgacgtgcccgtccgctaccgcatccgcccatgacacagggagcagatggatccacgtgctcgcctctgcccagcctgccccagcctgccccagcctcccagctttctgtgtgcacagttggcccgggtgcaggtgctagcattaccacttccctgcttttctcccagaaggctgggtccaggggagggaaaagctaagagggtgaacaaagaaaagacattgaaagctctatggattatccactgcaaagttttctttccaaaatcaggctttgtctgctcccaattcacctcgttactctcacctcgtgatatccacaaatgctattcagataaggcagaactaggagtcttcactgctctgcccccaactcccggaggtgtcaccttcctagttcttatgagctagcatggcccgggccttatccagtcaaagcggatgctggccacagaaaggccactcaggatgtcctttgtgtccattgatgtcattcagcagtcagtcccccaataatccttaaactagctaaaaccaaaggagtcccttagaagatctgcttccctggggccccatttgccagattgccccattgctcacactacttgagaaaatgcaggagagcttcccccaaggctgatgcattcccggtgcagaacaggggcaccctccaaacactgggctctgaggagtggagttctctgttctagagtgacaggcaccagatgggatgggctttctcagtgtcagcactcaggtagggagctaaggaagacacagcccagacaagatggctggaaggagccagccaggactccttagactgatcaagccaaaaaagaaggtgccgatttcatgcattctagtgcagaagccccaactgtgatcacgatccagtctgcagacgtgttttgtttggacttcacttaaaaaaatgccttagttgttatcatctttgggagagttcattcaaaatgtccagcttctcttgaaaacttggtatatctggccacactgggctcacattcccaagggtaactcttggccagagctgagtggcagccgcctcccttatgcaggacatgtgctctcggcttcaccagggttctgaccgggtctgcttctgcattcacagcgcctcctggacctgaaggcatctgagtgtgagaccctgttctaactcttagaagtgacattgtaagaggtggtggggaccagctaattggtccaacccagcctgagtgcaccaccctttgaacaaatgtatcagtgatgaaaatttgcctttgccccggcttgcctgtaatcccagcactttgggaggccgaggtgggcggatcacttgaggtcgggagttcaagaccagcctggccaacatggcgaaaccccgtctctactaaacataaaaaaattagtcaggtgtggcggtgcgtgcctgtaatcccagctattcaggaggctgaggcaccagaattgcttgaacccaggaggtggaggttgcagtgaactgagactgcgccacggcactccagcctgggcgacagagcaagactctgtctcaataaataaataattaattaaaataaaaaacagcttaaagagaaaaatggcctgcaaaccttttttatgatgctatttttattaatataaagtcctgtttattgagaccctttaaatgcctgcgagagaccctacagacagtatgtctactcctcacagcatctctatgaagagaaggagggttgtgcccacttcatagatgagaaaactgagaggtgaggtgacttgcctggggccacatagctcataagctgtagaactctgcaggcagatttactgtcccaggagcaaatgctggatgagcaactcctgttctttgggctcaaggggactggtgatgggacaattcttctcgacttcaggagctgacagagccagaggcacctaaacttgggtacatcttgtaagacacataatgaggtccctctagctttagctggagggagataaaagaaccccagacctctgaatgtcccagaggctagtctcttctcagagcagcactggggtttgggggcttccctgggcctcagcctccaggcacccccaggattcccagagagacgctgtgattggcaggaggcaggatatccccagggaaacccatcttcacgcctgggtgacccccactgccgcctccttcttaactctgcaggaaatcagagctggcagcctccagtgggaggacagagccggtttccgtggcaaccctcagctgcctcatcgtggctgggaagggaaggaagcaagccggcagaaatagctatggaaggtcttgcgcaggctgcaaccctggtgtgctgggcgaaaacccttatgactccccccttccaaatcaggctgggttgtcactgagactagattctcacctgccttcaaagaagggccaattccctttaaaggtcgcacctccttggaaccacagtcattagtgaattacactcaaggaaaagatgtgctcccaccaggcagctccagctgttacctgagatactgaagtgcagctcaggagacgattatttaaacctgcccttgttttaatcgttatttttctctttaaaaaaaatagaagctataaagaaaagagggagagatgagtgggttagctacctgctatgcgctagttaggaagttacctggatgccattgtatttcttcatcccttgcttaagaatcaaaattactggacatatgttaggaatactctttctttctttctttctttttaagctcagtggcaagaatgaaatactctttttttttttttttttttgagatggagtctcgctctgctgcccaggctagagtgcagtggcgtgatctcggctcactgcaagctctgcctcccgtgttcacaccattctcctgcctcagcctcctgagtagctgggactacaggcacccgccaccacacccggctaatttttggatttttagtagagatgggatttcaccgtattagccaggatggtcttgatctcctgagctcgtgatctgcccgcctcggcctcccaaagtgctgggattacaggtgtgagccaccgcgcccagccaagaataaaatactcttaagttgatctaatgaagtgtttccttaccattgtgattattgttactattatttgctatattttaatattgttgtttaccaaatattctcctttaaacagactcgctttttaaacttttttttttttttttgagacggagtttcacgcttattgcccaggctggagtgcaatggcacgatctcagctcaccacaacctccacctcctgggtttaagcaatgcttctgcctcagcttcccaagtagctgagattacaggcgcacaccaccacgcccaactgatttttgtatttttagtagagacggggtttccccatgttggtcaggctggtctcgaactcctgacctcgtgatttgcctgcctgggcctcccaaagtgctaggattacaggcatgagccaccatgcccggcctaaactttgtttttaaaatgaactttttttccccccaattgctgccaatagtggataacatgtatcactcactgccaaaaatagaaagtgaccatgaaaaataaattcgctggggaagggggctccatgctggtgtggccaaggctgagagctctctcttctctgttacaaaacgagataagcaagtgttagaattgccttaaggccacactggcatctccctgaccttctccagggacagaagcaggagtaagtttctcatcccatgggcgaccagggccatctcctcccaccagtggcccccactcacagggagctggcaatgccctacctgcctgttctccagatggagaaacaggctctgagatttcacaggtcttgcccaaagtcattgattttgatgattaaaaagaataaacacagtgtttcctgagtagcagtgattgttatgccttgctattttaataaagattctattttcgtataacattgtcaagtggaaacatgctgaaatctattaaaccatctttgtttgtg

SEQ ID NO: 1726 - protein, 500 aa, Homo sapien
MAWAALLGLLAALLLLLLLSRRRTRRPGEPPLDLGSIPWLGYALDFGKDAASFLTRMKEKHGDIFTILVGGRYVTVLLDPHSYDAVVWEPRTRLDFHAYAIFLMERIFDVQLPHYSPSDEKARMKLTLLHRELQALTEAMYTNLHAVLLGDATEAGSGWHEMGLLDFSYSFLLRAGYLTLYGIEALPRTHESQAQDRVHSADVFHTFRQLDRLLPKLARGSLSVGDKDHMCSVKSRLWKLLSPARLARRAHRSKWLESYLLHLEEMGVSEEMQARALVLQLWATQGNMGPAAFWLLLFLLKNPEALAAVRGELESILWQAEQPVSQTTTLPQKVLDSTPVLDSVLSESLRLTAAPFITREVVVDLAMPMADGREFNLRRGDRLLLFPFLSPQRDPEIYTDPEVFKYNRFLNPDGSEKKDFYKDGKRLKNYNMPWGAGHNHCLGRSYAVNSIKQFVFLVLVHLDLELINADVEIPEFDLSRYGFGLMQPEHDVPVRYRIRP

SEQ ID NO: 1727 - DNA, 3319 bp, Homo sapien
ctacctcttcctctccacgcggttgagaagaccggtcggcctgggcaacctgcgctgaagatgccgggaaaactccgtagtgacgctggtttggaatcagacaccgcaatgaaaaaaggggagacactgcgaaagcaaaccgaggagaaagagaaaaaaagagaagccaaaatctgataagactgaagagatagcagaagaggaagaaactgttttccccaaagctaaacaagttaaaaagaaagcagagccttctgaagttgacatgaattctcctaaatccaaaaaggcaaaaaagaaagaggagccatctcaaaatgacatttctcctaaaaccaaaagtttgagaaagaaaaaggagcccattgaaaagaaagtggtttcttctaaaaccaaaaaagtgacaaaaaatgaggagccttctgaggaagaaatagatgctcctaagcccaagaagatgaagaaagaaaaggaaatgaatggagaaactagagagaaaagccccaaactgaagaatggatttcctcatcctgaaccggactgtaaccccagtgaagctgccagtgaagaaagtaacagtgagatagagcaggaaatacctgtggaacaaaaagaaggcgctttctctaattttcccatatctgaagaaactattaaacttctcaaaggccgaggagtgaccttcctatttcctatacaagcaaagacattccatcatgtttacagcgggaaggacttaattgcacaggcacggacaggaactgggaagacattctcctttgccatccctttgattgagaaacttcatggggaactgcaagacaggaagagaggccgtgcccctcaggtactggttcttgcacctacaagagagttggcaaatcaagtaagcaaagacttcagtgacatcacaaaaaagctgtcagtggcttgtttttatggtggaactccctatggaggtcaatttgaacgcatgaggaatgggattgatatcctggttggaacaccaggtcgtatcaaagaccacatacagaatggcaaactagatctcaccaaacttaagcatgttgtcctggatgaagtggaccagatgttggatatgggatttgctgatcaagtggaagagattttaagtgtggcatacaagaaagattctgaagacaatccccaaacattgcttttttctgcaacttgccctcattgggtatttaatgttgccaagaaatacatgaaatctacatatgaacaggtggacctgattggtaaaaagactcagaaaacggcaataactgtggagcatctggctattaagtgccactggactcagagggcagcagttattggggatgtcatccgagtatatagtggtcatcaaggacgcactatcatcttttgtgaaaccaagaaagaagcccaggagctgtcccagaattcagctataaagcaggatgctcagtccttgcatggagacattccacagaagcaaagggaaatcaccctgaaaggttttagaaatggtagttttggagttttggtggcaaccaatgttgctgcacgtgggttagacatccctgaggttgatttggttatacaaagctctccaccaaaggatgtagagtcctacattcatcgatccgggcggacaggcagagctggaaggacgggggtgtgcatctgcttttatcagcacaaggaagaatatcagttagtacaagtggagcaaaaagcgggaattaagttcaaacgaataggtgttccttctgcaacagaaataataaaagcttccagcaaagatgccatcaggcttttggattccgtgcctcccactgccattagtcacttcaaacaatcagctgagaagctgatagaggagaagggagctgtggaagctctggcagcagcactggcccatatttcaggtgccacgtccgtagaccagcgctccttgatcaactcaaatgtgggttttgtgaccatgatcttgcagtgctcaattgaaatgccaaatattagttatgcttggaaagaacttaaagagcagctgggcgaggagattgattccaaagtgaagggaatggtttttctcaaaggaaagctgggtgtttgctttgatgtacctaccgcatcagtaacagaaatacaggagaaatggcatgattcacgacgctggcagctctctgtggccacagagcaaccagaactggaaggaccacgggaaggatatggaggcttcaggggacagcgggaaggcagtcgaggcttcaggggacagcgggacggaaacagaagattcagaggacagcgggaaggcagtagaggcccgagaggacagcgatcaggaggtggcaacaaaagtaacagatcccaaaacaaaggccagaagcggagtttcagtaaagcatttggtcaataattagaaatagaagatttatatagcaaaaagagaatgatgtttggcaatatagaactgaacattatttttcatgcaaagttaaaagcacattgtgcctccttttgaccacttgccaagtccctgtctctttcagacacagacaagcttcatttaaattatttcatctgatcattatcatttataactttattgttacttcatcagtttttccttttgaaaggtgtatgaattcattacatttttattctaatgtattatctgtagattagaagataaaatcaagcatgtatctgcctatactttgtgagttcacctgtctttatactcaaaagtgtcccttaatagtgtccttccctgaaataaatacctaagggagtgtaacagtctctggaggaccactttgagcctttggaagttaaggtttcctcagccacctgccgaacagtttctcatgtggtcctattatttgtctactgagacttaatactgagcaatgttttgaaacaagatttcaaactaatctgggttgtaatacagtttataccagtgtatgctctagacttggaagatgtagtatgtttgatgtggattacctatacttatgttcgttttgatacatttttagcttctcattataaggtgattcatgctttagtgaattcttcatagatagtatatataaaagtacattttaatagaaagccagggttttaaggaatttcacatgtataaggtggctccatagctttatttgtaagtaggctggataaatggtgcttaaatggtaatgtactccacttcttcctattggaagattaacattatttaccaagaaggacttaagggagtaaggggcgcagattagcattgctcaagagtatgtaaaaaaaaaaaaaaaaaaaaaaa

SEQ ID NO: 1728 - protein, 715 aa, Homo sapien
MNSPKSKKAKKKEEPSQNDISPKTKSLRKKKEPIEKKVVSSKTKKVTKNEEPSEEEIDAPKPKKMKKEKEMNGETREKSPKLKNGFPHPEPDCNPSEAASEESNSEIEQEIPVEQKEGAFSNFPISEETIKLLKGRGVTFLFPIQAKTFHHVYSGKDLIAQARTGTGKTFSFAIPLIEKLHGELQDRKRGRAPQVLVLAPTRELANQVSKDFSDITKKLSVACFYGGTPYGGQFERMRNGIDILVGTPGRIKDHIQNGKLDLTKLKHVVLDEVDQMLDMGFADQVEEILSVAYKKDSEDNPQTLLFSATCPHWVFNVAKKYMKSTYEQVDLIGKKTQKTAITVEHLAIKCHWTQRAAVIGDVIRVYSGHQGRTIIFCETKKEAQELSQNSAIKQDAQSLHGDIPQKQREITLKGFRNGSFGVLVATNVAARGLDIPEVDLVIQSSPPKDVESYIHRSGRTGRAGRTGVCICFYQHKEEYQLVQVEQKAGIKFKRIGVPSATEIIKASSKDAIRLLDSVPPTAISHFKQSAEKLIEEKGAVEALAAALAHISGATSVDQRSLINSNVGFVTMILQCSIEMPNISYAWKELKEQLGEEIDSKVKGMVFLKGKLGVCFDVPTASVTEIQEKWHDSRRWQLSVATEQPELEGPREGYGGFRGQREGSRGFRGQRDGNRRFRGQREGSRGPRGQRSGGGNKSNRSQNKGQKRSFSKAFGQ

SEQ ID NO: 1729 - DNA, 2171 bp, Homo sapien
agcagctctgtaatgcgcttgtggtttcagatgtgggcggcctgtgtgaacctgtcgtgcaaagctcacgtcaccaactgctgcagttatctcctgaatcaggctgagggtctttgctgtgcacccagagatagttgggtgacaaatcacctccaggttggggatgcctcagacttgtgatgggactgggcagatgcatctgggaaggctggaccttggagagtgaggccctgaggcgagacatgggcacctggctcctggcctgcatctgcatctgcacctgtgtctgcttgggagtctctgtcacaggggaaggacaagggccaaggtctagaaccttcacctgcctcaccaacaacattctcaggatcgattgccactggtctgccccagagctgggacagggctccagcccctggctcctcttcaccagcaaccaggctcctggcggcacacataagtgcatcttgcggggcagtgagtgcaccgtcgtgctgccacctgaggcagtgctcgtgccatctgacaatttcaccatcactttccaccactgcatgtctgggagggagcaggtcagcctggtggacccggagtacctgccccggagacacgttaagctggacccgccctctgacttgcagagcaacatcagttctggccactgcatcctgacctggagcatcagtcctgccttggagccaatgaccacacttctcagctatgagctggccttcaagaagcaggaagaggcctgggagcaggcccagcacagggatcacattgtcggggtgacctggcttatacttgaagcctttgagctggaccctggctttatccatgaggccaggctgcgtgtccagatggccacactggaggatgatgtggtagaggaggagcgttatacaggccagtggagtgagtggagccagcctgtgtgcttccaggctccccagagacaaggccctctgatcccaccctgggggtggccaggcaacacccttgttgctgtgtccatctttctcctgctgactggcccgacctacctcctgttcaagctgtcgcccagggtgaagagaatcttctaccagaacgtgccctctccagcgatgttcttccagcccctctacagtgtacacaatgggaacttccagacttggatgggggcccacggggccggtgtgctgttgagccaggactgtgctggcaccccacagggagccttggagccctgcgtccaggaggccactgcactgctcacttgtggcccagcgcgtccttggaaatctgtggccctggaggaggaacaggagggccctgggaccaggctcccggggaacctgagctcagaggatgtgctgccagcagggtgtacggagtggagggtacagacgcttgcctatctgccacaggaggactgggcccccacgtccctgactaggccggctcccccagactcagagggcagcaggagcagcagcagcagcagcagcagcaacaacaacaactactgtgccttgggctgctatgggggatggcacctctcagccctcccaggaaacacacagagctctgggcccatcccagccctggcctgtggcctttcttgtgaccatcagggcctggagacccagcaaggagttgcctgggtgctggctggtcactgccagaggcctgggctgcatgaggacctccagggcatgttgctcccttctgtcctcagcaaggctcggtcctggacattctaggtccctgactcgccagatgcatcatgtccattttgggaaaatggactgaagtttctggagcccttgtctgagactgaacctcctgagaaggggcccctagcagcggtcagaggtcctgtctggatggaggctggaggctcccccctcaacccctctgctcagtgcctgtggggagcagcctctaccctcagcatcctggccacaagttcttccttccattgtcccttttctttatccctgacctctctgagaagtggggtgtggtctctcagctgttctgccctcatacccttaaagggccagcctgggcccagtggacacaggtaaggcaccatgaccacctggtgtgacctctctgtgccttactgaggcacctttctagagattaaaaggggcttgatggctgttaaaaaaaaaaaaaaaaaa

SEQ ID NO: 1730 - protein, 521 aa, Homo sapien
MGLGRCIWEGWTLESEALRRDMGTWLLACICICTCVCLGVSVTGEGQGPRSRTFTCLTNNILRIDCHWSAPELGQGSSPWLLFTSNQAPGGTHKCILRGSECTVVLPPEAVLVPSDNFTITFHHCMSGREQVSLVDPEYLPRRHVKLDPPSDLQSNISSGHCILTWSISPALEPMTTLLSYELAFKKQEEAWEQAQHRDHIVGVTWLILEAFELDPGFIHEARLRVQMATLEDDVVEEERYTGQWSEWSQPVCFQAPQRQGPLIPPWGWPGNTLVAVSIFLLLTGPTYLLFKLSPRVKRIFYQNVPSPAMFFQPLYSVHNGNFQTWMGAHGAGVLLSQDCAGTPQGALEPCVQEATALLTCGPARPWKSVALEEEQEGPGTRLPGNLSSEDVLPAGCTEWRVQTLAYLPQEDWAPTSLTRPAPPDSEGSRSSSSSSSSNNNNYCALGCYGGWHLSALPGNTQSSGPIPALACGLSCDHQGLETQQGVAWVLAGHCQRPGLHEDLQGMLLPSVLSKARSWTF

SEQ ID NO: 1731 - DNA, 1880 bp, Homo sapien
atgcaacaggacggacttggagtagggacaaggaacggaagtgggaaggggaggagcgtgcacccctcctggccttggtgcgcgccgcgccccctaaggtactttggaagggacgcgcgggccagacgcgcccagacggccgcgatggcgctggccatccaggtgaccgtgtccaacccctaccacgtggtgatcctcttccagcctgtgaccctgccctgtacctaccagatgacctcgacccccacgcaacccatcgtcatctggaagtacaagtctttctgccgggaccgcatcgccgatgccttctccccggccagcgtcgacaaccagctcaatgcccagctggcagccgggaacccaggctacaacccctacgttgagtgccaggacagcgtgcgcaccgtcagggtcgtggccaccaagcagggcaacgctgtgaccctgggagattactaccagggccggaggattaccatcaccggaaatgctgacctgacctttgaccagacggcgtggggggacagtggtgtgtattactgctccgtggtctcagcccaggacctccaggggaacaatgaggcctacgcagagctcatcgtccttgggaggacctcaggggtggctgagctcttacctggttttcaggcggggcccatagaagactggctcttcgtggttgtggtatgcctggctgccttcctcatcttcctcctcctgggcatctgctggtgccagtgctgcccgcacacttgctgctgctacgtcaggtgcccctgctgcccagacaagtgctgctgccccgaggccctgtatgccgccggcaaagcagccacctcaggtgttcccagcatttatgcccccagcacctatgcccacctgtctcccgccaagaccccacccccaccagctatgattcccatgggccctgcctacaacgggtaccctggaggataccctggagacgttgacaggagtagctcagtccgcagtggctacaggattcaggccagccagcaggacgactccatgcgggtcctgtactacatggagaaggagctggccaacttcgacccttctcgacctggcccccccagtggccgtgtggagcgggccatgagtgaagtcacctccctccacgaggacgactggcgatctcggccttcccggggccctgccctcaccccgatccgggatgaggagtggggtggccactccccccggagtcccaggggatgggaccaggagcccgccagggagcaggcaggcgggggctggcgggccaggcggccccgggcccgctccgtggacgccctggacgacctcaccccgccgagcaccgccgagtcagggagcaggtctcccacgagtaatggtgggagaagccgggcctacatgcccccgcggagccgcagccgggacgacctctatgaccaagacgactcgagggacttcccacgctcccgggacccccactacgacgacttcaggtctcgggagcgccctcctgccgaccccaggtcccaccaccaccgtacccgggaccctcgggacaacggctccaggtccggggacctcccctatgatgggcggctactggaggaggctgtgaggaagaaggggtcggaggagaggaggagaccccacaaggaggaggaggaagaggcctactacccgcccgcgccgcccccgtactcggagaccgactcgcaggcgtcccgagagcgcaggctcaagaagaacttggccctgagtcgggaaagtttagtcgtctgatctgacgttttctacgtagcttttgtatttttttttttaatttgaaggaacactgatgaagccctgccatacccctcccgagtctaataaaacgtataatcaca

SEQ ID NO: 1732 - protein, 591 aa, Homo sapien
MQQDGLGVGTRNGSGKGRSVHPSWPWCAPRPLRYFGRDARARRAQTAAMALAIQVTVSNPYHVVILFQPVTLPCTYQMTSTPTQPIVIWKYKSFCRDRIADAFSPASVDNQLNAQLAAGNPGYNPYVECQDSVRTVRVVATKQGNAVTLGDYYQGRRITITGNADLTFDQTAWGDSGVYYCSVVSAQDLQGNNEAYAELIVLGRTSGVAELLPGFQAGPIEDWLFVVVVCLAAFLIFLLLGICWCQCCPHTCCCYVRCPCCPDKCCCPEALYAAGKAATSGVPSIYAPSTYAHLSPAKTPPPPAMIPMGPAYNGYPGGYPGDVDRSSSVRSGYRIQASQQDDSMRVLYYMEKELANFDPSRPGPPSGRVERAMSEVTSLHEDDWRSRPSRGPALTPIRDEEWGGHSPRSPRGWDQEPAREQAGGGWRARRPRARSVDALDDLTPPSTAESGSRSPTSNGGRSRAYMPPRSRSRDDLYDQDDSRDFPRSRDPHYDDFRSRERPPADPRSHHHRTRDPRDNGSRSGDLPYDGRLLEEAVRKKGSEERRRPHKEEEEEAYYPPAPPPYSETDSQASRERRLKKNLALSRESLVV

SEQ ID NO: 1733 - DNA, 591 bp, Homo sapien
ccgctgtcaagatgcttctggccatggtccttacctctgccctgctcctgtgctccgtggcaggccaggggtgtccaaccttggcggggatcctggacatcaacttcctcatcaacaagatgcaggaagatccagcttccaagtgccactgcagtgctaatgtgaccagttgtctctgtttgggcattccctctgacaactgcaccagaccatgcttcagtgagagactgtctcagatgaccaataccaccatgcaaacaagatacccactgattttcagtcgggtgaaaaaatcagttgaagtactaaagaacaacaagtgtccatatttttcctgtgaacagccatgcaaccaaaccacggcaggcaacgcgctgacatttctgaagagtcttctggaaattttccagaaagaaaagatgagagggatgagaggcaagatatgaagatgaaatattatttatcctatttattaaatttaaaaagctttctctttaagttgctacaatttaaaaatcaagtaagctactctaaatcagtatcagttgtgattatttgtttaacattgtatgtctttattttgaaataaat

SEQ ID NO: 1734 - protein, 144 aa, Homo sapien
MLLAMVLTSALLLCSVAGQGCPTLAGILDINFLINKMQEDPASKCHCSANVTSCLCLGIPSDNCTRPCFSERLSQMTNTTMQTRYPLIFSRVKKSVEVLKNNKCPYFSCEQPCNQTTAGNALTFLKSLLEIFQKEKMRGMRGKI

SEQ ID NO: 1735 - DNA, 2416 bp, Homo sapien
cgatttcattcctcgctccccacaggtccctctccccaaaatattcccatcttgtcctagcccatcccccagactatctcaaggaccagctgtccccacgcccccgacctccactaggcctgtgccacccgctgcctgcaggaagacgcccggtcccgggccgggttagccccatgggaacgcagcgcctgtgtggccgcgggactcaaggctggcctggctcaagtgaacagcacgtccaggaggcgacctcgtccgcgggtttgcattctggggtggacgagctgggggttcggtccgagcccggtgggaggctcccggagcgcagcctgggcccagcccaccccgcgccggcggccatggcaggcaccctggacctggacaagggctgcacggtggaggagctgctccgcgggtgcatcgaagccttcgatgactccgggaaggtgcgggacccgcagctggtgcgcatgttcctcatgatgcacccctggtacatcccctcctctcagctggcggccaagctgctccacatctaccaacaatcccggaaggacaactccaattccctgcaggtgaaaacgtgccacctggtcaggtactggatctccgccttcccagcggagtttgacttgaacccggagttggctgagcagatcaaggagctgaaggctctgctagaccaagaagggaaccgacggcacagcagcctaatcgacatagacagcgtccctacctacaagtggaagcggcaggtgactcagcggaaccctgtgggacagaaaaagcgcaagatgtccctgttgtttgaccacctggagcccatggagctggcggagcatctcacctacttggagtatcgctccttctgcaagatcctgtttcaggactatcacagtttcgtgactcatggctgcactgtggacaaccccgtcctggagcggttcatctccctcttcaacagcgtctcacagtgggtgcagctcatgatcctcagcaaacccacagccccgcagcgggccctggtcatcacacactttgtccacgtggcggagaagctgctacagctgcagaacttcaacacgctgatggcagtggtcgggggcctgagccacagctccatctcccgcctcaaggagacccacagccacgttagccctgagaccatcaagctctgggagggtctcacggaactagtgacggcgacaggcaactatggcaactaccggcgtcggctggcagcctgtgtgggcttccgcttcccgatcctgggtgtgcacctcaaggacctggtggccctgcagctggcactgcctgactggctggacccagcccggacccggctcaacggggccaagatgaagcagctctttagcatcctggaggagctggccatggtgaccagcctgcggccaccagtacaggccaaccccgacctgctgagcctgctcacggtgtctctggatcagtatcagacggaggatgagctgtaccagctgtccctgcagcgggagccgcgctccaagtcctcgccaaccagccccacgagttgcaccccaccaccccggcccccggtactggaggagtggacctcggctgccaaacccaagctggatcaggccctcgtggtggagcacatcgagaagatggtggagtctgtgttccggaactttgacgtcgatggggatggccacatctcacaggaagaattccagatcatccgtgggaacttcccttacctcagcgcctttggggacctcgaccagaaccaggatggctgcatcagcagggaggagatggtttcctatttcctgcgctccagctctgtgttgggggggcgcatgggcttcgtacacaacttccaggagagcaactccttgcgccccgtcgcctgccgccactgcaaagccctgatcctgggcatctacaagcagggcctcaaatgccgagcctgtggagtgaactgccacaagcagtgcaaggatcgcctgtcagttgagtgtcggcgcagggcccagagtgtgagcctggaggggtctgcaccctcaccctcacccatgcacagccaccatcaccgcgccttcagcttctctctgccccgccctggcaggcgaggctccaggcctccagagatccgtgaggaggaggtacagacggtggaggatggggtgtttgacatccacttgtaatagatgctgtggttggatcaaggactcattcctgccttggagaaaatacttcaaccagagcagggagcctgggggtgtcggggcaggaggctggggatgggggtgggatatgagggtggcatgcagctgagggcagggccagggctggtgtccctaaggttgtacagactcttgtgaatatttgtattttccagatggaataaaaaggcccgtgtaattaaccttca

SEQ ID NO: 1736 - protein, 671 aa, Homo sapien
MGTQRLCGRGTQGWPGSSEQHVQEATSSAGLHSGVDELGVRSEPGGRLPERSLGPAHPAPAAMAGTLDLDKGCTVEELLRGCIEAFDDSGKVRDPQLVRMFLMMHPWYIPSSQLAAKLLHIYQQSRKDNSNSLQVKTCHLVRYWISAFPAEFDLNPELAEQIKELKALLDQEGNRRHSSLIDIDSVPTYKWKRQVTQRNPVGQKKRKMSLLFDHLEPMELAEHLTYLEYRSFCKILFQDYHSFVTHGCTVDNPVLERFISLFNSVSQWVQLMILSKPTAPQRALVITHFVHVAEKLLQLQNFNTLMAVVGGLSHSSISRLKETHSHVSPETIKLWEGLTELVTATGNYGNYRRRLAACVGFRFPILGVHLKDLVALQLALPDWLDPARTRLNGAKMKQLFSILEELAMVTSLRPPVQANPDLLSLLTVSLDQYQTEDELYQLSLQREPRSKSSPTSPTSCTPPPRPPVLEEWTSAAKPKLDQALVVEHIEKMVESVFRNFDVDGDGHISQEEFQIIRGNFPYLSAFGDLDQNQDGCISREEMVSYFLRSSSVLGGRMGFVHNFQESNSLRPVACRHCKALILGIYKQGLKCRACGVNCHKQCKDRLSVECRRRAQSVSLEGSAPSPSPMHSHHHRAFSFSLPRPGRRGSRPPEIREEEVQTVEDGVFDIHL

SEQ ID NO: 1737 - DNA, 1579 bp, Homo sapien
aattcggcacgagggcatggggcggctggttctgctgtggggagctgccgtctttctgctgggaggctggatggctttggggcaaggaggagcagcagaaggagtacagattcagatcatctacttcaatttagaaaccgtgcaggtgacatggaatgccagcaaatactccaggaccaacctgactttccactacagattcaacggtgatgaggcctatgaccagtgcaccaactaccttctccaggaaggtcacacttcggggtgcctcctagacgcagagcagcgagacgacattctctatttctccatcaggaatgggacgcaccccgttttcaccgcaagtcgctggatggtttattacctgaaacccagttccccgaagcacgtgagattttcgtggcatcaggatgcagtgacggtgacgtgttctgacctgtcctacggggatctcctctatgaggttcagtaccggagccccttcgacaccgagtggcagtccaaacaggaaaatacctgcaacgtcaccatagaaggcttggatgccgagaagtgttactctttctgggtcagggtgaaggctatggaggatgtatatgggccagacacatacccaagcgactggtcagaggtgacatgctggcagagaggcgagattcgggatgcctgtgcagagacaccaacgcctcccaaaccaaagctgtccaaatttattttaatttccagcctggccatccttctgatggtgtctctcctccttctgtctttatggaaattatggagagtgaagaagtttctcattcccagcgtgccagacccgaaatccatcttccccgggctctttgagatacaccaagggaacttccaggagtggatcacagacacccagaacgtggcccacctccacaagatggcaggtgcagagcaagaaagtggccccgaggagcccctggtagtccagttggccaagactgaagccgagtctcccaggatgctggacccacagaccgaggagaaagaggcctctgggggatccctccagcttccccaccagcccctccaaggcggtgatgtggtcacaatcgggggcttcacctttgtgatgaatgaccgctcctacgtggcgttgtgatggacacaccactgtcaaagtcaacgtcaggatccacgttgacatttaaagacagaggggactgtcccggggactccacaccaccatggatgggaagtctccacgccaatgatggtaggactaggagactctgaagacccagcctcaccgcctaatgcggccactgccctgctaactttcccccacatgagtctctgtgttcaaaggcttgatggcagatgggagccaattgctccaggagatttactcccagttccttttcgtgcctgaacgttgtcacataaaccccaaggcagcacgtccaaaatgctgtaaaaccatcttcccactctgtgagtccccagttccgtccatgtacctgttccatagcattggattctcggaggattttttgtctgttttgagactccaaaccacctctacccctacaaaaaaaaaaaaaaaaaa

SEQ ID NO: 1738 - protein, 371 aa, Homo sapien
MGRLVLLWGAAVFLLGGWMALGQGGAAEGVQIQIIYFNLETVQVTWNASKYSRTNLTFHYRFNGDEAYDQCTNYLLQEGHTSGCLLDAEQRDDILYFSIRNGTHPVFTASRWMVYYLKPSSPKHVRFSWHQDAVTVTCSDLSYGDLLYEVQYRSPFDTEWQSKQENTCNVTIEGLDAEKCYSFWVRVKAMEDVYGPDTYPSDWSEVTCWQRGEIRDACAETPTPPKPKLSKFILISSLAILLMVSLLLLSLWKLWRVKKFLIPSVPDPKSIFPGLFEIHQGNFQEWITDTQNVAHLHKMAGAEQESGPEEPLVVQLAKTEAESPRMLDPQTEEKEASGGSLQLPHQPLQGGDVVTIGGFTFVMNDRSYVAL

SEQ ID NO: 1739 - DNA, 1201 bp, Homo sapien
tttttcttcttctatcacagggagaagtgaaatgacaacctcactagatacagttgagacctttggtaccacatcctactatgatgacgtgggcctgctctgtgaaaaagctgataccagagcactgatggcccagtttgtgcccccgctgtactccctggtgttcactgtgggcctcttgggcaatgtggtggtggtgatgatcctcataaaatacaggaggctccgaattatgaccaacatctacctgctcaacctggccatttcggacctgctcttcctcgtcacccttccattctggatccactatgtcagggggcataactgggtttttggccatggcatgtgtaagctcctctcagggttttatcacacaggcttgtacagcgagatctttttcataatcctgctgacaatcgacaggtacctggccattgtccatgctgtgtttgcccttcgagcccggactgtcacttttggtgtcatcaccagcatcgtcacctggggcctggcagtgctagcagctcttcctgaatttatcttctatgagactgaagagttgtttgaagagactctttgcagtgctctttacccagaggatacagtatatagctggaggcatttccacactctgagaatgaccatcttctgtctcgttctccctctgctcgttatggccatctgctacacaggaatcatcaaaacgctgctgaggtgccccagtaaaaaaaagtacaaggccatccggctcatttttgtcatcatggcggtgtttttcattttctggacaccctacaatgtggctatccttctctcttcctatcaatccatcttatttggaaatgactgtgagcggagcaagcatctggacctggtcatgctggtgacagaggtgatcgcctactcccactgctgcatgaacccggtgatctacgcctttgttggagagaggttccggaagtacctgcgccacttcttccacaggcacttgctcatgcacctgggcagatacatcccattccttcctagtgagaagctggaaagaaccagctctgtctctccatccacagcagagccggaactctctattgtgttttaggtcagatgcagaaaattgcctaaagaggaaggaccaaggagatgaagcaaacacattaagccttccacactcacctctaaaacagtccttcaaacttccagt

SEQ ID NO: 1740 - protein, 355 aa, Homo sapien
MTTSLDTVETFGTTSYYDDVGLLCEKADTRALMAQFVPPLYSLVFTVGLLGNVVVVMILIKYRRLRIMTNIYLLNLAISDLLFLVTLPFWIHYVRGHNWVFGHGMCKLLSGFYHTGLYSEIFFIILLTIDRYLAIVHAVFALRARTVTFGVITSIVTWGLAVLAALPEFIFYETEELFEETLCSALYPEDTVYSWRHFHTLRMTIFCLVLPLLVMAICYTGIIKTLLRCPSKKKYKAIRLIFVIMAVFFIFWTPYNVAILLSSYQSILFGNDCERSKHLDLVMLVTEVIAYSHCCMNPVIYAFVGERFRKYLRHFFHRHLLMHLGRYIPFLPSEKLERTSSVSPSTAEPELSIVF

SEQ ID NO: 1741 - DNA, 1165 bp, Homo sapien
tctccctgagtgagactcacctgctcctctccggggtggtcctgtcctgttctccagcatggtgtgtctgaagttccctggaggctcctgcatggcagctctgacagtgacactgatggtgctgagctccccactggctttggctggggacacccgaccacgtttcttggagcaggttaaacatgagtgtcatttcttcaacgggacggagcgggtgcggttcctggacagatacttctatcaccaagaggagtacgtgcgcttcgacagcgacgtgggggagtaccgggcggtgacggagctggggcggcctgatgccgagtactggaacagccagaaggacctcctggagcagaggcgggccgcggtggacacctactgcagacacaactacggggttgtggagagcttcacagtgcagcggcgagtctatcctgaggtgactgtgtatcctgcaaagacccagcccctgcagcaccacaacctcctggtctgctctgtgaatggtttctatccaggcagcattgaagtcaggtggttccggaacggccaggaagagaagactggggtggtgtccacaggcctgatccagaatggagactggaccttccagaccctggtgatgctggaaacagttcctcggagtggagaggtttacacctgccaagtggagcacccaagcctgacgagccctctcacagtggaatggagagcacggtctgaatctgcacagagcaagatgctgagtggagtcgggggcttcgtgctgggcctgctcttccttggggccgggctgttcatctacttcaggaatcagaaaggacactctggacttcagccaacaggtaataccttttcatcctctttaagaaacagatttggaggccaggcgcagtggctcacgcctgtaatcccagcactttgggaggccgaggcgggcgaatcatgaggtcaggagttcgagaccagcctgaccaacgtggtgaaaccccgtctctactaaaaatacaaaaaaaaatcagtcgggcgtggtggtgtgcgctgtaatccagctactcaggaggccaaggcaggagaatcgctggaacccgggaggcagaggttgcagtgagccgagattgggccactgcactccagcctaggtgacagagtgagaccccatctc

SEQ ID NO: 1742 - protein, 296 aa, Homo sapien
MVCLKFPGGSCMAALTVTLMVLSSPLALAGDTRPRFLEQVKHECHFFNGTERVRFLDRYFYHQEEYVRFDSDVGEYRAVTELGRPDAEYWNSQKDLLEQRRAAVDTYCRHNYGVVESFTVQRRVYPEVTVYPAKTQPLQHHNLLVCSVNGFYPGSIEVRWFRNGQEEKTGVVSTGLIQNGDWTFQTLVMLETVPRSGEVYTCQVEHPSLTSPLTVEWRARSESAQSKMLSGVGGFVLGLLFLGAGLFIYFRNQKGHSGLQPTGNTFSSSLRNRFGGQAQWLTPVIPALWEAEAGES

SEQ ID NO: 1743 - DNA, 5029 bp, Homo sapien
cgaggctccgtgccccgccccccgggtgccccgcccctttgcgcggctggcgcggccagccggccaggctcccctcggcaaacctgtctaattggggcggggagcggagcttcctcctctgagggccgtgccgcgctgccagatttgttcttccgcccctgcctccgcggctcggaggcgagcggaaggtgccccggggccgaggcccgtgacggggcgggcgggagccccggcagtccggggtcgccggcgagggccatgtcgctgttgggggacccgctacaggccctgccgccctcggccgcccccacggggccgctgctcgcccctccggccggcgcgaccctcaaccgcctgcgggagccgctgctgcggaggctcagcgagctcctggatcaggcgcccgagggccggggctggaggagactggcggagctggcggggagtcgcgggcgcctccgcctcagttgcctagacctggagcagtgttctcttaaggtactggagcctgaaggaagccccagcctgtgtctgctgaagttaatgggtgaaaaaggttgcacagtcacagaattgagtgatttcctgcaggctatggaacacactgaagttcttcagcttctcagccccccaggaataaagattactgtaaacccagagtcaaaggcagtcttggctggacagtttgtgaaactgtgttgccgggcaactggacatccttttgttcaatatcagtggttcaaaatgaataaagagattccaaatggaaatacatcagagcttatttttaatgcagtgcatgtaaaagatgcaggcttttatgtctgtcgagttaataacaatttcacctttgaattcagccagtggtcacagctggatgtttgcgacatcccagagagcttccagagaagtgttgatggcgtctctgaatccaagttgcaaatctgtgttgaaccaacttcccaaaagctgatgccaggcagcacattggttttacagtgtgttgctgttggaagccctattcctcactaccagtggttcaaaaatgaattaccattaacacatgagaccaaaaagctatacatggtgccttatgtggatttggaacaccaaggaacctactggtgtcatgtatataatgatcgagacagtcaagatagcaagaaggtagaaatcatcataggaagaacagatgaggcagtggagtgcactgaagatgaattaaataatcttggtcatcctgataataaagagcaaacaactgaccagcctttggcgaaggacaaggttgcccttttgataggaaatatgaattaccgggagcaccccaagctcaaagctcctttggtggatgtgtacgaattgactaacttactgagacagctggacttcaaagtggtttcactgttggatcttactgaatatgagatgcgtaatgctgtggatgagtttttactccttttagacaagggagtatatgggttattatattatgcaggacatggttatgaaaattttgggaacagcttcatggtccccgttgatgctccaaatccatataggtctgaaaattgtctgtgtgtacaaaatatactgaaattgatgcaagaaaaagaaactggacttaatgtgttcttattggatatgtgtaggaaaagaaatgactacgatgataccattccaatcttggatgcactaaaagtcaccgccaatattgtgtttggatatgccacgtgtcaaggagcagaagcttttgaaatccagcattctggattggcaaatggaatctttatgaaatttttaaaagacagattattagaagataagaaaatcactgtgttactggatgaagttgcagaagatatgggtaagtgtcaccttaccaaaggcaaacaggctctagagattcgaagtagtttatctgagaagagagcacttactgatccaatacagggaacagaatattctgctgaatctcttgtgcggaatctacagtgggccaaggctcatgaacttccagaaagtatgtgtcttaagtttgactgtggtgttcagattcaattaggatttgcagctgagttttccaatgtcatgatcatctatacaagtatagtttacaaaccaccggagataataatgtgtgatgcctacgttactgattttccacttgatctagatattgatccaaaagatgcaaataaaggcacacctgaagaaactggcagctacttggtatcaaaggatcttcccaagcattgcctctataccagactcagttcactgcaaaaattaaaggaacatctagtcttcacagtatgtttatcatatcagtactcaggattggaagatactgtagaggacaagcaggaagtgaatgttgggaaacctctcattgctaaattagacatgcatcgaggtttgggaaggaagacttgctttcaaacttgtcttatgtctaatggtccttaccagagttctgcagccacctcaggaggagcagggcattatcactcattgcaagacccattccatggtgtttaccattcacatcctggtaatccaagtaatgttacaccagcagatagctgtcattgcagccggactccagatgcatttatttcaagtttcgctcaccatgcttcatgtcattttagtagaagtaatgtgccagtagagacaactgatgaaataccatttagtttctctgacaggctcagaatttctgaaaaatgacctccttgtttttgaaagttagcataattttagatgcctgtgaaatagtactgcacttacataaagtgagacattgtgaaaaggcaaatttgtatatgtagagaaagaatagtagtaactgtttcatagcaaacttcaggactttgagatgttgaaattacattatttaattacagacttcctctttctaagattttgtgaattggttgaatagttctatacaaatgaagtatggaggtgtgtatgtttatatgtatataacaaaatattttcattgtgaccactctgaagtaagagcaatgggaatggcattattgtagaataagtcattgtatttttaacaccagaaagaaccttgccgatcaccaggcataacctaattttatccatggaagaaacacagaaaggcatctaagttagagctggcaccagaactgagacctccagaaatctattccagtattttttccactacacaactgccttcctgacaggttctgagataagtgttatgtttgtagatagagtgaaatatatttatatatatataaatatatacagatacatatctgtgtattatctcaaggaatgtacaaactttagtttttgattataaggacttcactgcaagttttagttaagaggtttgtatataaatctgttatagaacaggctgaaatttcttgttcataagattatgaaaccacatgagaagtgataaaatgtttgttaaagctagatagaggttaagaatcaagatataatggataattttcatagctgcctatcagaatttcccaaatatttagcatcttccttgataatatgtattttcttcttgaatttcactggcctaatgagataatactcttatctttggctctacctaaaagttggttaaaaatgcaattggcattaacaaggaaaaatactgaattagtaattttaaaagtctcacaaagaaaatcccaggcctagatggctgcattgttgaattctgccaaacattaaaattagcactaattttttgcacactgtttctaaaagtaggagaggaaagaacacttcccaacttactctaggtcagtattaccctgatactagactagacatcacaagaaaactataagccaatattccttattaatacaaacacaaaaatcattaacaaaaatattagcaaactgaatccagcaacctataaaaaggattctatatcatgaccaagtggaatttatcccaggaattcaaggttggttcaacatctaaaaatcaaataagctaatatacagtcagttctcattattcacagtaattatgttctacagaatattctcccataaacactgaattaaatatggaacaactgcttttaggagaaagtgtatttgtgtatatgtgtgtatacatatgtttatctcacacacattatgagcttgaattcttaattcatcctagcaaattctaccttattttacagaagtgaaagtgaggtatcagaagtgttaagtgacatgcctgaggcacccccctaacaggtgtcagagctgaaattcaaaccccatccagctggccccggagccagagcttcttgtactacacagaattgcccctgccatttccaccctccagtcatttctctatgagactgaagcaggaaggcagagcatcatcttgttcagcctcagctgggaacatgtgtactgggtgactcaaatttttcacccatttacacatatccacaaatgactgcaaaagtgccacggatatcaatttgagggttataaattttagcaagttggtaaattcacaaatacataaccttgaataatgaggatcaactgtaccatatttaataaagcacaaaacccacacagattgtcttattacagcatttgataaaatccaaaactctttcataaaaacactcaacaaacttaggaataaaaggaatcttcctagatatgataaatataacatctatgaaaagcccacacctaacattatacttcatggtgatagactgaaggctgaatgttttccccttaagattgggaagaaggacaaggatgttcactcggcactacttctattcagcattgtacttgaagttctagccacagcagttaggttaggaattcaaggtttgttcaacatctaaaaatcaaataagctaataaagaaaagaggtttatactgcaaaagaagtgaaactatatgtattcacagttgatacatagttgtatatagaaaatgctaaagaatccataaaaagtaataaatgagttcaacaggt

(The sequence listing continues in the following parts.)
